United States Patent Application Publication US 2008/0039413 A1 - sequence listing, part 12

SEQ ID NO: 1462 - DNA, 73359 bp, Homo sapiens
tttgaggttacttagttgatacctccaagcccgaaaagacctcaacctttcttggttttggaagtccttctttttctccttacacagcccattgctcgtgagcacacacagatggtccaaggaatgacaggcttcttttgtgatgggtgttgactgacacaaacgtggatagcttattaggtcacaaggtaccatcttttcttggcacaggcttatggcactcgttattgccccaggagcccacagacccgtcaccacattacttttggtctgcaggctcttccacagactcgggtgctcttcaacctttgccgaacatcagaatcacctggggcaactgtccaagatgcaggccccagggccctgtgccttggggattttgaggctggtggtgcacagcctgtcctgggagaagccctgctgcagcccttagctttcagcttccagtgtgtcacctccatgctccccaccctccagggtcttctgaagcctttatttttgctctgatgtggcccccttcagggccaggtttatcctttttgcttcgggtggattactggttcagtcacctatcacaccatcctgtcagtactctcttttatagttctcctgctctcttcacattttttttttaaccactcatagttcctcataattttgctcttcctcctgcttccatcccccacctaaccttctggataaaattcactttgtgtctgggcacaatgacggatgcctgtaatcccagcactttgagagactgaggcaggaggatcacttaaggccaggagttcaacaccaacctggacaacacagtgagacccccatctcaaaaaaaatcatctctataatgtctcctttagatagacagaacaaaaacatttacatgttaagagaaacttctctttaccacccttaaaatatttaaaataccaaagatctcatatttatatgattaacagagaaaactcagacccatgggccacccaggaacagtgacaaaatctacttcaaagttgttgctgtggctgagtcactgtctctgtaatcggggagctgttcccaagctgccttcactgtaacgctgagaaccctgaagaattttcactatttccagtcaccgttactgtgacagggctctacgttagcagttttagagtcacctacattccttattttaaatgaaaattgaaatgctttgaagatttatatttaccaaatgagctgaggaaaaagtaagtgcttaaaatatattgcaattgcaggaatgaaaatcatttttaggtataaaattgaatttttagatttcaatcacttcctactcatttaaattctttcagtaaaggtctcaaagctttaaagggaaaagagagcagaactaagaattgaaccatttaaaacttggtgagacaggtaataaattatacctgaatcatttaatggtttagtagtctggcgtttaaggaatcttctacaaatgtggtgttgggtagtatcacctgaattcagctactttaataaagaactatactttcatagagaggaaggaaaaagcgatggatctaatcttgacttcaggtaaaacagctcccccgcgcccaccaacgcggtattactgccacctagtgatagcatatcctcatcacagaggtcctgcctgtggaagtggaggggaagaggtgtagtaagcacagccagtagggcgaatccacaaattaaatacacccgggggttgggggtggcgaggggagcgctagagtaaggctatattttctataatgtccattctcattgcttccagggctattttaagaaatatttattttgatggggtttcaaagtaagtcatatgaggacctgtaagccacagtttttactcccgcggagtttgttttacgcaggcttcaaatggacaaataacatacatctgaggttcaagctttctattaatttaatgctggcctggaaaacattttgtgatttaaaagaaagcaccaaagttagctgtattattactggactcagcaaggaaagaattgggctcagtcagaagtgccagaatccctgtaactaggggtgaaatctcaggcaagtatcttaatagtttccaaccccacttgcccaacctgttaaataggggaactgaagtaggttccctctaagatgctctccatgaaaagctctaagactcctcttattcatttctgaagtcctaccccaaggtagaccaaacgttctgacattttggctgagctgctccattcacacacattatcatgaacgatttcaaattttacccattttcaaaagctgaatctaccctggtgcttcgtggaagctaagaatctgggagatatctcagctggccagttggtcaaattatctttgttatttgccattagctcccgttagttaacacagcaatcttttcagatgaagtgtggacaagaagacaaaaagtatttggatagggcccacaggatccaaaagtgcgtaaccttgtttaatttcatttggttgagttagcagctacttttgcagacttaaatgcaaaaatgctggtgtgtttgaagtttcatttttgtccaggctttcattactcagaaatcagtgctgacacaattaagcatgacctttccatgcagatggtgccttgcttcaccagcacaaacagcatctgccacactcacccacaagtgcacatgtttgcatatttttaagacactgcatctaaaaatggtaaagtaagtgctgaagtaaagcctttgcggaagggagcataatatcacttaatctgtttgcattacctgttaagaaagccagagtgaagttctaggaaattaggagacatgcaaaacacagcactcttcttaaaccacacatgtgctctcttaacattattggaataatgtattaacactgctctatctgaaggcatgttgatttgctgtgctaagaggtgtttggttaaatataaatcatccccagcttcagcaagaaagcctaatatatattatgtatgtgtgcaggatagcttcagcaaccctgggtatttgtttctaaaaagtcacattatttcaaagttaaaagggaacttaaaagtgacttagaataactttccttctaatataagaatcttttttaccagtgacatacaaaggtgagggggtgcttgggagcactttaatccctggtatagtcaataacaataaagaaacaggctgtgcgttgtggctcatgcctataaacctaacactttgggagcctgaggcgggaggattgcttcaacccaggaattcaagaccagcctggaaagaatggcaaaatcgtgtctctaccaaaaaatacaaaaataagcctggtgtagtggtgcatgcttgtagtcccagctattcaggaggctgaggtgggaggatggcttgagctgaggaggcagacattgcagtgaggtgagatcatgccactgcactccagcctgggtgacagagccagacactctctaaaaaaaaaaaaaaaaaaaaaaaaaagaaagaaagggaataaagaaacaatgataatgataaaaccaatgagaagtcattctgctctttattatcaccagaaaccagcaattctaaccaatgtcaatgacagaatatacctctcagcagaggcaaaccattcctcactccctaccaaaaactgaacatttgtgtcccacaaaattcctatgtaaaagcctaatccccaatgtgatggtatttggaggtggagcctttgggaggtgattaagtcataaggtcataattctcattaatgggattcatgtcttataaaagaggtcccagggaacttcccagcccctcccaccatgtgaagacacagcaagaagacagccagcatctatgaaccatgaatcaggcattatcagaccccacatctgctggtgccttgatcttggacttcctagactccagaaatgtgagaaataaatttctgttttgtgtaagctacccagtctgtgggatggggtggggagagtgacccaggacccctagtgatgaaggtggggagagtgacccaggacccctagaaatggggtaagggaagagtaacccaggacccctagggatggggtggggagagtgacccaggaccctagggatggggtggggagagtgactcagtacccctagaaatgggatgaggtgacagtgacccaggacccctagggatggggtggggagagtgacccgggacccttagggatggggtggggagagtgacccacgttattcacagtcatatgaataagaaattcacttctgtgttgaagtgttaaattttgggtctttctgaagtagcaatttagcataccctgatgaacacaggagagaatgaggcagagtgaaaagaaccttgagtgaaaatgttatgtgctagttattcatcaattggcttcagctccacttctgacctcctctcctcgcctggtatcataggggactggaagcccacaaactacatttcactaattcccttgccagctgtcttccagaaagaatttgctaacaggaagactggagaagggtagaaatctggggtttttttgtttttgtttttgtttttttcttccttaggcagtgctttcagcaccatgagcagccttcagcaatggtgggcagctgcatgctccaaaagcctcagtcccagttttcagctgcatcaacagagttgtgtccttctggtcccacagaccagcagtggcagctaaatgtctacagtggcttctcttttcttaactggatagtgactgatgcacataaattctcttcctggtgctgctaatttctgacaattttcttaacatttctgagctccaattttcttatctattaaaaaataacaagaatagcaatacctgctctgtgtcaataacataatgttcatgatatacaaatgaaaatgattatgaacactcataatctaaagaaatgtatttttatggatcctggttaagtttgctgttattggtcatgtctttctctttctagacctccaggagcctattgaatgtttctaaattgtgatccagtcaaatatgttagttattttttcatttgaaaagatgaatatagcctgcaccaacagggggagctgttcttttataaccactgagagtggctgtatttcttctttgagggcaaagctttaattgtttcaacaccagctactgggaaatgtcaccagtgaaccaattagcctggcttcctgaaccatgtagaactgattatccaagtcaggccggcaatgggcttgggcacagggtatatggtagacacaaatgaagagtgacctcaatgtcccattaatgttacttgacttgtgctcacttgacctcaggttgcttgtaaaaaaggtagggtcttagccctttctccctgaaatcctccccagtgatttctgggaagggctggctttttatttcactttagctttctcgttaggtaggtgactttgcatagttaccttcagtggatttactgtattatggtttttaggttgctcttaaagtgagaaaaaaatgtgcttgaggtagaccaggtagcccttttgatacttttagccaggtaattctttattgtgggggctgtactgcacactaggatattcagcatcactgcacactaaatgccagtaggctccccaggttgtgacaactaacaatgaaaaccacctcaaaaatgaggacccaattgagaaccaccattttaggggctatggatactatatcagtgaaggttctccagagaaacaaaaccaatagtatgtatatatgtggagtgtgagagtgtgtgtgtgtgagagagagagagggtgtgtgtgtgtgtgtgtgtgtgtgtgtgtgtgtgtgtgtgtgcgttgtataaaataaggaatttcctcacataattatgtaggctggtaagtccaagatctgcagggtgggctcacaggctggagaactagttcaagtccaaaggctgtctactatagtaccaggaagagttgatgctgcaaatgaagaccaaatgcagtctactggaaaattatgttgctcgggggaggctggtcttttggttctgttcaaattttcaactggttggatgaggtccacccacgttatagagagcaatctgctttactcagagcctaccatttaaatgttaattcactcaaaaacactcttatagaaacaccccgaataacatctgaccaactatctgggcaacccgtggtctggccgagttgacacgtaaaagtaaccatcaaagatataaggtgatcaagaccctggaagtccctgcctctgggagctcacattctaggcattgacccagatgataggcaagtgtttcagttatctatcgctggctgtattagtccattttcatgctgctgataaagacatacccaagactgggcaatttacaaaagaaagaggtttattggaattacagttccatatggctggggaggcctcacaatcatggcagaaggcatggaggagcaagtcatcttatgtggatggcagcaggcaaagagagcgcttgttcagggaaactcccatttttaaaaccatcagatctcatgagacctattcactatcatgagaacagcaggggaaagacccaccccatgattcagttatttcacactgggtccttcccacaacatgtgggaattatgggagctacaagatgagatttgggtggggacaaggagccaaaccatatcactgcctaacaaaccatcccaagcttcatggcatcaaatagcaaacatcttattaagtgcatgtattctttagatccaaaattcaaacagggcatggtttgtctctcctctttgatgtctggggcctcagctggcaatatgcaaaccactaggagagagtgatttgaatggctggaggctggaatcatctgggggcttcttcaatcaagtctggcacctggactagaatgattcaagctgggattatctgggactgttgactggagcacacacatgaagcattccacgtggcttgggcttctaggcataacaattatgttcctaaggggaacccctgaaagtaacatttggagagtgagccttccaagagaccacaatagaaactgcaaggcttcttctgacctagcctcagaagtgatccagtgtcacttccaccacattttattggtcacaagtgaatcacagaggccaggccagattcaaaggaggggagttaggtgctgcctcttgacagggagcagcaaggtcacattgcagaagagcatgtgggttgggagatgtatgtgtgtatgtatgtatgtatgtatgtatgtatctatctatctatctatctatctatctatttatctatcatctatctactatctatccatcaagagaatttgccacaagtaagcaaatattctatataatttcaggtagagctaaaaacagaagtggtatttagactgttacagatacaaaggatcttctggggtgataaaaaccattctaaaattgtattgcaatgatggttgcacgactctgcaaatttactcaaaattattgtacacctaaggaaaatgaacattatgatatacaaattgtacctcaatatacctgttaaatatacaactagcatgccacaggcactgaaggataagaacagacatgatgctggccttggttccaaaacaaggttttttgttttttgttttttgttttttttgagacgaagtctcactctgctgcccaggctggaatgtagtggcatgatctcagctcactgcaagctctgccttccgggttcacgccattctcctgtctcagcttcctgagtggctgggattacaggcgtccaccaccatgcccggctaattttttgaatttttagtagagacagggtttcactgtattagccaggatggtctcgatctcctgacctggtgatccacccgcctcggcctcccaaagtgctggggttataggcatgagccaccacgcccggcccagaacaagattctaaatcccctttcagttacacagcaatagatgtcccgggagggatgggctccagcattttgttgaaactatctagcaagcctcctgcagctgttaccactgcaaaactaagtgtgtagttagtggagtgggcggggtggtagggatactgtgaaaaattgagtaaatgacaaagtgggacaatgacatcaaaggagagggcaacagacaggacagcaacatgaggaagggcaaaaggcaggaagattcagccagaaaagcaggacgatcttagaaaattctgctacttgtacttccaaaaaagttaagaaaaagaacaaccagaatttgctaaaaatgggaatgaaatagatactaaaacaccaaataaagggctctagagagggaacaggaactctagtgcccaggctgttcccctgtcactgctgtatgcatattcagtatctccctggcctgcactggcctctctgttcaagtgggccctgtccttctctgtgagcaaactgtagccaaaagaatttaagtgctcatttagtcagttatatatgtattatcagagcttagtcttcagcagactgcctccagacactcaggaacttcccactggcaaccagtgttacccgggtctcaccgatcccgggtgaacagtggtaatagggaggaagatgaaggatagaaccattgcacagcagccttttgcaatcatctagtcctttaggaacagttctgctgtgctgtttagtcctcaggccacactgtgagaacaagttacagagcactgtggtgagtgctgaatgagtcagggagtagagataggaagagagagagagaaagggagagggagagagagacctgtaggtacatagaaaaggcaggaagcaacatatgtccttgactcatttgatactgcactttgttccacttcccaaggattcagtcactgcaatttacctttagcattccaggcagatagaatcctgctctacatatgaatctgggcacaaagccatgcaggtgtgagtaagcccatgaaggaagtggcactcaaagactctaggagttcaggccaggtgcagtggctcatgcctataagcccagcactttgggaggccgaggtgagtgtatcacctgagggtgaaaccctgtctctataaaaacacaaaaattagcagagcatgatgacgggtgcctgtaataccagctacttgggaggctgaggcagaagaatcacttgaaccctgggaggtggaggttgcagtgatctcaggtcatgccattacactccagactgagtgacagagcgagactgtctcaaaaaaaaaaaaaaaaaaagactccaggagttctaatatgccccattaggtgggcaccagaatggccccttgtaactttttcctaccttctcctctcctaattctttttctgtggaggaaacaataattgtctctgaatcatccctattcggagcattgaggatatattagaaggtctgggtaaacaagcagaaatattgcaaaagtgctaaaacatcaaacttcagggtcgaatttgtggtttgcttctgctttttctatccactctaaaggtgttcctgatagagaagcttcctcagtgttccctgtgttggtgtgtaagacagaaagaagatggggtaaaagagtgcacgcatcctccactacaaaccagaggctgatagcattagggagaagctagggtttggcctcacacaagcagtttgcactgttgtccaatcccaggtggggtggttgcctcttcatttcctttgatagcaaccgcctgttgcgtgatgtagtgtgggtgtcctcagaggtagctacctaagtttgcatacttcctgactgacagaacactcctgccagtgcctccaggccagggtggtggtgttggtgggaggagtaagtaaccaagtttcacttccttgccttggagactcagagccatagcaggctgctgtctcacagagcgagaaggtgtcaggagcagcccagttgtgtctctctctctacctctgtgaagggcgcgaatgggcagagcagaacttctagaagggaagatgagcacccaggatccctcagatctgtggagcagatccgatggagaggctgagctgctccaggacttggggtaaggcagcagatctcctttcaaagtacctagtgggtggacattgactccgcactcccacctgcatgctttgattaatgactatcttcagtgccttgttgccctctgccacctcaaccatttatttttttccactttattcatttgtatctgttaagtatcttcttgtctggggctaattccattggaaaagcaggcattatttttctagatgtgaaaacaagttggttgagaaaatagggaaaaaaatcaaatgttggacattctttgagaagagggacagaattgggatatagaggtgatgttgcctggcttccttgatgttgctctggtttatgaataaatgcgctgttcaagagtttctagcactgacccagggacagtaaaaggactgtgtttctggtaagataaacagaaagcttaccctactgtaagggagagggactttttcaaaagacagagaatgaggaagttcctgcaacagtctcgcttgtatatttctttctcctgatactgcatttgtgagatttgatatcgtatgtatgtccagagagccaactttgagcctttcagtaccaacaatccaggaagaggataaaatttctgcttcaaacaggtaagcataggtaggtggagtcattggagctctgtctttaagaagggacccagatgacaactcatccgggtatttaataagaaacaagtattacacaagagaggaattggggatttcccagagaaactgcctaatgcactgggaatatcccaatgaaggtggctttgacacctgtgcatgaggagaggcaaaacctttaccttctgcctggacaaatagctctaactcttcatagcaatccaatgacataggagctgttgtcatcttcatcttacaaaggatgaaaacaagtaccaaacaggtttgaataacttgcttgctagtcacacatcaattacatagcaaagctgggcatccaacctaccacaggctatgtccgaaaccaaagaaaaaccaaaatagagttgaaatctctctgtgttaaggctgcagagattgtatctttttatgttgtattactgtaaaagtttattaataattcctgtctttagattataaaactgaggtctcggaattgaactctactttcatttggcaaatcagataaaacacctggaattttcattaaagaaaactccccttattaggaagccagagctctagaatctctctatccctctagattgaatccccaaacagaagaggtaaaaggcccttctgtgagcatccagcacaggtgtcaccaagtccaaaagctaaagctgaactgtggccctcagtgtcttattgaactattaagttacaatgctttacatgttctgttaactgtattcccagcccactgtaatagaaaaccccaaaggaggagatagaggaatatattcaattctggtcctttagttaaacaaacaatcctagaacccagagtctatggttgagtactgtgggaacacacttagatgacaaagatgaattagatgctgtctctgtgccccaccatgatgtcaacagcaagaagcaactacaggtgaaacccacgggtggaataggactgtgtctttcctccatgtgcaaagaatagacattgaatacaaaactgagtcacaccacttccctgcaaaaaaaaaagggtacattcatggccagatttccctatttcagaaggcgtgaacaattaataaacatgaggatgatttctatagcaatgggcaacctgcagttatctgggaaaactgctctacagtcctggttcttgaccttggctgtgctctggaacatcttgacacccaaaccacagacttgacaaatgatttcagtatctctggggatgggtgttttcttgtcaaactctccaagtaattccaaagtgagaccctaggttgatgatcactgcatagaatatgtatctaccaaatgcattaggtaaatgtggtcttgtttttcattttaagtctgttgggtgtgtacttgaatcttaaaattactaataaatgttgatattttgtttgttggtttaggggcatttcgattagcaactttattgaggttattttacatatcataaaatatacccgtttcaagtgtacaattcaatacttttgactaactttacagagtgatacaaccatcaccataaatcagttttaggacatttctgttctcccaaaaagaaccctcagatgtatggcttatttaagcatactcaacagtgtgctggaaaaacagctgggaagagttggggtgtggagaaagccctgatttcaagaatttgcctaattccctggtataaatactcccactatagacaatttcaagctgccaacaatttaacatcatcgaattgaatatttaataatcaacttgtgccagtacttgctcctgcagcacctcactgatacattttttatagataacaatttgagaactcttgacaatgacttgttgcctctgccagaatactgaacataactcgaacattataatgactttttctttgaacctttaaccactggcgagatagaatctctaccaaaccttctgattaatttagtttccaaagacctccttaaaaacaaaatgatttaatgtaatggatagataaaaggtagctggttttaatgacttaatttttcaattatttttaagaggttatttgagtagttagataaatccttacgtttatgtttttgatagacataaacagataagttagtggttaaattacagaaatagcagaagtctttgttcttgggcctctgtttttttcaggctctggaatatgtaaatcctgtaaattgagccctgaactgcagcaaatccatcacttgcctttccaggacatatacaacttgctcagagtacaggtttattattttctaaaatacctaaatcaagcaacacagtgcttttccatgtctcatttatagagtgtcagcctaaaatcattaattttctttcatctaaaatacattaatgtgtccagaagcaaaggagaaataaaaccatcttaaattgttgctcagcttcgcttacacttctcaggggagggtatgggcttagggggaagagaggtgtggggagggcaagaagtgagggtgtggagaatcaggggagaggaaggaggtggaccatgaacgaggagatgggtcaggctgtttgctgcttgcaaaatgaaaatatggcaaaataaaacaagtaacaaatactggagatatcacctaagtaacaaactggtaaagaatagctagttaaattactgaaaattccagcaattctttggctttaacaaaggttactatactatttctacatatagctatatatatgtataaacacaaaagaaataacaaaatgaaagtgttttagcatactttaaaattaaatattcaaatgatctagtcagttgtaactccaagtgagaaacataataaacgttctcttttttaaatactttctcaaatcgaaagttgtataagaaagtgccagtgtttggctggattggccagtgccaaagaactagattccaagctctgaatatttaaataaattgataactaattagtcacatataagagaagtttagagtagaccatggagcagcaaaccttttttttataaagggccgggtaacgaatgttttaggctttgcaggccttacagtctctacctcaactactcacatctgctgttgtgcaaaaactaccagagaacacagaaacaaatgaccgtgatggtgttcaaacaaaacgttatttatacactgaaatgtgaatttcatataatttttatgaatatttttctatttccctcaagcatttcaaaatgtacagccattcttggctcccagtccatactaaaacaggtgtctgacaggaattaaccctcagctggtggtttgctgacccacggaataaatgataataaacaaaatgagtccgtattataaggcaggcattttgtagacaccagctctggtctttgaaaggcactggtattccagctttacacaggaagagactcaagagcagaaaaatcaggttgcctacagtctctgagtgtctgtgttcaaaacccatgctgacttcacaaaccaggttgtttccctgctgtgatagtcctaatttactgaccacctactatgcatcagcaccataccattcacacgcataatgccatttaggcttcacaataacactttcaatacgatatcaccatactcatttcatagacgcaaaaggtgacttcaataagctaagtatacgatccaggtcacagactttgtaagtagtggagctgagagacacacctaggaacttaccccagagctttccactgcatggtgctgctttgtagagcccactggtcaaaggtatgtattctagtaatggcaattagtaattattggatgcttatcatgtgccaagcactagtttaagccctttgcccatgtgaacttgtttaatttacacattgctgtgaggtgggtattattactaatgttgtccccatttatagatgagaaaagtaaagaacagagttttaatcacatgctcaagtttccattctaacataccttcaaatccaagagttttgctccagagccttcatgcttgactgctgatgtaacctcctggttttcatcaaatttctctcatcttactatactagtacatgttcatagttcttaatatgaactgagagaagcaaagaaagttctgtgattataacaaagtttactataaaagacattattctttctattcctcacataatatacatgcacatgtacacaaagccaggccagcattctagttaatcagaacattattgaattttgtgtagaattcattttcaggactagaaaaatttattcagctaagaaacgtaaagtcaaaatttcagtggaacctgtttacagcggtgtgacactaactacagcaatacagcttgttcctcttctgtgcacagctctgtaatcttggattctaaaaacggaaggtggttcttctgtggttgtataattagtatgtaactagtgtacagttccatctcttcataactcaagtgaatttcctcttcagttgtggtgtttttctgttcctccaaagggtgacttccttctacttacaagtggaaatctgtcccacagactgtccatgttgtggggagtcactttgtttcattcattcactcttctactgggtcatagatctatctgttgtatgatgacgccaggcaaggcagcatagaggagactacaataaagaaggcatggctgtgcagagatggaggattcatatgcatgtagagttagaatgcagtgttgtgtgggctgagggctgtgacagtgtctagataaaacaatctcctatggaaggctatcttctccacagtagaagtggagaagatggccttggagctgatatgatttttgtcagttgaagttagaaaaggtgaaattttctacagagaaaatggcctgaataaaggagtgatggtagcaaaatatgcaaggattcagaattgaaaaagctcacatgaactcagacccacccagtccccaagacccatctggtttgtcagcattctggtggtctggttctggtctctacctctatccatctcatcctatgagaagcttcaacttggcttttctcttgtacttctgttttcatgaccatactcttagatattttgttaaaacctgcattaatttctggctcctaccaactcccgtagaggataaattcctattctgagcccatcgacctctgtgtcctactgcctgatagaggcctgcctctaccaagagcacagtgaacactgctgggccttatcagtgttcgctgctcaccacttgcttctttatggtcatgcttcccctgaccctgcccactagcacctgcccccattatctgttgttagaccttctttgtttaaaaatgtttataactttaaaaagtgtaagagtaatcacttgttttaataacagtatgatgattatgtaaaagaatgtcacttttgagagatgcatgttgaattatttagggttaaagtgtcaggatatctgtaatttactttaaaactgttcatcgaaagagtcaaaattaaacgttgtattaaaaatgtggcaaaaggttaaaaattattctacctgaaatatgggtattatttcaatgcagtaacattgatgctatttttctactttccagtatatctgaatttatttataataaatagttgaaaataatagtaatatatattaattatcaaaaattagagagatgaagagaagcatcaaaatataaagaaaagcactaaaatgtcagccatgtactactacctaaaataacattgttcatcttgattctagtttttaagaaatgtttttctgtacacacacacaaacatatatagagattgaattgtaatcatattatatgtataattttgcttttgctttttggtaggatatttttccatcatctccttcttgatctgtctcaaagtaggctcttgcttccctctgaaagcatggatatttaggttgatctagattctggagggcctaaaatagatttggtcaatgaacaatgtggactcactgaaggttcataggaatgtggaattacatagtcatcatgttttgtttttaggtagattaatctgatagttcagcatgatgggtggcaatggggctagagccaagatagtgggttagtgagggagttttcagattggtgagtaggaaactagagtgctaacccgggaatagtcaggaaggaacaagggtagaatccagcaattccattgagctaagcaaaataagcgactcatgtccaaacaaaactagttctgcttttgtgtatgttttcaaaatggtatcaaagaaattttgaaaaccttaatgtctcacaaatatattataactcattgtttgctttatcagtataaatttctaaattttcctgggtttcatgttactgctcctagagttctgacttatacaagttgattgcatgtttgggttgattcaccagatactcttgaaaccattttgcagatgtcagtcctgaggtactaagaggtttagccacttgctttaggctagagcacagtaaactccttttaatggtgaactccttaggagcaggacagtggtttattcatctttgccttctccatctgagcataccacttgataaagagcagatgtttaaatgttgaattgccccaagttgagtcaaggccaagaccagaactcaagcctcctgacttaagccagtgagctttccactgaaccaacgctgatgatgtacttgcattcatcactttcagactcactcagtccccttatgcccagtggtttttactggtggaataaattgacgttggttagaggtatcgcctaaaccatggaatagagaagagataactaatgaaacaagaatctgcctgtattttttttacagaccccaatgtacttatagctctttcctatagctgaagcttcctgaaagtgaccctctctgtctcctacactagcccacaatggtaggttgtcaatggcaaccacagtttgaagacaattaccctgaaccagcactttgtgagggataagttacaagagtaaccatagtaagcccagagtcaagcttgattttacttgaagatgagccctcttaagagaacctctgattttcattccctgcctagtcattctaggccttttcaaggttttttccaatccaaataaaatgttccctgagcctcagttactggagagcagtggtgcttttttggtcttgcagccattcctgtactgtgaaggcttccctggggaccgaacagaaggatctcagtacagtgagatgcagttttcacccctcccgcaagtagtggctctgtccctcaggtctgtccaaatctgacttccctgggtatgttggtccatctctgagtcaggctctgtggatttttctttatctttaaagacatctttatctttcattgttttctctgcccctgtctcctggatcactctttgggtctgcatgtgcattccctaagtctctgtccccatgtgcttctggctatctgtgtgagctggcgagtctatcttggtctcttgagttttgtgtctctatctttctatccgtctgtctgcagctctttgacttttgtgtctctgagactttgtgccactctgtctctgaatctctgagtctccatgtctgtctgtctctgtgttttcgtcttccagagcttcttgcatcatttctcagacttcttcaagaacaggttcatcctgatctcaaactcctacagaattctctcctccctttcagttttgatttccattagctgagccttgactcccaccaaaaaacttgggacctgcctttaactcacagatcaatgagatatttgcatgctccgcctctgtcatcactcaggtctgttttctaaagcctggggcagctggtctcaccatttagctctgctcttagctcatgtaaacatgggcatttagaaaagcaattttgaaagatacagccctgctggttccatcacagaaacgtctctattggagagactctagagaatctttctttggcctcccctgtatatcacactacacctgtctgagaccatgtaagaacttccaaaatcctttataaggcttcggcttgattccctctatttgaacagggtccattgctattatcaatggaaaaataagcccacacttgtgaacatgtgacttaatgggcttgtgtgggcaacaccatctttcttagatatgtcacaacctgattctaatataaattacagcactggtagctcttgagttacataagacaccctaaacccatgatttctaatggcatagagggccaaacactttacctttcacaaaatcaaagtatctagcaccgaccctatgaacaaatgagcatgaatgaaatcagcagccaaggaatcccatggaatagttcaagtggtaagaacagattaaaccttagagtgtgaacgcctaatagattcatctttgttctatcactgttgtgttcagaaagattgtgaggctaagtataggctcagcaagaaagacacatcaattagctgtgccatgtatgaacttagagaaggggtgtggcacatatgttatgcatttgtcatctttggtctagatagttcagaggggtgtcagtgtcatataaaagtgagaacaactttgaaaatgaaataagagaaaattttctaaagaagaatgcttttgttggctgttcaactccagggcattttggctgttttaacacaatcaggagtttttttcccactttgcgttgaaatatatgtcctctttataactctgatgaaacagaattgaggttctatttcatgtatcttttccaggcagggaaaaatatatcattaaatatgtgaataatctgtagacatgagttactaagacattttgtcatcaagaaatatactatctaaatggatgtgtggcatgtgttttaaagtgcaagattgctttctgtgtccaccagttcttccagaattattttgcaccacttcccaacagggaccctgtgctccagctaggcatttggttgcccatgcacaccaagcccatgtccactccagtgcctttgcttatgtcatttctcctctcagaatgcctctcactgcctaatgaatcctatattcattcttcatactgcagtttatcattctcccgctccatgaagttttccctgatcattccagcccactgtgagctccccttcctatgctataatatttactgtccatatcactaagatagcagctatttggtgattcttctatgttaacctgcagatccttctcttttccattctgttggtactgaaaagtcacttagtactttgctttgcccttctcttcaaatgccaaattctgtgaactcaaactgttcacattattgaagtgaattaaagttttcaggcccaagagtccttcccatacatgctcctcaaactctaaagtgcataacaatcacgtgggacttagcaggttgagggaggggcctgaggttgtgtgtggtccatgttggctgctcattagcaactcttttcacttgacacttcccagtagtaaaaagtttcttattgcacctgattttaaaaccatcactcttggctgggcgcggtctgtaatctcagcactttgggaggctgaggcgggcggatcacgaggtcaggagatcgagaccatcctggctaacaaggtgaaaccccgtctctactaaaaatacaaaaattagccaggtgtggtggtgggcacttgtagtcccagctactcgggaggctgaggcaggagaatggcgtgaacccgggaggcagagcttgcagtgagccgagatcgagccactgcactccagcctgggcaacagagtcagactacgtctcaaaaaaaaaacaacaaaaaaacaaaacaaaaaacaccatcacacttataagtgcagatgaaggaaatgacctaattggaagttttaatcaacagtaagtccagtgtgaatcagctatgtgatgcaattgtgaagaaactaatgcattctcgggctgccttatgtgtgcccagcagccagaataagggagctcctgtgctgctttgttttgcaggtcagagtttaacgttaagacagattttttaagtttgaaaggttttcagatgagatgagttctttgggtgataaggtccctggatgataaaggaactgaaagcctgtcataaaaggaaaagctgaagatgatggaaagagaagaaggtgcattctaaatgctttcaactctttctataagtatcatctatgtaactccaagaagtagctctgaaaccatctgctgaaagccatctacacagcaaaaaatggcaattcattgtagcccaagagttttctaaccatgaatcatgaacatatggattaagcttgcctatacaagtactgagttccccatcattagcaatatgtaggcaaagattggataagagtactatagagtttagaaattattcaaacactgttgttgtgcatttctgacaagatcccaggtgatgctgatgctgttggtccatactttaagtagcaaagctttgcactgtggtttaaacatcaggtacaacccgttagtaggcttaaagtgaatttaatgggtcacatcaatattcattcaaaataaagagaaaacaatatattcaagttaatagcctatagaaagataggtgttacgtcctgtaactttttgttttttgtgcgtctttgtgacatatgtatgtttatatatatacagagtgatataaaatgtattttgtactgtgagtcaattcaaaaaatttaaaagcctctcctttaaagaacagaacaaatgaggtataaagttagattagtaaattaaaacagtaaaacccagtgggataagaaactatgaaggttccactattctggagcaattttccagaagattctagctcaaagaggccccagaatgaaaggaaaggaagctgaaccgaggaccagctttctggatccagcctgtccacattctctgtggctgagtttattttctgtatcttactaagaggcagctatgaaaattctttagtgggtggtgtttcctagttttttactgtatcatggaaaggataatatcactgtttccttcaagttgaattgctggttttcataatcttataaacccagtacaaatattcttttggagcttgattagtcttttctctgttgactttatcagacttgagacataattatggcaatgtgtgggccttggggaaaatggagactattaacattctttctaataggagtttcttgctcttttttgcttcttcagggaaaatgagactagaagaattttttttttaagtttcaaaaaatgaacctattcccaactgcataacagtgtgttcctaccactttgcaaatgtctagcatatccataatacattgtttaatttagcaaatctagttttttttctgtaaaagttaaagaattgcataaaaaatttataaaagaagaaaatttttccaatacatgaaaataagaaggttctctggccaggcgcagtgactcatgcctgcaatcccaacactttgggaggctgaggttggcagatcacctgaggtcaggagtttgagaccagcctggccaatatggtgaaaccctgtctctattaaaaatacaaaaatttgccaggtgtggtggtgcacacctgtagtcccacctactcagaaggctgaggcaggagaattgcttgaacccgggaggtggaggttgcagtgagccgagatcacaccattgcactccagcctgggtgacaagagtgaaactccgtctcaaaaaaaaaaagaaagtttttttcctaggcattcttactagtcaccttgatggatgagaaaactgaggttgctacttgccagggggtcacatagtgaataaggtaaaaattgttggagcagatagactacctgagggaacgaccagagacaaatgcatgacctctcctcaccaacaattataaaaacttcattactaatcacattgagaagctgaaaatagcttttctatactatcaagaagtttttaaagtgttctagatgaaagactgaattatcattccattcccccatagaaaattatattattaaattattacatgaagagacaatcaaataccagacagcaaaaatatagagaaaaaaattataaggtttgattcaacagttaattaatacaaatacgttattttctctgtgttgtgatgtttgtgatatttttgtttttaaaatttgtaatttgcgatttctcattttaaataaatattcctttcttttttgtaattttgcataatttgtcttaaagagacctccagattttataagcttcaagaccattgaaatctgcctcttatccctaataactggaatattcaaatttttaaaaattgaatatagttctggcccggcacagtggctcacgcctgtaatcctagcactttgggaggccaaggccgggagatgacctgaggtcaggagctcaagaccagtctggtcaacatggtgaaacctcatctctactaaaaatacaaaaattatgcaggcatggtggcacatgcctgtagtctcagctactaggaaggctgaggcacgagaattgcgtgaacccaggaggcagaggttgcagtgagccaagatcataccactgtactccagcctgggtgacagagcaagactctatctaggaaaaaaaaaaattgaatatagagcaaattatagaaactgtaaggtccatgcaattagattttatgtaatgagctattggacatgcatattaagccacaggcagctctataaacatcagacaaggaactgtcagtattcagtgccacatatagagcctcaatatcctccaccttcatctctcaccattcccaactgctgtccttcatcactcactttgaattctcacatgactacatgatattctgattctcatacacgccttgcattctctcacttctaggcctttgctgctgctattccctcccatgttatatctccctgaacaactgcggatccaaaccccaccagacttttaatgggaaaaagccaaactctctctttctctctctctctctttctctttctctctctctctctcaatcttcacctaagtgcctaggccagtccaagtactcaataagcagtagttgaataaatgaaagaatatggcaaattattaataaggttatctctggaagttggattaagtaagaaattagctattttctttttttctaattaaatttgtagctaactaatatagaaatctatttttttcattagaacaagctaaattagaaaaatctgatcaagctaaagtctcctttgaacaaattctggttccttctacaaagaaaatcatacttatgaatttggtgtatatttttaaaactcttattttatgtttttatatatcttaatatgtaagcatatttttgttgttgatattttataggggaacgtgttaaaaccaagtggtaacatttggtgcctgcaactagttcttctaactttacaatatatgttgggatctatcaactttgatgtgtgtgtgtatacacacctatcttcagtgattctcagtggtggggtgtaattgacatcatgaacaagacaattcttggttcttcaagactgtatcatttgtaggatgttaagcatccctggcaccctctcacaaaataacaatagcaccccgactccctgccctcattatctggcaaccaaaaatatgctcacagcttttcaaacacttttggttaactttttacataatctcatccttttagcactccactttatttatcatctccatgtcgatggacatttaggatggctctagatttcttactcttacaaacaattctgcagtgaacacccttgttcatattttcttctgctcatgtatgggtgtttcactaggtggaaactagaagaggaatcgctggtcatatgtggaggttcagttacaccctatgtgctaaattcccctccaacttagacccttatcaacaatggacagtaatagccattgcccaaattctccaatacttaatactatccaatcctttcattataaccgatctggtggataaagaaaaatatcacattattattgtaatctgcatttctctgattaatagtgagattatttatttgaaacacatctttcctcttctgaaaaacacatactttatcttctttacatgtatatattttaacttttactatatatgctttataatcagaataaaaggtaacacaaccttaaaaaaaaaaaaacaggttatatttcaaggcctatacagatgttggctcattcagggaacctgatttcgatctttctttttagaacatcccttgggtactttattctctcttggatatagtttgcaatatgcttgtcttattctcctgactagattaatggttatttgtcacccagtctgaggcttttccatttttgttccctttgacctgcctagcacaatgccttgcacagatttgaagcaatgactgaaggcagaaaaggttgattatgggaaaactaccaacttaactctatttttaacttttatggacacagtcttgaatcatccttatcaaaggtggacatatttctacaaagaatacaaatgtcattaggatatacattcactcccctgaaagaaatgctcatcagaatgttccaggaaaggaatgcttaactcaattaaaaggggaagtttaggtttttgtggaaaagctatttggggaatgaggatccttattgcaccactgacatcatggaatgtaggtggctgcctggaaagctctatactgggcttgcccaggccctggagtctgtaaactcctgaaaaggcaatattgactcaggcaaagctgccaccaaggaattgcagtctccaagaattttccagactgcagcttagtgtgattcttcttgcattatactcaagtatttcttatgtgtttatggtatatagttattgttttttaaattatcattaaaacattattagtaaaaactgttatcaggctataattagacgtcaaaagaattctataaatgttttaaacgcaaacttccaattctattgaaaagaatccaaaggaatgtccaaatcctttaaatgttttggaattttgcgaatcaaatattgctttacataaacaactgttatcaggctatataattagatgtaagaagaattctataaatgctttaaacacaaacttccaattccattgaaaagaatccaaaggaatgtccaaatcctttaaatgttttggaatttcacaaatgaagtattgctttaaataaacaatctgctggctcgaactgaaacttatgctgaaatgtttattataaagttaattattggcaaaatatatctaagtttttataaccttgtggaaatttcacctatcaaaaagaattagaattttggcttcagttgaacttgaactttattattgtttcacttataattcttccaattgttctttgaaagcattttgtagtgaacagatttgaacttgtctgggaatcagttcaatgaatggagctgctttgggtaaatagctctgtgtttattcttataaaatgtgtttcatgccattgctttcagctagcaaatatatttctaatataggatgaaagcatctctgccccaaagataaaatatgctaagaaacatgcattaggaaatgcagatttagaaaataggtatcttggagacctatgtaaaaacttccttccacaggtgcacttaggtttactctttattactcaggctaaaagtttatgccacagggatgtctcagtggatatcagtgtggttcatgacaacaagatcccttaatgccagaatagggctattcctcaaagcttttttacactatacacacctctttaatagcatttagttcatcacactgacattatttgtataattgcctgtctctctttcatcttcactgacctaaactgtggtccctagcagtcagcaactgcctctgctgtctagctttctgttatctgatctaaataaaaagtaacaaaaattctatttgagcaataagaaagtcatgccacagagggtaaattgaaagttacggctttttggatctcaatggcttcctggtagcaattaacgcatactaagcactgctttagttgccaggctttatggagcacatctcatccatgttaatgtgtgcaggactcacaactggcctatgccgtatgcctattagtcatactattttaaacatgaggaaccaaagctcagattggttaagtaacatgtccaaggccatacagctagtaagaggtaccacctggattgggacccaggcaaagcaacccccggggccacaatcctaatcatcacatttcatgcctctatgacatcgtttaaaagaatgtgaatgacctgttattggagaaaagaaagatggtgcagagcaatatgcctagaaaataaaaataataaataatgctcgtatgtttgtagaatcaggagtggaggtacacatccaatgcctctaagtgtgtagactatctcttaagaggaagcacaggaaaatggttaccaaggtgtcctctaggaaaggaacagggagcctgagggcccagggtgaagaaaacatgttttgctatgtctccttttggacaatttgaatttttttttttttaccatagatatatattaccttttctaaaacacaaatatcattttgaatctccttgagcattccctagctcttcagatacttgtcaggctgaaacagtacttggtggcatttacttcatactataattccttccatccagcttcgtttcactcatgacaatagcctttagtattatagcacagaggtttcgccgtgaaaaggtaccacacttgaaaaagagtgtgagagaccaaaaaaagaaggaaattggtcaaagcctattcttatggtattttgacttggactttaaaaaccaattctgattacaaagcaacactgtattagtttgctagggctgctataacaaagaaccacagcctgggcagctgactataagaaatcgattgcctcacagttctgaaggctcaaagtcggaaatcaaggtgtcaacaggattggttccttccgagggccgtgagggagaatctgttccaggcctcttcctgtggcttggaagtgactgtcatgttcatgcgctgttctccctgtaggcaaatctatctcctgattttccctttttacaagaggacaccagtcatattgaattagggcccaccctaatgacctcatttttttttttttgagatggaattgcactctgttacccaggctggagtgcaatggcatgatcttggctcactgcaacctccgtcccccaggttcaagtgattctcctgcctcagcctcccgagtagctgggattataggtgcctgccaccatgccaggctaatttttgtgtttttaatggagacggggtgtcaccatgttggccgggccggtctcgaacccctgacctcaagtgatccgcctgccttggcctcccaaagtgctgggattacaggtgtgagtcaccacacccagccatgacctcattttaacttggtaaagaccctgtctccaaacaaggtcacattttgaggtactgagaggttagcacttcaacataagaactttcaggacacaattcaacccatgtcacgctactattagtcaactctgtgctctcctttcagccccacccagggatttccttgtcctaatgttggggctgagagctgggtctctgggctacttatcttgaagaatgttgctaggtaatctttgcaaggaaaagccagtgcagggggagtcatgccatggtttggcctgagtgaaagcgctgttccctcctttctaggtggtatcacggcaacctcacacgccatgctgctgaagctcttctcctctcaaatggatgtgacggcagctaccttctgagggacagcaatgagaccaccgggctgtactctctctctgtgaggtaaggtgcttcagggctctacgacttcagcatgggctcctctgtcacttactgactttatcatcactcaaattgccagacagcaaaacttcccaattcctgttggaccaccaggttaaaggattccaaactctaaatgatgagggtgtaaaacaacattcctgctccattcattagcaggaaaaaaattgttagagctggaggagacatgaggaattatttgatggaaacctttcatgggactgttgaagaatctgaaacccaaagcggtggaatgtctggtacctcaaaaatcaacaatagaaacagtgccagaatccaaattcctgacacctggctcagtgtccttttcactattctttgatttctctgtaaatgcagaatgatttatgactgtacggctttcatagtcacaacctcaaggaggcaatatacatgtttaaaatttttcctatagtgggctagcttttcatattgagtctctatttctcccaaatggtaagaaagttaatccagtccccaccaggttcatacagccaaatgcagtcattgtccagatctttcaggtcctccccacctcacacccccttctttctgtctggtgccccagatcagagaggctgaccaagcttctggtagtcaggggaggcggctggttctcagtcgcatctgacactctggcttccactgacatgtagcaagtattcttgggtttttaggcgcttctccatggattaggcaggggatgtaaggactccatgaaatttccctcagccacccacccattaagctcaaactgttattgtgttactgttctgatggcacctccatataccctggagagtcactcttcccttcatagtgcagttcctcaagctaatctggcctcagaggctctctcacttctttcccagtctacacggtcactactggtcactaactcagtagcagcattcacattgtctctttgggctctgggccttgcttctatattcattttctatgctacataacaaattatcaaaaacttagggacttaaagcaacgcaactggattatctcacagtttctggctggattctctgtccaggatcctaccaggctgaaataaaggtgttggagaagcttgtggctctgatctggtatttagtgtcttcttccttcattttctcctttcctcttcatcctttttcatccattcccttgctgccgtagaactgaggtcctccttttccttttagctgtcagccaggggccattctcaactcctagacgccacccacagttctttgccacatggcacccatggctgtttaccacatgggtgtttgctttcttgcatgccagccagaacacatctccctgactttttcttctgtgagcagccagagaaaactctgttttacagggctcatgtgattagttcaggcccactcagataatgtccatatcttaacatcaactgacttgggactttatgacctgctaaatcccttcccagtagcatgtagactagtttttgattgaataattgggataaagtgtgtgtactccaggggctgggatttgggatcatcttagaatgctgcctgccacaactcccattcctggaacagtgaaaatctacaggcctacttgaagtgggtgggtgtgcgaaacaggtagagggtgatggggtaagtaggggtcacagaggaaaaacaagcatattcattaacatttctcatgtcaccctgttatattttatttataaattttctgaataacatagatgaaaaaattattaatccaagatggaattctgtttgagtggcaacaagaattgtgctttctctgctcaacagcaaatgttaaaagttcatctaatggttaagttgtagatgctttattgcacacatcagaggtcctcaacctttttggcaccagggacaattttgccacagaccggagcagcggcagatggttttgggatgattcaagtgcattacatttattgtgtgttttatttttgttattattacactgtaatgtataatgaaataattatacaactcaccatcattcagaatcagtgggagccctgaacttgttttcctgctactagatggtcccatctgggggtgatgggagacagtgacagttcgtcaggcattagattaacatcagaggcacacagcctagatcccttgcatgtgcagttcacaatagggtttgcactcctatgagaatctattgcctctactgatctgataggaggtggagctcattgagaatgcaaacaatggggagcaactataaataaaaatgagcttcgctagctcacccatcactcgttttcttgctacgtggctggcagggggatggatggggacccctggcatgaatcttccaaaaatgaaaagttaattaacttttcacctatgtatgtctcatctgagcaattagatcataagctttttataaatcaatgacatacatatttcatatacataaaaaataaagaataaattattgattttcattgcaagcactagagaatgcttattaaaaaaatgaccagcagaggtgacaaaaaccacagactaattcaggagaatgactatttttgttttatgaacaaatattcacttatttgttcattcttttaatgatgaatatttgaaagcatttattctgcaccagccactttggtacgtgttgtagaacagtggtccccaacctttttggcaccaggggctggttttgtggaaaatgcgggttcaggatgaaactgttccacctcagatcatcaggtattagattctcatgaggagtgtgccacctagatccttcacatgtgcagttcccaatagggttcaggctcctgagactctaatgccatcactgatctgacaggaggcagagctcaggcagtaatgcttgctcacccactgctcacctcctgctgtgcggcctggttcctaacaggtacccagtctgcagccccaggataggggatccctgctgtagaagattgaaataccttattttggggaattacagcctcacagagccaaaaagaccacatacaagtaacatactacaaagtagaggttgacaaataacataaaagaaagcaagataagtgtttaggtggttcagaagggaaaaagcagttaacttaagctggaattatcatgtaatacttgacagaggaggtggtacttgaactgcaccttaatgagtggctgggatttctaccagcagagacaaagagaaagaccgtttcaggaaaaaggaacagtatgaactaagggacagaagtggaaactccttgaagagcagtagatccagttggactagggcagctgttctaaaggtgtggtccccagaccaggtgtgtcacctaagaacatgctaggaatgcacagtctcaggccccaccttggatctaccgaatctcaatctgcaggggtggaggtggaggtggcagcaagctgggttctcacaagcccatcagatgattctgaagcatgctaacatggtagcatgggctgcactgagagtaatagcaggaagtgaggctagaaagatagaatgggatcaaataaagtggagaggcagatatatatatatagatatatatagatatctatagatatatatagattagatatctatagatatatatatagatatatatatattgtttaatactctgcctcatttcaaaaatgaagtggaaaatgacaatgtaggaaatttgatattttattcagtaggcagtggaacatgcacgggaggaaaagggctaggctcacgtaactaatcaagcgacagagctgaattctgattgactcccaaacaagcaagggagaaaagcccaaggcagaggagagtgtggtgagggtgtcatatgtcatttctatcattcctattctctgcccttcttaaactcatgccccttagcagcataatgttcaaggactcttttggtaagtctaggagtagatagggagaacagtctcttgtcttccattagagtgaaaagttgaggctgggcgtggtggctaacgcctgtaatctcaacactttgggaagccgaggcaggaggatcacctgaggtcaggagttcaagacaagcctggccaacatggcaaaacccagtctttactaaatatacaaaaattagccaggcatcgtggcagacacctataatcccagatactcaggaggctgaggccagagaatcacttgaatccaggaggcggaggttgcagtgagcctagatcatgccactgcactccagcctgggggacagagcaagactctgtctcaaaatagtaaataaataaatgaattaattaattaataaaagttgaaaagagcaaactctgccaaaagaaactagtgatgctatttaaaactgtcagtggtttcaatgattgcctaattctcagttcttataaagggttaatagtgatgctaacatctgagatcatatttcccttcaacaagatatttatttgttaaataatattaaatacttctttttcccttttagggccaaagattctgttaaacactttcatgttgaatatactggatattcatttaaatttggctttaatgaattctcatctttgaaggattttgtcaagcattttgcaaatcagcctttgattggaagcgagacaggtaagctatgagcagacacttgacttatgaaataatgtttcgggatggaggagagacaaggcagatttcaatttaagaatgtcattgttgtcatttatatttcagcattatcttgaagagaaaacaatgtattttgtataaagtagatattttctcagaatgtgttacttaatggattgattaaaagcacacaatttctttaaaatgggctcaccattttaaaataacatatacaatacacacaaaaagaacaaaggtaaaaatgactttttgattactcataatttcagatataggcagtttgcatatgagtgagacccacagaagtaaattttgagcattttaaaaactaaaattcccacttaaatgttcacagagatcactgaatattgaaaatattaactaggaagcactctcctaagttataaaattctgtttctattgtcacggttttttaaataagattttaagctagacttaactatggctggaaaagtttgaattttcctgtttgaatggttagagaattaaaccagaaaaaaattcatgtgtaaagaaaaaaaacacaaaaaacagtctatcttggcacttgaattatctaagattgaacatcttgtttatttatattattttaatgaagtaaaatatcatccctgtatttgtgatatagaatcacaacacttttgtcctaaataatgataaatcttagttaatcaaagactaggaaattccaagaacctgcggcacaagaggaactcaagacttaataacacaaccagttaccatgagtttgtacatacgtgttttcttggcaaacttgccagtgggctttctgttaacttcagtgtgatgggaagagatggcatcattggcttctgtcttttctgctatttatgtggtgtgggtagtccctgatgtgactcacacagtgtctagtatacatgaagtgcacagcggaaactagaaaatagttgctctgctttatactgaccacaccaagcccaagaaagaataacccaaactacgaaatgaagttataacctttttttccttctttctcctggtataaattctcccaatcaaccctgaaaattacttcaccatttaacaagcagttgttcccatgaacaaatggccagtggaggtgtatttatttccactgctaccttggccttggcaagcatttcagtttctcaaatccctacacttcagtctcctttcctgcttgcatccaattccacacttgattttgttcagttattggtcactggccatgtagaggagatttttaaagccagggttttgttttgtgtacctctaatttttgtatttcatatccgccaggtcctggcccactgcagggcattttgggtgaataaataaatgaatacatggataactatgagtaagaactctttgtagtcttcaaagccactagagttgtcatttttctactttctctttttcttccaaccaaagacagctcccttcttttaaattcttctcctagactctattttcaacttctttgatcattccctgtgctccttcctgggccttctccaagttagggaaaagatacatattctgcctactggcagatttcaaaacatttaagatcaaagtgaaggcagtgctttctggttgaacctttctggcactgatccaatcatcaggcaagaggatcacctaaggatgcgccaaaataaagatgttttgatattgcatttgggacaatgataagcttccttgtaaatacactgttctgagtaaagaagccttatgattgatgcattagggattgtaaggatttgtcatccagacttctacagtagtttctctaaaactcaaacctgctgtattattatcttgactacaattgccattttatttattacaatataactcaggaacctaatatttttatcctctccactgcctctcctctgttctattcattatccaatgaagaatttgctgctgtttgaattcctgctttcggcccctcgtgctgatggatatgcacttgacttgctggcttccagcccttgagttagagtccaccagctttattcctcttatctgtcccagccagatgaagggaaagccatcagggctaggaacaacaggcaaaacccatgacagatgagtgttcaaatcttgcccctctgggagtaataggccttgggaaacaagataatgtgctcaagtcatgatgacttgtaagcccagaaattcctcaaggttacggagtcagcattgcagactataaagaatggtgaatggaaactgacatgccaccttctaaaaataggccttttcttcttgttcatttaagcatgggctcctagtattggctcccagtgatcagaagatcttcaggctaacgatttcatgttcaccttcagatgaagtacagatatttctttctttttttttttttttttgagacggagtctcgctctgtcgcccaggctggagtgcagtggcgcgatctcggcccactgcaagctccgcctcccgggttcacgccagaagtacagatatttcttatagcttatgtttgattaacatcaccaggaaaagcatttgtccacacaatggacaagcccctcccagggctctcaacttcagattaccagaatgacaaggactagaattggatatttcaggccactgctctcagccagaccccacccaggcccagcctcaccctgcagggtctagagggtaagtttattaaagagtgactttcttataatacatttatctactggcacaagtggtattacctttgagggcaacagaaatgatatccaaatagccaaaactttacacttttgccttgcagttatatataatgccttcagtagagtgaaacccagaatatttgattttgggtcgtaagaacatttttgcactcaaaatagataaaagtgttgacctaaggggattaatgctattttaagatatcttttttttctattccctactctttacacttttaggatttctgtttgctaatctgaaaagcaaggatttcctaagcaacatctaagcctcttgacaactttaagagtattttatgataatttccctttcccttgccataatctctatttcatctctctaatctccattaaagtttctgttcactctaatttctttttatcaatacccataaacactcttaagatacttccaattctcaaaacctaataatttcccaagtacatgatagagatatacaatgtactctcttgctttatttttctcaatggcccttttaccttctgacatctataattcacttatgttttttaaaaaaatacctttttttccacactagtgtgtgaactccatgaagaaagggacttttgtcagctttgcttcctgctatgtcccaggacctgaaaaaataagtactgatcatttccacaatatgtcatgctggatgccccatttccaatgcctgcattgcagttttttgcatggcaacatcaaaactagcaaacttgtgacaattttaactttcaaagtttataaaaacataatttgaaatgatattttgtgttgcatgtatgctcagtgatgattaaattcagaatttgcctttcatttgtgatagtgttgcaggacttttccttagttcagctaaagatcgggtccctctccatcccacggccacaaaaatttaggctcgcagacggtttgaagggtgagtgaagcagggttttattggatgaaaagaaagaaaagagggaaacagggaagctagagcgcttcctgcccagcagtttgaattctatgttcctcacaggaagaggaggggccaggctcctccccactgcaaaggacacgaacttcctaaggcttcacctcagtgggcaggccggttggagtttttctgtctcaatagtaggatatcaaataaaacatattcatgtctgtgcatgaactctaaactaaactcaaatagacttgaaaatttgagaaacttttttattagtataaatatgtttggtccattattaattttgtcgtagcctcttgtaattagctaagtttcatatatatagtcttgaaaatgtagacggcatttatctttatgcttaaatgtctaaatatgattagaacaaaaaattacttttaccattaccttttgtttatgtttcaataattcttaacatgaaattgccatgtataatttattacattgtattgtgactgtaatcacctaacaggcatgaaaaaatataatacaagtcaagttctatgtttgtgcttaccctttataataattggttcccaattttaaagatctcatctggttttttggtaaatgtcaaatctccatttctctttttgttttgatatggggattcccaatcttttgacgacagctaccgctattattattttgttttgtgacaccacccaggtgatatttttaaataatgtggttaaaattaattttaatttgagaattgggtggttcttcagaaaacaactagtgacaacttagaatttttccaaacttccttggatgtttgccaaaaatacaaaatgttctcagtttatagatgagttttattcgaaaaaggaaaaagcagctgaggaagggaattaagccaacatttttagagtgtttgctaggttccaggcattcacctacatcaacttatttcatctcagccacccacaataatgcatacaacggtcctattttcagatgaggaaaggaaaactcagaggttttaagtcacttgcccaagttttcactgctggtaaacatcagggctgagattggaatctgggctaatctggttctaaagcatagatgctttccatgcaccttgctatcttttgaaactggtcccacaataacagtacattgttgccatggtacagtgtggccttaaatggatttggaagaactcagagctgagattggaatctgggctaacctggtcctgaagcatagatgctttccaggcaccttgctatctcttgaaattggtcctacagcgacactgcaatacattgctgccatggcacagcatggcctttaataaatttggaagaatttctgctacaataatgtagtagaatgattgtaggatatggcagggctgtaacacatgtcttagtcctatccctcagtctcttctttatctcttctttaaagtctacaataacatgtttggtacatgaagtaaacctattgttctaaagagtgtgaatcaactttaacttctgcctttgtatttattgttattcccattttatttacatgaattgctatttcagaaattataccagaggaaactttaaaacataaaaaggctgaaaagaaaacatccccctaaatatacaggctcatcttagtcatgtgtcttcagcaaggatatcaaacagcctgtctaagtataacaaagtaaaataaaatttacagcttgagagagaaactgaaagaaagggaaaatgagaggtaagatcaaatgacagcaggaacaaagtatttcaaatgaatattgtacatttacaggaagcagtacaagcatttggtaatgaagcttctcgatgtttttttccccttatttgggcctgtatgcttagttagatttacaggatgttagaattgaaagggagctcagggactattgcatttttcctttataaatgaagaaactgaggcctggttagaaatggggaagcaaaaactcacatctcctttctcaagctgcctcctaaagaatcaatttcttcaaactttgatttatacatgtcaactcttgcccacaatacagcacagtatttcacatgccctagaagtttccatggtgactagattgaggctgagaataattatggtataatgagtaaacacacaaattctaagtttcaactccagcctctgccatttgccggctctgtgtgtctcctcaggtaagttaaataatctctctgagcttcagtttcatcatcttatgaaactgattagatggtagtagctcatactttaatgacttattgtgaagattgaatgaaattaggcacataggacatttggaatgattcttagcatagtataagtattcaataattattattcatatttaataaaatgcttttatggttattaattccatcagattctatgcaaaagctgtacgttctttgataaataataaagaattagtttagggacaattgaatttgcatttatcaaatgtttgtgatgtcctcttcaaactttaatctagttccatagtggactcatataagtggtagaatcaagtgagcactccaaaaatagtgacttgacttggatatttgaacagaattttctcctacactgactaactggtatgtctctcctagttcagtgcacttcaccctatgagactggaaattaaatattaaaaccccttcacatgtaaatgaacaaggcttaaagtccatttgcagagcaggtggcaaagaaggaaggaaaaagatcttgaataaccctattctctcccaccaaccccaagaaatctacttctcattggaaggaggggagagaggaactcattatgccagttgcagagcttattttctgaacctgagggcagtaatgaaacacggatggacatgatctgattttaatttaattcaacaaaatgttttgagtgaaatggccctgtgagccactgataacatagaaagataaatcagatattattcttgccttcaaacaccttacaggctagctggggtacctgatgaataagcactgacctcactgcataaaataaatactctaaacaaaagtttttctttaggagttttgtgtaccctgtgctacactctatttcagataccaaaccaatgcctaagaattgagactgttcttactctctttctgagttcctgctggaatacaagataaagggtccttcaatgcaatttcatattattgcatacagttatatatgtaactcttacacataactgtaagttaccattcagtcaaagtaaatggaaatgcctgccttggtccagctctgatcatctcaaaaacatacctccgctaagcatggctgaaaccaggtttcatgtcaaaggcaggaaacaatagtcacctttacgtagttcagaaactgaagtgaaacttatagccaagtttccaaggcctgtggttactggtcttcctcattcttcttgctctgctacccctgcctcctgttgcctttttctaaatctcccagctgagtcctggagttcatttggtctgaatctcagtaacccagggtccctttcttcccgagctgaggcactaacttggaccttggaggcaaagtattaagagtctgtggtagcgacagtagataagtttgtttgtttgtttgtttgtttgtttgttttgagacagagtctcactctgttgccaggctggagtacagtggcgccatctcggctcactgcaacctctgactccctggttcaagcgattctcctgtctcagcctcccgagtagctgggattacaggcatgcgccaccatgcccggctaatttttgtatttgtagtagagacggggtttcatcatgttggccaggatggtcttgatctcctgacctcatgatccgccccctcggcctccaaaagtgctgggattacaggcatgagccaccgcgcccggctgataagtttcttttgattggaaatgacagaaaccagctctggctagctgggtttttttggtcttgtttttgattttgtttttaagtgagtagggtacaagaacagggaacaggagcagaatttttttttttttttgtgatggggtctcactctgttgcccaggctggagtgcagtggcacgatctcggctcactgcaacctccgcctcccgggttaaagggattctcctgcttcagcctcccaagtagctgggactacagacgcatgccaccacgcctggctaatttttgtattttttttagtaaagacggggtttcaccgtgttagccaggatggtctccatctcctgaccttgtgatccgtatgcctcggcctcccaaagtgctgggattacaggcatgggccaccgcgccctgcccaggagcagaattttttaaaaggatattaacaatataccctcccagaatttaagggcaagttgaacaaccaagagacaacaaggaatctgcttagtaatcatggcaagtctgaggctttcagtcaattgatgtgtctgtcttgattcatctctgatcgtctcagaagtgtacctccgctcagcctttctgaaaccaggtttcatgtcaaaggcaggaaacaatagtctacttcatgtagttcagaaattgagttggtggaccttctctctagagaagcaattaagtggatccccaagaagtgaatccaattagtgtgaccaggtcaggtattcgagggccgggccaggtctggaggtataacatggttatagggaacctatctctgtatactgggaggtacaatctctgcagaaggggaaatcattaagcctcacagccatgccaagaagtctgtatattggctcttccttgggcaagaatagtcatctaaggagaactgtcttttaggacaccagatttttatcagtataagttgccgttttataagtactttgtcatcttcatctcacaatttagtttagcctcatttgtggggttactagttaaaatcaatctacagtcagttttactctcttggttgactcaatgccattttcctttgttttacttttgttgaattaaactttagaggaggttttcaaaatagaatttgggttcctccaacagagatttgaaaagttatgcctgcggttattgtcctttcttgcctcaggcctggagaattgtggacctgggaggctggttcatcccaggttctttcttggttcaagcctgcattactgtagcattcattcattaattcattcactcatctgccttcattatgtcagaaactctatcaagtggtagggatacaaagataaatttgactgataggtgcgctgaagaggctcacagaggttggaaatgcacacgttggaaaggcagtggctgtctaataccaagaggtgacagcactgcaggctcaggcagcagcccagcccagagatccttaccctgcagcgcaactggccccggtggctatttctcctccagggactgatactgtggtaggaggataatgcccccacaggacgtccacatgtctccctggacctgtgaatatattgttacatggcaagagggaattaagtttgcagatggaattaaggcagctgatcaaataactttggggtggggagattatcctagatggtctaagtaagaccactgtaattgacagggtcctcataagtagtagggagccagaagggagagaaccagaaagatggcagcaggagaaggatctgactggctgttactggctttgaagacagaggaaaatggccacaagtcaagacatgagggcacctctgaaagctggaaaatgcaaaggaatgaatcctccctagagcctccactaggaaagcagccttgccagttttagactagtgagacccatttcgaacttctgacttccagaattgtaagatgataaatctgagttgttttaagctgttatgtttgtggcaatttgctacaatagcaataaaaaattaggccaggcacagtggctcacgcctgtaatcccaacactttgggaggccgaggcgggtggatcacctgaggtcacgagttcgagaccagtctggccaacatgacgaaaccccgtctctactgaaaatacgaaaattggcccggtgtggtggtggatgcctgtattcccagctacttgggaggcagaggcaggagaatcgcttgaacctgggaggcagacgttgcagtgagctgagatcgtgacattgcactccagcctgggtgacagagcaagactccgcctcaaaaaaaaaaaattaacacaggtattattatgtgaagtgtgtgcctggtcgtatcaactaagtacatctttctggagtgtcatttaaagcattattttcatattaagtattaaatatatgaagtagaatgaaaattaagcatcaactttgaagataaagtataagagttcaaaatgtatctaatttgggagctgctttgatccctaggcttcagttcccctctcctcttctgtaaggtgaaagtgtttgagaggcaccaatttaactatagttaatcacaagtagtgattactagactaccaccatttttattcctagcagaatgttgcgtctaggtcttttttaagatttcaaaatccatgtccccaaagatgcaatcattcaaattttatttaaggatttaaaaatattctgtcaaagaataataatatctaatatgttatcattctcccacaaacatttatttggtgccttctgaaggaagcataattattctcactagtaaggagcagaagcttgtaatggttgtccaaggccgataagtactgaatggcggtagtgacaattgaaccctgttcctctgcctgtgcatccagtgctctttccaagggtccagagtgactatgaagcacatcactgggagtgtttcttagggttgggagccagcgctgaatttaccatgcatctacaatgtgagcactgtgttcacagagcccctgagcctgcacagcagctactcttgatataggtactgctgctttcattctgactgtaaaactgtagccggccccttctcctcatatgactggatctgttcttatgggaagatcacattgacaaaagagagcacaatgtgcaagaatgggacggttctgataatggcaaaatctgtttttcattgtgatcccaatgctgcaatgccaatgagagacagaaagaggaagggccagaggctttcattcttctctgaggtcgagatcagacaccctcttctggcttttctcaacagcttttcattttacagcagcaccttatctgggcccaagtatcaaaagccacagttctgtttttgcagtcagacattgtatgtattcaagtatcatagacaggttttgttttgtgtagttttttttttttttttttttttttgagacagagtctcactctgtcactcaggctggagtgcagtggtgcgatctcggctcaccgcaacccccgcctcccgggttcaagcaatttccctgcctcagcctcccgagtagctgagactacaggtgcctgccaccacgctcggctaatttatttttgtttttattttgtattttagtagagatggggtttcactatgttggccaggatgctctcgatctcctgacctcatgatccacccacctcagccttccaaagtgctgggattacagatgtgagccactgtgcccggcctgttttgtgtagatttatcattaacattagggtgttttttaaccacagaggagacatttttctttttcattttctcactcttactctaattcaggttctatactctccagatctttcaaatcttttcaaagacgcccttcctgatgacccttgtaaaatatcaccctctcccaaccctaccttttctattctctatccctttaccatgccctattcattttttccataacacttctcacacataaaatattttttaaattttttttctgtctcctctacctagaacataagctcgataagagcatttaaactcctttgtgtgctattgcattcccagtacctagacaagtgcctggcagagtgcaaagctctgtaaatattcgttgaatgaattgctgaattctttacatctcttccatgtctggtacaatcttaggcttgctatagaaaagaccctagtaaaattaaaagcaagaaaccatagcaagaagaaaaaaaatccccttaagttgcctctttttgtagttagtttctagtttctgattgactgattgattgagggaaggatttcaagaaggaaatgtcagaaacatagactcagaactgctctgagcccttggaacaaagttccccagccccccatgcctggaccccctgggctgagccctttttctgcctggaggctcccctctccagatggaaggggaaggaggcaatcacttgtgagcaccagcttgttcaggtcatgttcacttagtaatgcaaagactttgcttggttactttcattaattgggtagtatcagagagtagggagaatgctcacttttttgaaatccactaatttgttacacgtttattcggaaactgattgataggaaataagggcaatggaatggatcttcctctaccctagtgcttttgtttagtcttgttctcatggctttcataaagccttcctggaaaacttccagttactacttaagatctaaatcaaatgtcacctcctttatgaaagctgtcctgaatcctttcatggaaaggttcttcaagcagtctggggatgattatcatgctttgctcacacggctgccattggtctcatcaccctgttcatttaaacgaccatatctgttaccagttctgagcaccaggaggccaaggaacatctccatcatgctttatatctcagtgtccagcttaagtgccttatacctaattggtatttgataactgttgagataatgagcgagggaatacatgaaaaaaacaaaagactttccaatccagccacagttatccagttagcatttggaccttccttctgggaacactgttcgattatatatttttcatcttcattcaggcactctgatggttctaaaacatccctacccaagaaaagtggaagaaccctccatttatgaatctgtccgggttcacacagcaatgcagacaggaagaacagaagatgaccttgtgcccacagcaccttctgtaagtgaccttcaacgtgaccacaagctctctccctgtctaaaatcaatcaagttcaataaaagttaataagagtgtatttgttcacataaaaattctagcttggaatataaaacttggaaaggaatgtgagatttgaagcctatgactcagttcatctggtcctgggtagatcataaaaattacaatgcagccagacatggtggttcatgcctgtaatcccaacattttgggaggccaaggtaagagaattgcttgagcccaggagttggagaccagcctgggcaacataaacatctctacaacaaactttaaaaaatattagctgggcatggtggcatgcacctgtagtcccagctactcaggaggctaaggtggaaggattacttgagtcaaggaggttgaggctgcagtgagctgtgattgtgccactgcactccagtctgggttacagagtgagaccttgtctcaaaacgaacaaatgaaagcaatgcaatagtaataggattttaaatacttcgaaaatggaacttaaatctctgtccttagttaaccaaacaacttcaaagtagaatggaaaagagaagtttgcattcacatagttttctaaactgttttctcctacaattttcttatattaagaaaatatatttttttaaatatttcaactatctatggaagacaaatattctccacctttactataaaaactcagggtattattttttctagctttttttcctttactgactgaagtttacagacagaaaacacttgtgcttctttgcaacgtgagccattgttcaatttcagtgcaattggagcactcattgtttgtccaagagtccatttatgtttgttctgtgaactgtgactctgcagaggttcctctccaacacccttttcccttcattattctgaaggcccttctatttgttgtctcttccttgtttgctgaatactcctggtataagaaacctctatttgggcagatgataaagaagataatacccaaataaatatcaagaactaattctggatagtaatcatgacacttgaaaaataatcacttgaagatattcagctacaaattatattaaaataagtgtaactttctatatctgcagtacttttctctacccttgaccagagagatctttcttaaaaagaaggcttgccacatgacctctgctttacatcctttggtgatgccttttgtgttcatggcccacctggaccctgcttgcctctctgtcttcatctcatgctactcccacactcacactgtgaaacctgtctctctcaacattgtgctctttctcctctccctacatctgaaatgctgccaacaccattgctatctactcatccctcaagactggtatcacggatcattatcttccaggaagcctttcttcacccccactagcttcttttacaatgctcctcttctgtgctccagagcaccctctgtttgcctttattctaaaattaccatgctgtgggctaattaccttcacatctctctgccctccccaccagccagaaacatctaagtacatgaatcattgcttgtccttgcagctttacagcctagcctggctcatggcacatcttacatattcattgcagtgctacatctcctcagaaataaaaatcctgaaaattgactgagaaagttattttggctttgttagaagtgggggagaaggcatcaagaactcagaacttgagaaatttaggagtgcaagacaataaatagtccaaaggcagaaaagaccaaagaacaaatcaagatctactctgcaaccaattcttgttttccagttgtccagtcccttcataatttcctctttacccacccttacccttaatatagatcaccagtcacttcaacatctctttcatttgccctgttagtttaacttcacattctcctctgctacacttcccctaaagatctccactcaaggtcaaacaaaccatgtcctattaagcgtgttctttatcggcaataaaatgcagataatacctaatttgtgagattggtgtgagcagaagatatagtatccttatgcagaaataaacctctttaaagcacattctggaaaccttgttacttaccttcttttctcactccagctatcagatggattcacctcttttaaaatggagtttttaaaatagtggtgagtgattggttgacaatgacttgaactcacactatataatgacaagcttatgaagttgattgtacatcactatggacaaaaaaaatgtaaaggtttcctagaggatctgaaatgtttctcattacttctcattggggaatcattggtgactggaccagtatagctgctggggaaagagttctggtctgatcagaatgctcttgtcccttattgaacacaagttctaagccttcatttgctaccccaaatggctacatgatgctgcacctccatctccagcctgagagccctgagggttttcaaacttctgcattttctttttggggtgtagttcttgctcaaggtctagcagtggaggaagagaattaaaagaacttcttgtttgaagcgaaagtgaaagatgccccactgcccagaaatgcagatgactgtgtataactgtttaacatcttttagtaactgcatttggggaaattgctatttatgtcttataaacaacatagcattgagttcccatgataggattaaatttaattaattcatttattaaacaaactttttttttttaaagtgcttccaatacactcagaactgttttaagcactgggagtttggcagtaattttgacaaaggtcctcctcccctcactgagctcacattctagtgaagatcacagacaataatcaatgcagtaatctgataccagacagtaatacatcatgaaaagaaaaagtaggataaggggagaagagggaagcaagggaggcctctgtgaggaggaaccattagtaagagatttcactgaagggaaggagtgactcatgtcaagatgtggaaagagtgctgcaggcagaggaaacagtacaaaggccctggagtggaaacaaaattgaggtgcttcaaaggctaggaaggtcagaattacgggatgaagtgagctagaggaaaagttgtagaaggtgagattattgaggtaatgaggggtcagatcacataaggcaatggagttttcaaagagcagcacctcccagctgagcatttagaaatatgagtgtttctgttggtgcattgctttgcggcactactatcatgcgtgagtgtcaagagccatgaagagtctgactttactctgcttgcaagctaacaagttagcctgctgcagtttcatgtatgctgatggatgacacaagacttctgggtaagcgttgaaaaatagtttgctattcacaggaagagcaacagccaggatatcagtatttatgctaattccctgtgctgagccgaagttcccaaagggcaatattgaaagggccaggtgatatccacaatgggttgccctacaggagaggaaccctgagccttgggaacccaaatcttttctaatgatcagtagacatgtcttttgttctgaagggaaatatttctttattccaaggctgcttgtataagcatactttaaatatcagtctgcagcaaagaactgttaatgccttgctcataagacatttggaaccttgacaagagacccgtggagattatttcccaacagtgatcaggggctaactattcttcaaagagtggtagagaattatcttgcccaaaatctcagtagtaccttttgtacataacatgagaattctttaccttctgagcttgtttaaaaaaattcttgcagatggattgaatgtgatacacgaaagaaagagtagcagagtcatggcagagaagccctgctatttactgagaaggctaactctgcaggaggggtgggttgaggggatgagaaagaagagctctattttggacatgttaaatgagaaataccaattagttgtcttggtagagattgagattaatatagttcaagttcctgacataataggtcctatctaaaatgttagtttccttagcttcccttttgtggtatttgacgtttttaacaactccctccttctaaaaattctgtttccttagctttggcaacatctttctgtctttattccgtaatctttgacacattttatagttcctcttcttggatactttccttgcacgttgcccttttccagtattttgtttttgaaactcttctcaggtttaacattttgttgcttatcctttcagtcttttacttgaaaaaaaaaagtatatgtatgtatatacacacacacacacacacacacacacacacacacataaaataatgagctcttcattgtagagttgtaatattcttgtttaattaactatatatttaaaatttttttcatgtaattacttagttttctggaacaccattaaacaaattccataatattccattatttgagtatatcaatttattcagttaatccactattatgttttaacatgcttttttatttgaaataatgtcaaagttacagaataattgctagaatagtacacagaacttggttttccccaagtcgtttgatagtaaattgcctacatgatgccccatcaccctgaatatttcagtgtgtatttccaaaaataagggcatttgcctgcgtgaccagatagagccttccaaactagaaaattaacattgaggctgtgccactgtttcatccacagatctcattcaagcttcactagttttctcagtaagttccgtcagagtaaaagatccagtcctcaagcacaagttgcacttatctgtcctgtctctggaagattcttcactttggaacacttcctcagtttttccttaatttcgtgactttgacacatctgaaattaaagaccagttattttgtaaatagtttcccaactttggtttatatgatattgaatcatgattagatacaggttttttcatgttggctacaaataccacaaaagtgatgctttgtttgtgcttctcactgtgtcttctcagatggaacacaattgcaatctgtctcataatggtgtgtttgattacttaagtggtgtctgccaggtttcttcactctaaagtcaccatattccctttgttattaaaaaatgtttggggtgaggttatttgagactataagaatattctgttacttattaaatttttacttgccaattttagcatttactgatgtgtcttggctgttttaatcattactatgattgttaccaaacgatgactctctgattttcttattcctttttacattcattggttgtcattctactgtaaggaaaagctttttattcttcaaaattttcaatcatttttatatcaaatggttataatcatgactatcattatttattttgatccttcaaaatttccctgatttggccagtcggggaaagagccctttcaagtggtgtctgtgttcatatgacctcaaaaaaaattttttttttttggagacagtgtgtcactccgtcactctgtctcccaagctggagtgcagtggtgtgatcacggctcatgaagcctcgacctcctgggttcaggtgactctccctcctcagcctcctgagtagcagggactacaggtgtgtaccaccactcctggctaatatttgtattttcatttttttatttttttttgtagagtcaaggtttcaccattttaaccaggctggtatcgaactcctgggtgcaagcaatgctcatgcttcagcctcccaaagtgctgggattatagttgtgagcctccgtgcctggcctggcctcaaaattcttttaagaactttcttactttctgaatagcaagatgatccagacttatcttgttctttctttgtacccagctctagaaccagctatttctccaagaaactctgctctttttccacagaatagtactctagaaatcgacatctaggtactatgtgcttattgttatcaggatgtcactctcccagcccactcagtgagcagagctgggaaaatatgtatgtatatacatatgtacacatatatacttttacatctgtatttatctgtcgattcattcatcgatccatgagttcacaacaatgcttccaataccacaaagttcattctagtgttttcccttctcccacagtgagaaaatatggatcttatcatcctcagtacacttatgtggtgatcaattgaatataagcaatctcccattgctgtttctactactcaacccttaccccgacactccaaccacccagtcatgcttcaatgctcagttccaggccactgctgctcccaccctcactacagatgtccacctagcccaacttggctctgaaactgtgcagtagctgccacctccaccccttcaggcagaagccctccacaccctgccaggcttcaatgcctcgcacacagctgctgctgccactgtcactgccagtgtccacacagaggctccctgtgccctacttgggctccaccaccctgtactaaggtgcttgaaagccctccacacacacatcaatgcctgccttgcttcacctgaactgtgttggctactgacttcatttaaggctggcaggcaagtaggtagtaggatggcaggaaggacagtcctttgtttttgaacatttagatggtaccccaatgggggctcttataaacagcttttctgttacagttcatagatttttaaagataaatgtgctctataattatttactttcttacatctggagaccctgaataaaattaatagtctcattgctttcccatgcagcctttggcttacctatcaaaaccttagaagaatactacacttatagtacattgtttgggtggaggtaagatgggattattccctagcttgattttagtaaataattctatcaggatcttttatacaacaatttactcctagttattttgcctctacagattttaacctgcaacagcccaaaataattactttttgccattcctataacacctgaattcaactgagtcaattcaatttatttaatgttaaaataaatcacaccaattatgagatatcaaattcaccaatattgattaatattatttaagtgaacatttggttagtttatccttacttttatatcataagattttaaaagaagtgtttgcttatttcctgctttaactctttttattgtggtagagatggttgttcctctttttatttggttgggaaaattcaccttggaaaaaaatattctggaaattaccatagaaagaaccttggtgtcaaccaaatcacttcccaatttttgttaattttgtttcttactaagacatatgatgacatcacatttgaacaaaatattctaccacgaattgaatttcttgtggaatttatgaaatgataaatttcttgatgttaagctacttgtcttatgcaaatttctgttcacacaattctccacccttatatttcgtaggtgttagctaagtgtgtgctattatttttacgtttgaattaatgacaacatgagttaaaagaactggctcattcttatttcagattcattttgggtaaatcaggtgtaaataaatctacgctcctgacagtctgttttttggaacatggatctcaagagagtgtgggggtggggaggaggattatgtgataaaataaatagtaaaaatgctatttctaaggttccctcttaaaaatttacaaagtatattagcataatacagactctgggaagccctgaagtaaaaacatccttttagttttcttaatccagtctcccaaacgtattgacagtagatgtgtgcgtgtttatgtgctaataaccctgtaacaatccaaacagctggatttcacatgacacaccttgacaaacacagacttttataagtgaaatgatgtcgtttattgtttgcaaattgctaactggagttaggagctacagaatgatgccagtagatccagtctgaaaacaatctctcacaacacatggaagcttttcaagtgcctaggtgaaaaatgatagacagtaatttaaagatcaaaagcaaacattcttcatttaaaaataggacatgaaaggaaggacaaacgtcctgttgtgacagttctggtcttcactcagtgcttttctttttcagctgggcaccaaagaaggttacctcaccaaacagggaggcctggtcaaggtaaggaagtgtggttttgctcatgccagccacagaaaaaagagaacacgtcatgtagactcaattctcatcttgatagtttttcttggaagcataattgcctgctcattttaacccatttgtaatattcacctgactcaagagttcatttttatggctcattagtcaaaattctggaaaatgacttgactgttctttgacaaagccctgcataggtgtagcctgcagttaaaagtcaataaaacatagtcctcataatggaatgattgaggatgaagatagcaagtttactctagaacatctttcgttcttcttctaaaacaaggaagaagtcaaaattgtataaaatgtttctttaaggataggccaaaaacatcactgatgctactgaaactatgttataaaatccaaagaaaaacacaatttaagctcttacaagttcagagtatccaaatgttccccatttatgagactgtatctttagaattcctttgtttcatctcaatgtgccaagaagaccttcatggaatgtgtctgctccttctcgttttaagagtcacggtatttaacctctcacagacactggcatgcttggaattagcctaaataatttcattatttgtgtcccttctagatcgaatgctccctgaggacagagagtattcatattcatagcatatttatgtttaaatcctctgttacttcttttaactgggcacattgacacccaggatagagtaggatgctgtttgtatataagaaggtaacagcgggcaatgatggtttttaccactgataccttggagttcttaggcaaggtttagaatatcatgtgagtcagggttcctaaacctcagttttgttgtttgtaagacaagaataataatactggcattgttgtgtgaggattggatataatatataaagcctccaatgatagtatatcgtccatattaggtactcaaagaacaatatttatctttattatagagttaataaaatggaaattgtagtggtttgttataagtcacattgaatatttatgatagactaattctttttgtatttaaaaatatactaatgatatatctgccttcattatgagcttaatgcatgaaattattttaatttttatagatattttgaaacttttttctcagaaatgacacaaaagaattttttgagcttaatgcatgaaattattttaatttttatagatattttgaaacttttttctcagaaatgacacaaaagaattttttcagggttatagtatttaattttttagatacttttaaaatgaaagtaaatcatctggttcaaatattacattcctgtattcaaaactttgtgtgtctgtgtgtttgtgtgtgtgtgtgtttttctcagacctggaaaacaagatggtttactctgcacaggaatgaactgaaatacttcaaagaccagatggtgagaaacatgataatatatttttcctttaaaaatcaattctctagatgaaagaaacttaggtctttaaaatctctgaaattatttttatatccacctgaaatacctaataaatgattggagatatgaattcttgattcctgaaatgagcagagttattttgcaaagatgagatgtatgtcccagaaattgctttcttggattggctaaaccatagttccccagggcacgtaattccctctgtttaggacaatgtaattattctcttgccacaatttattaactgtctctttgcagcaatttgtccctttattaaaaatacagtttctccatttcccatgcccatttcattaagccaatttaaaattattttttctcacttttcttatataacatttctaagaaagtagaagttttaaaaaatgagagaaaaatatacctctcttccatgtgttaaaatccatcttcatcagtaagttgataaaggtagtaacttaatgcccagttttatgaaaggctcattccaaaaccaaggacttcccttggtagggcttttctattgtcagtcctgttagtgaaaggaaatatgacaattgcacatagtggaaaacttgtgaggggaataagtgagggacagatttgtctgtttttttttttttttttaatggtgacatacgttgctttttattttatttagtcaccagaaccaattcggatcctagacctaacagaatgttcagctgtacaattcgattattcacaagaaagggtaaactgtttttggtaagttgttttataaagaaaacgttttttaatgtcttcttgccagacacttattttggctaaggaatagaaagctgtatatcttaatgtctacaaagatcagatatgaggggcatgcctgcatgtaaggagtgttttcagctgagtgtgacataacacctcatttaaagtagcttaaacaaacaggcaggtcagctcagcttatgttgcgtactggagaagtatgactcacatagaggatgccattcacatcttagacaatttaatttctttgaggctttctccctcattttatttataactttgttgactctaatgataggtgatttgtattgttatgacaatttctggcaaatggcacaaaaatattttgttctaacataatcagtatgttataaaaatgttctaactgggagaagagtcttgagaaaggaatgtcttatttcccactaccttttattttaaagtttttcaagcatacacaagttgaaagacatacgtttacataccctccatagcagttattaatatatcttaccatatttgctttatcctagtctatccactttttttttttcctgaaccaattgaaagtaagttgcagacatcatggcactttattcctaaagactttagtatgtgtctcttaagaataaaatatcacatataggactacagtatcattattacaactgaagaaattaatgttaattctataatatcaactgagaatgggtgtctttttaaaatttgcatagacatgccctgtgagctagcagagctttatttttctcatatatccaaaaatcaggaggcaagcagctatggtgacaaggtcaggtccagggtctctactgttctcctggccttttctcatgctggctacttcaggatttgagtgtctactacacctgtaggtctcatattttcaacaaagtacaaagaaagatgtagggatgatattacccgtgtctgtccctttttatcaggaaaaccaatgtttctccagaaactcccctatgagaccgggtgccatggccatccccagcagctgatcataattggcttaaacaaattaggatttattgcttggggttctgttagcaaaagaaagggataattatctgtattaatagacagttaataatgtctcccatagggagtaccaaacaatgacaatgacagaaaccagttttcgagtatatgcactgtatcactccctccccaccactgtccactcactctccactagacctcacatccaggtattagcttctatgcacagagacttacctcttacctattcaactttaattgctggtatcaacaaaatacactgcttaggctttaagatatagaaacccttctgaaggctttttcacaaaaagaaaaaagatttttggtatttttgcatctcaactgtaagtaaggaagtatgttcagtatgtaatttagggctgaccttattgcttacataattttaactaggtaatcagacacagtcaaatgaaaaattactatacatttaggaaaagtattttgtgccagtaggaaagttcttattccctgcagcagagactgactcttggccagagatgggagaaataactaatttagttttattgtctctttttattgtcccaatagttgaaattgcccacaaccacagaaggcagagttatcctcgttgaagcaagctaacacaaatgagttctttttagcaaacttctctgtcttgcctattctttggatcatagcacaagtttttgagagatcagctgaatgaatacataagtgttagagttaacctaagacatgaaccacaaaaggatctaggggtgtcctgaacatgtttctttcttcttcaaagtcttattcgagtatatacatctgacttggaataataatatgaatctacaacttccttaacatttctgcagtttgctggcaggagtaggtgcatatataccagcacttcaaggtacttacctgcatcctttatcaattcttttttcccttgcaatactctaattagtgttcaactaatatatatatatatatatatataatatatataatatattatattatatattatattatatatattatatatatatatatatatatagctaatgatctgcaatatcttatgttctttcttttgtcctattagtttggtatttccattcaggacattttatctctgtgcaaagaccggagtagaagctgatgagtggatcaagatattacgctggaaattggtgagaatttttaagccttcagatgtcaagtcttgagaaataacatgttgatgatttcaaacatatttctatcaaaagagtcagactagacccaagaatcaaagagatgtctgggtgtctacttccaggcttgcggaacagtctgttaattcttctgggacatgagaagagatggagacaggattgtaaaaaagaaagaattaagccatatttgggtcttagacatagagccttagcctaataaccacctatcagacttcctataaggtgtgtcagttagttcagttttgtctggagggggacatttagaaccagaaggtctgacagaggaaagctgacatacttctctagttgaaaagccttttaaattgttagagaagaaagtttgccagaggcacttagcttagtttccaatgtaagcatcactttgtgcaggtcaaggacaaaagctgatttattttgtctgctctctgtatatctcccgaggagaagactgagtgagtacttataaaacttcaccaatcttctacttgtttttcatgtgcttgcaagttagtgagttcttagccaagaacttgtccttaaagctgactaaaatttcctataaataccatcttaaaaactttgatgatttctttttttctattttttttttttttttttttgagacagagtctcgttctgttgcccaggctggagtgcagtggtgtgatcttggctcagtgcaacttctgcctcttgagttcaagtgactttcatgtctcagcctcccgaatagctgggattataggagcttgccaccacgcctggttaatttttgtatttttagtagagaaggggtttcaccattttggccagggtggtctcgaacttctcacctcaagtgatccaccagcctcagcctcccaaagtgctgggatgacaggtgtgaagcaccatgcccggccagatgatttcaaacaaaatatttttcttaattattttttgcaaaattgtctgatatatatgaaaattcctttctagatactgagacttttgctttcagttatgttttcagtttgaaattcaaataagtataccattcatttttaaattcttccaatgtatcagtgagggataatttgtcttgtgaaacctttgctcagatatggattaatttcttattctttctatttttaattatcaaagtaacacaaaatcattatacaagaattatagaaaaatatatcaagtatacacacttttagacttctctctttacacataaatatttaaaaacaaaatttaatcacttgctagaagtaaaaaccacaatgatgtaccactacacacccttcagaacggatacaatgaagactgtcaatatcaagtattagcatgaatgcgaaggaactagaactctcctacattgctagagggaatgaaaatgtgtacggctactttgaaaaattgcttggcagtttcttttaaaactatacatatacctacactataattcagcattttcatgcttaggtatatctaagagaaatgagtgcatgtatccactaaaaaatgttacaataatgttcatagcatctttattgataatatacaaactccaaacaaaacaaatcacttgccagtgttctatatttgctcacttcacttagcaatatattatgaacatttttccatattatcaattttagatctatatcttccttttaactcattgaatagtattgcattttatagattactgtaagtattagaccaattcccaatttgtacatgttttagcaatcactttacaatatgtgtcctaaaaaaaaatacagaaaatttttctggacacatgataattagcttatagttgggggtgagcacatgataattaacttagagttgtatgacatccttactaatcaacatgtcttatttaatatttgttagaagccagggttcattacaatcactcaataatggatacacgtgtgtgtactttattacagtcacaaataagaaaacagctcaaccaaggggaaggcacgatccgatctcggtcgttcatctttaaatagatctttcttgccaaggaatgctctggcccaggagcaaggtggaatgtttccctgacgctgtgatctgcagcaggcttcaaatgaaaaccgactaaggattttctttcaaaaacaaatcagaagcagatgctgattgggacccatataccacgttgctgactcacgttgctgcccttccatgatgttgccatctccttgagaacactgaagcaatcaccattctgatagaaagtgcttaaaccaccactcttaggtctgctcactcttagaacacacaatggaagaggaagggtttttgttttcactcattgtggtccccaagcctattgacactagttgcctagagtcccactgtgagtcatggtcagcctgtctgacatccaggttgtgctattaaccaagaaggaaacagatacttggaggcttagatgacttctgcaggatttatattcagatagaaaacatcaaatattttcaggggagaggtttttttttttaatttttccccctttatacaaaaaaaaaagaacatttccaaaactaaaatagaaaatgcttgtggcatttattttctctttttaaaaggttcagaaatttggcaggtcctttgcttctaatgacaaaactgtgagagctagatgtcctatgggcaattaggtagtataataaaggtaaatgaaggtacaatttttaaaccattattttcaccctgttggggtaaatgttttaaagagtgagaaaacataaattgagaaagggtgataaagtaatagataacttttagtttaataataattattgttattatactactaataatagagcacttgtaagcactaagttatctttatccaacatttctccaaatggactgaaagaaacttttcaaggacagtgtattataacaatccctttcccagaattagttgtatagggttggcccaagagatgtaagaaaaatctcgcattgctccctaagcaccctgggccttattaaagagcaacttctatttccagtcgggggagtaacactaaagctacaagaaatatgtaataatgataggtaataatgtgttccaaagctttttcaaactagaataaggaggcaaatagaagaatgagatactgatgtccacagttcattggcagaatctaaccccttctgttatcttttttaatactatttttgtttagatagaagtttcaaagaagataaaaatgcttgaagagcctgagagtaaaaagattatgctgcaaagctatgatataaactgctcttgcagtccaaagggatacctgattaaagaagtttcttatttaaacatctcagacgcaaaaattacattaaatttttgtatatttcaacaacattttaaatgtattttgttatgtttgtattatataggataaagcaaatgtcaagttaaaatgtattgtgttgtttgtaaagtaagaagttactggccaggagcggcggctcatgcctgtaatcccaggactttggtaggccaagacaagcagatcacttgaggtcaggagttcaacatcagcctggccaacatgatgaaaccttgtctttactaaaaatacaaaaattagctgggcatggtggcaggcgcctgtaatcccagctactcaggaggctgaggcaggagaattgcttgaacccgggaggtggaggttgcagtgaaccaagatcgcggcgctgcactctagcctgggtgacagagtcagactccgtcccaaaaaaacaaacaaacaaaacaaaacaaaaaaaaacagaagttacaaatgaatactcacggatatgtatagttttatgtttgttttcttagaaacaaatgtgtttctttgggtgggtaatattgtgttttactatgtttaccttttataaaacataacctgtttatttatattctttggctttgtttattaaaaagcatgattttgctgtgcatgtaccattttgctattaaaatttatttttaatatttgtaacttgaaagaaatatacaactgattaatatcataaatagcaatgaagaattcacttcagttagactattaaccacaaaggattggaagttgaagaaatagtccaaggcctcaaggagttcttagttgaatatggagaaaacaataaacatatatatatatatatgcgtgtatatatatatacatatgacaatatatagcagtaaataagatcattactgtaagagaagtacacaaagctatctgatggagcaggtgcttcagcaggggatacaacaatttgttggagggttttgacatgaaaagggtgagctaacatgtacctgctatgtaactagtactagactaggtgttttgcctgccctcagcagtcctgcaaagaaatgattctaactcccaagtggagcctgtgagggttcctcagctatttctccaagtccagagagagggaggatgttttgtgccaacggcagatcagagcaggggaatatgggagaaaagagagtgggctatctgcattataccctgtctgctaacaggtatgagcttatcattaagacaaagtattcgcagttattctcagaattccctctgggaaaatcctggcccacaggagcagttttctctggacaaatggtgacaccaacatggtgagggaaggctaatacagatggttcctgacttacaatgatttgatttaggattgttcaacttcacaatgggtctattggggtattaaatgcattttctccttatgatatctttgacttaaaatgagcttattggaatggaaccccatcataagtcaaggaacatctgtactgtttctgggggaaaccttccccctatgccagaacacctggacatcagagaactcggtggggcaggacccttcttttcccaaccacatggcatgcaagagagtgggttcctctctccttatttctcacaagggcttggcatgcaggtcagggcattatgctgtgtccctgtttcaggcagaaagcaagagaactactgtaaggagaaggtcagttctacttccttccctctccactacttcagatccactgcagcaaatccatgtttctaccagactcttcctagccaagtatactacacagcagagtgccaggctgagcctacggtctgctctctatgaattcaggctgtctgaccatgatgtcaagcagagtttcttaaaccatctattgcaaaggatcttattttcttttttttttaaatttataatctatcacagactgagatttcataaaattcaataaatttttagaaaaatcaagaaaaaaatacaaatatcacaatcccagtttattattatcagattcaacaggcataaagttactatctcaaattgttgtaagtttttcaacacttaaaactggcatttctgtacttatcttgctagcaaacagtgtgcacaacagcccagtctgtggaccacgttgtgagtagcacaggtctagctgactggcaggtaaaaggaaacagccttcttgagaaagaattcacctgaagataggaagggttgaggttgagttgcacatgctttgttgatggaatacaggcatcattagaggggaaaggtgattcggagcacattcttgactgttactcagcccctcctcagcaaaatctaaaagagctatttcaccagtctccagtggccagacaatgagattgtaagttgtgtcacattttcagctgtgaacaaagatggcacccttggccttaagcaggggttgtgtgcccttgtagacaacagcagccacaacctgacttagcagtagcaacaatggccagggttgtggggcataatcatcccagagagcaagaacaaagaaaaaaaaatggcagatgccatatagtttcaggagtacatgtgaagaagggtctatgaggacttccagaaatatctgggaggcatttgagaatgaccatattttccacagaaaaagcaagattggagccagagaagttagaccagcaggtccctgatcccatcctacggttatttccccagttccagatgcatcgttggtatagccatccaggcataccttgaagatattgcaggtttggatccacaccaccacaataaagcaaatattgcaataaagtaagtcacaccatttttttttgtttcccaattcatactaaagttattgctaaaaaaaattataatgatcatctgagctttcagcaagttgcaatcactttgctggtggagagtcttgcctggatggtgatggctgttgactgatcagggtgatgcttgttaagggttggggtggctgcagcaatttctgaaaataagacaaaaatgaagtttgctgcatcaattgattcttcctttcctgaaagctttcactgtagcataaggtgctggttgatagcattttactaacagtagaatttctttcaaaattgcagtcaatcctctcaaaccctgcaactgctttatcaactaaatttatgtaacattctaaatcttttgttgtcatttcaaaagttcacagcatcttcaccagaagtagatttcatctcaagaaaccactttatttgctcatccataagaaacaactcatcatccattgaagtttaatcatgagattgcagcaattcagtcccatcttcaggcttcacttctaattctagttctcttactatttccatcacatctgctgttacttcctccactaagtcttgaacccctcatagtcattcataagggctgaaatcaagttcttctccactcctgttaatgttgatattttgacctcctcctgtaaatcacaaacgttcttatttttgtttgttctttgggttttgcgtgtgtgtgtgtgtgttttgtttgtttgtttgtttgtttttgagatgaagtctcactctgtcactcaggctggagtgcagtggtgtgatctcagctcactgcagcctccgcctcccgggttcaagcgattctcctgcctcagcctcccgagaagctgggactatgggtgtgcaccaccatgccctgctaatttttgtatttttagtgaagacaggatttcatcatgatagcctggctggtctttaactcctgacctcctcttgggaggccttggcctcccaaagtgttggaattacaggtgcaagccactgtacctggccacaaatgttcttaatggcatttagaaggtgaatccttcctggaaggttttctgttcactttgcctggatacgtcaaaggaatcactatctatggcagtgatagccttattaaatgtataacttaaataataagatttgaaagttgaaagtcaaaattactccctcatctatgggctgcagaatggatcctgttactaggtatgaaaacaacattaatcttattgtacatatcagaactcttgtgtgaccaggtgcattttcaatgagcagtaatattttgaaagaattcttgtttctgagcagtaggtcccaacagcgggtttgaaatatccagtgaaccatcctgtgaacagacgtattattatcaggctttgtctcatttatagagcaggggcagggtagatttagcataactcttaagagccctaggattttcaaaatggtaagtaagcactggcttcaggttaaacaccagctgtattaacccctaacaagagagtcagcctatcctttgaagctctgaaagcaggcatcaacttctctttagctatgagagtgctagagaggagaaatcaatgactggcttcaaagcttcaaaggatggcatcttcttccaatagaaggctattcagctacattgaaaatgtggtgtttagtgtaggcacctatcatcaatgatcttagctaggtcgtttggataccttgcagcatctacatcatcacttgctgtttcaccttgctcttttgttatggagatggtttctttccttaaaatttcatgaaccaacgtctgctggctttgaacttttcttctgcacttctttacctctctcagccttcatagaattgaagggagttagggctttgatctggattaggatttgatttaagggaatattgtggctagtttggtcttcaatccagaccactcacactcaaactttctccatcttagcaataaggctgtcttgcttcatattcatgtgttgattagagtagcacttttaattttcttcaaaaatgtttcctttgtgctgggcatggtggctcacgcctataatcccaacactttgggaggccgaggcgggcagataaagaggtcaggagatcaagaggtcagaagatcaagaccatcctagctgacacggtgaaacctcgtctctactaaaaatacaaaaaattagctgggtgtgggggcgggcgcctttagtcccagctactcgggaggctgaggcaggaaaatggtgggaacccgggaggcagagcttgcagtgagccgagatggagccactgcactccagcctgggcaacagagtgagactccatctcaaaaaaaaaaaaatgtttcctttgcattcacaattttttggcacaagaggcctagtttctggcctatctcagctttcaacatgcctttttcactaagcttgatcatttctagcttttgattaaaaatgagagatgtgagacttttcctttcatgtgaacacttagaggccattttaggattattaattggcctaatttcaatactgttgtgtctcagggaagggggtgcccaagggtagggagagagatagaggaacagcaagtcagcgaagcagccagaacacacacatttattaagtttgttgccttatgtggatgtggtttatcgcaccccaaaatattaaaatagtaacatcaaagatcactgattacagatcaccacaacagatgtaataatcatcaaaccagtttgaaatattgcaagaattaccaaactgtgacacagagacaaaaagtgaatatatgctgttgaacaaatggtgccaatagacttgctcaactcagggttgccataaatctttgtgagaaacacatctacaaaacacagtaaagcaaagggcaataaaacaaggtatgcctgggtagatgaacttagctattcaagacagctaagcacagcctcagacaataaagtatccttcatgtgatgaaaccagaataacaagtccagcctggtttgtttaaatcagatactgaagttggcctttatttaaaaaaaaaataggggcaaactatgatccaaaaagacaggtctcaaacaagggcaaactgcatgatcaaaaaacttacaattttttttccttccctacacaaagataccatctgcaacaatgtcatcttttttttttgcttaacttttcctgaaattttcaaaatatcatcaatattttgccatattgttgaactctcctacacttaaaaatttcttttttctgtttggaacactttaaagcaaattctagacatagttaataaatgaggtatggttgtactcagcaactgacagaaccccaacattggctccctgatctatagagtgtgggctattatcaaaggaaaggccaagtagaaaccagtagaactgcctccatctggaagatataaaccaaaagcaatcccacattcccagagggacttagaggttagtgccaccatcaaggacttgatggatgcagtggtggtgattccactgcatctccattcagcccacctatttgacctatgcagaaaaagataggtcttggagaatgagtagattatcacaaacttactcatgtggtgactccagttgcagctgcttttccagatgtgatttcattgcttaagcaaattaacacatcccctggcacctggtatgcagctactgatctggcaaatgcctttttctccatatctgtccataagccccaccaacagctgtatgctttcagctggtaaagccaacaacatacctttactgtcctaccccaagggtatatcagctctctggccctatgtcataatttttccacagggtctttgatcacatttcccttccacaagacatcacactggtccattacattgatgacattacgctgattggacctagtcaacaagaagtagcaaataccctagacatattggtaagacatttgtctcagagagtgggaaataaatatgacaaaaattcaagtgccttccaatttaccaaaatttctaggggtccggtggtgtggggcctgtcaagtatctcttctaaggtaaagaataacttgttgcatctggccctctgacaaacaaaacaaaacaaaaaaacagtacatacctaacaagcatctttggattttggaggcaacattgttttctatattgctcatgtaattcattggtcttaccatgttccccaccatcctggagcagctggcttgataaaatggtagactagccttttgaaaactcagttacagcactaggtaggtggtgatatcttgcaggggtggggaaatgttctccaggaggctatatatgttgtaaaatcagcatccaatatatggtgttcttccttccatagccaggattcacagatccagcaataaaggggtggaaatgggagccatgccactcactatcaccccttgtccactaccacaatttttgttttctgtccccaagttcctatgctctttaggtctagaagactttgttccaaaaccagtaatacctcaaccaggagacacaatgattctattaaactggacattaagtaagattgccactctgccacttcgcactcctcatgcctctgactcaacacataaagaagagaattactgtactgactagggtaactagtcctgattgcccggggaaacagggctgctactgcacaaggaaataaagaagggtatgtctgaaatacaggagatccaccagatctgttttaccaagccctgattaaagtcagtggaaaactttaaaacctattacaggcaggacaacgaatggctcagattcttcaggaatgaaggtttggaatacctcaccaggcagaaccacaaatagccaagttgcttgctgagtgcaaggaaatatggaataggcaatgaaaggtagttaaaaataccagatacaatcacatgtccaattgccaaaataagaattgtgattgtctatttatgtatacaaatatgtatatattacacatacacacatatatactgaacaaatcttttcccccctcctttatcctcttagctaatataagacatattaacagtggtatccttacatcacagtattaaggtacaggatagcaaggaaaaaagtgatcaccaaaggactttgcatcctcctttggggaatggattgcatcctcttctgaggaaacctcctccaggaaatatttgtcgttgtacatgttagaagtacaacctagtctttatttggagactaaaatatggtttaagatgcatacaggccaggtgcggtggctcatgcctgtaatcccagcactttgggaggccaaggcaggcggatcacctgaggtcgggagtttgagatcagcctggccaacatggcaaaaccccgtctctactaaaaatacaaaaattagccaggcgtggtggtgcacatctgcaatcccagctactcaggaggctgaggcaggagactcgctttaacccaggaggcagaggttgcagtgagctgagatcaggccacagcactcaagcctaagtgacagagtgagactctgtctcacaaaacaaaaaacaacaaaaaagatgcatacaggtgccaagctgactaggaatggactgtgaacgttagttttatgcatcaacttggctaggacacattgcctagttattaaaacatgaatccaggtactgctgtggatgtattctggagatgtacttaacatttataatcccttaaatttaagtaaaagagataatcctccataatgtgggtgagactcatccaatcaactgaaaggctttaagagcaaaactgaagtttccaagaggacgaacttctgctctgaaactgcagcctcagctcctacctgagacttttcagtcttctggcccgtccaacagatgttagacttgccagtccccgcaatagtataagccatttccttgaaataaatacacatatgtccaaccggttctgcttctttggagagccctgagacaactttcttccccaaatatcccattttattgtttgttgaaatattttatttctaattttattatttttgaacagttaaaaactcaaagtacaatgaagtttacaatgaaaaggctcactcctgggatccttatcccccaggtatctagttctgctccttggagactaccaatgtgatcaggttcttccatatatgtcttcagagacagtctaccatatacaaacaaataggaatacatacacattttttcttcttatacatcaattgtagcatgccatacagtttgacaccatgcttttctcaataaacattattatgccttagagatcttttcatctcagtacctaaagcacttcttcattcctttttccattgggcaaattagtttcaccaatcctctgtaatttattatctaaagtgagacattgagaatgaaagcactattaataattatccaagaacagcaggtataaactggtagtgttcaaaaagccaaagcatatggttatcctacctatggcagatatttaggttgcttccaattctttgacattaccaagttgcaaagaatatacttgtaaatacatacttttgcacatctatgtgctttgtttggtaggataaatttctagaagtggaattgcagggcaaaaggttatgtatatgaatttaaaagtttcacagactgccaattgctgtacataaagagtataacaagtcacacttccctagcaggcatagagaatgcctgccctacttattgaataatccttttcccattgtgatcccgtctttataacaatgttttaagccctcacatgtatgtactgaagtcttttttctgggtgagtacataccattgatatctagttgtgcattcagttctgtactacctttcaaaaacagttaatctaggtttacattaccctttcaaaaatttcttagcaattttcaccaccttatttttccagatgaactatgggatagtttatctattataccccctcagaaattttaacagtggcagcattcaacatgtaaaggttaagtagctccatttgttatcatttctttttctaggatttttagatatacaattattatctgcaaatagaaatctggccacctcatttctaaaagacattgtttcatgcaccattgcactggcaaaaatttcctgaacgatattaaataatccagataatgggaattctggatttcaatgagtacatctagtatttcaattgtaacaattaactacagtcatgtgttacgtaacaatgtggatacatttcgagacatgctttgttaggtgatttcatcattatgtgaacatcatactgtactgacaggaaccccagatggtatagcctactactacacacctaggctatatggtatagcctactactacatacctaggctatatggtatagcctactacacacctaggctatatggtatagcctactactatacacctaggctatatggtatagcctactactacacacctaggctatatggtatcgcctactactacacacctaggctatatggtatagcctactactacacacctaggctatatggtatagcctactacacacctaggctatatggtatagcctgctgttctgaccaccctcgtatgtggtccttcactaactgaaacatcattatatggtacatggctgtatttatagctctttgcaggtaaagcattatatctcttgcctctattttatttacaaaggctattttcttgcccattttaagtgcccctagtctgtggttctataccatcctatgtatagctttatcatag

SEQ ID NO: 1463 - DNA, 2991 bp, Homo sapiens
gcaggctgctgtctcacagagcgagaaggtgtcaggagcagcccagttgtgtctctctctctacctctgtgaagggcgcgaatgggcagagcagaacttctagaagggaagatgagcacccaggatccctcagatctgtggagcagatccgatggagaggctgagctgctccaggacttggggtggtatcacggcaacctcacacgccatgctgctgaagctcttctcctctcaaatggatgtgacggcagctaccttctgagggacagcaatgagaccaccgggctgtactctctctctgtgagggccaaagattctgttaaacactttcatgttgaatatactggatattcatttaaatttggctttaatgaattctcatctttgaaggattttgtcaagcattttgcaaatcagcctttgattggaagcgagacaggcactctgatggttctaaaacatccctacccaagaaaagtggaagaaccctccatttatgaatctgtccgggttcacacagcaatgcagacaggaagaacagaagatgaccttgtgcccacagcaccttctctgggcaccaaagaaggttacctcaccaaacagggaggcctggtcaagacctggaaaacaagatggtttactctgcacaggaatgaactgaaatacttcaaagaccagatgtcaccagaaccaattcggatcctagacctaacagaatgttcagctgtacaattcgattattcacaagaaagggtaaactgtttttgtttggtatttccattcaggacattttatctctgtgcaaagaccggagtagaagctgatgagtggatcaagatattacgctggaaattggtcaaggacaaaagctgatttattttgtctgctctctgtatatctcccgaggagaagactgatcacaaataagaaaacagctcaaccaaggggaaggcacgatccgatctcggtcgttcatctttaaatagatctttcttgccaaggaatgctctggcccaggagcaaggtggaatgtttccctgacgctgtgatctgcagcaggcttcaaatgaaaaccgactaaggattttctttcaaaaacaaatcagaagcagatgctgattgggacccatataccacgttgctgactcacgttgctgcccttccatgatgttgccatctccttgagaacactgaagcaatcaccattctgatagaaagtgcttaaaccaccactcttaggtctgctcactcttagaacacacaatggaagaggaagggtttttgttttcactcattgtggtccccaagcctattgacactagttgcctagagtcccactgtgagtcatggtcagcctgtctgacatccaggttgtgctattaaccaagaaggaaacagatacttggaggcttagatgacttctgcaggatttatattcagatagaaaacatcaaatattttcaggggagaggtttttttttttaatttttccccctttatacaaaaaaaaaagaacatttccaaaactaaaatagaaaatgcttgtggcatttattttctctttttaaaaggttcagaaatttggcaggtcctttgcttctaatgacaaaactgtgagagctagatgtcctatgggcaattaggtagtataataaaggtaaatgaaggtacaatttttaaaccattattttcaccctgttggggtaaatgttttaaagagtgagaaaacataaattgagaaagggtgataaagtaatagataacttttagtttaataataattattgttattatactactaataatagagcacttgtaagcactaagttatctttatccaacatttctccaaatggactgaaagaaacttttcaaggacagtgtattataacaatccctttcccagaattagttgtatagggttggcccaagagatgtaagaaaaatctcgcattgctccctaagcaccctgggccttattaaagagcaacttctatttccagtcgggggagtaacactaaagctacaagaaatatgtaataatgataggtaataatgtgttccaaagctttttcaaactagaataaggaggcaaatagaagaatgagatactgatgtccacagttcattggcagaatctaaccccttctgttatcttttttaatactatttttgtttagatagaagtttcaaagaagataaaaatgcttgaagagcctgagagtaaaaagattatgctgcaaagctatgatataaactgctcttgcagtccaaagggatacctgattaaagaagtttcttatttaaacatctcagacgcaaaaattacattaaatttttgtatatttcaacaacattttaaatgtattttgttatgtttgtattatataggataaagcaaatgtcaagttaaaatgtattgtgttgtttgtaaagtaagaagttactggccaggagcggcggctcatgcctgtaatcccaggactttggtaggccaagacaagcagatcacttgaggtcaggagttcaacatcagcctggccaacatgatgaaaccttgtctttactaaaaatacaaaaattagctgggcatggtggcaggcgcctgtaatcccagctactcaggaggctgaggcaggagaattgcttgaacccgggaggtggaggttgcagtgaaccaagatcgcggcgctgcactctagcctgggtgacagagtcagactccgtcccaaaaaaacaaacaaacaaaacaaaacaaaaaaaaacagaagttacaaatgaatactcacggatatgtatagttttatgtttgttttcttagaaacaaatgtgtttctttgggtgggtaatattgtgttttactatgtttaccttttataaaacataacctgtttatttatattctttggctttgtttattaaaaagcatgattttgctgtgcatgtaccattttgctattaaaatttatttttaatatttgtaacttgaaa

SEQ ID NO: 1464 - protein, 261 aa, Homo sapiens
MGRAELLEGKMSTQDPSDLWSRSDGEAELLQDLGWYHGNLTRHAAEALLLSNGCDGSYLLRDSNETTGSLSVRAKDSVKHFHVEYTGYSFKFGFNEFSSLKDFVKHFANQPLIGSETGTLMVLKHPYPRKVEEPSIYESVRVHTAMQTGRTEDDLVPTAPSLGTKEGYLTKQGGLVKTWKTRWFTLHRNELKYFKDQMSPEPIRILDLTECSAVQFDYSQERVNCFCLVFPFRTFYLCAKTGVEADEWIKILRWKLVKDKS

SEQ ID NO: 1465 - DNA, 2241 bp, Homo sapiens
gcaggctgctgtctcacagagcgagaaggtgtcaggagcagcccagttgtgtctctctctctacctctgtgaagggcgcgaatgggcagagcagaacttctagaagggaagatgagcacccaggatccctcagatctgtggagcagatccgatggagaggctgagctgctccaggacttggggtggtatcacggcaacctcacacgccatgctgctgaagctcttctcctctcaaatggatgtgacggcagctaccttctgagggacagcaatgagaccaccgggctgtactctctctctgtgagggccaaagattctgttaaacactttcatgttgaatatactggatattcatttaaatttggctttaatgaattctcatctttgaaggattttgtcaagcattttgcaaatcagcctttgattggaagcgagacaggcactctgatggttctaaaacatccctacccaagaaaagtggaagaaccctccatttatgaatctgtccgggttcacacagcaatgcagacaggaagaacagaagatgaccttgtgcccacagcaccttctctgggcaccaaagaaggttacctcaccaaacagggaggcctggtcaagacctggaaaacaagatggtttactctgcacaggaatgaactgaaatacttcaaagaccagatgtcaccagaaccaattcggatcctagacctaacagaatgttcagctgtacaattcgattattcacaagaaagggtaaactgtttttgtttggtatttccattcaggacattttatctctgtgcaaagaccggagtagaagctgatgagtggatcaagatattacgctggaaattgtcacaaataagaaaacagctcaaccaaggggaaggcacgatccgatctcggtcgttcatctttaaatagatctttcttgccaaggaatgctctggcccaggagcaaggtggaatgtttccctgacgctgtgatctgcagcaggcttcaaatgaaaaccgactaaggattttctttcaaaaacaaatcagaagcagatgctgattgggacccatataccacgttgctgactcacgttgctgcccttccatgatgttgccatctccttgagaacactgaagcaatcaccattctgatagaaagtgcttaaaccaccactcttaggtctgctcactcttagaacacacaatggaagaggaagggtttttgttttcactcattgtggtccccaagcctattgacactagttgcctagagtcccactgtgagtcatggtcagcctgtctgacatccaggttgtgctattaaccaagaaggaaacagatacttggaggcttagatgacttctgcaggatttatattcagatagaaaacatcaaatattttcaggggagaggtttttttttttaatttttccccctttatacaaaaaaaaaagaacatttccaaaactaaaatagaaaatgcttgtggcatttattttctctttttaaaaggttcagaaatttggcaggtcctttgcttctaatgacaaaactgtgagagctagatgtcctatgggcaattaggtagtataataaaggtaaatgaaggtacaatttttaaaccattattttcaccctgttggggtaaatgttttaaagagtgagaaaacataaattgagaaagggtgataaagtaatagataacttttagtttaataataattattgttattatactactaataatagagcacttgtaagcactaagttatctttatccaacatttctccaaatggactgaaagaaacttttcaaggacagtgtattataacaatccctttcccagaattagttgtatagggttggcccaagagatgtaagaaaaatctcgcattgctccctaagcaccctgggccttattaaagagcaacttctatttccagtcgggggagtaacactaaagctacaagaaatatgtaataatgataggtaataatgtgttccaaagctttttcaaactagaataaggaggcaaatagaagaatgagatactgatgtccacagttcattggcagaatctaaccccttctgttatcttttttaatactatttttgtttagatagaagtttcaaagaagataaaaatgcttgaagagcctgagagtaaaaagattatgctgcaaagctatgatataaactgctcttgcagtccaaagggatacctgattaaagaagtttcttat

SEQ ID NO: 1466 - protein, 278 aa, Homo sapiens
MGRAELLEGKMSTQDPSDLWSRSDGEAELLQDLGWYHGNLTRHAAEALLLSNGCDGSYLLRDSNETTGSLSVRAKDSVKHFHVEYTGYSFKFGFNEFSSLKDFVKHFANQPLIGSETGTLMVLKHPYPRKVEEPSIYESVRVHTAMQTGRTEDDLVPTAPSLGTKEGYLTKQGGLVKTWKTRWFTLHRNELKYFKDQMSPEPIRILDLTECSAVQFDYSQERVNCFCLVFPFRTFYLCAKTGVEADEWIKILRWKLSQIRKQLNQGEGTIRSRSFIFK

SEQ ID NO: 1467 - DNA, 2703 bp, Homo sapiens
ctcacagagcgagaaggtgtcaggagcagcccagttgtgtctctctctctacctctgtgaagggcgcgaatgggcagagcagaacttctagaagggaagatgagcacccaggatccctcagatctgtggagcagatccgatggagaggctgagctgctccaggacttgggggccaaagattctgttaaacactttcatgttgaatatactggatattcatttaaatttggctttaatgaattctcatctttgaaggattttgtcaagcattttgcaaatcagcctttgattggaagcgagacaggcactctgatggttctaaaacatccctacccaagaaaagtggaagaaccctccatttatgaatctgtccgggttcacacagcaatgcagacaggaagaacagaagatgaccttgtgcccacagcaccttctctgggcaccaaagaaggttacctcaccaaacagggaggcctggtcaagtcaccagaaccaattcggatcctagacctaacagaatgttcagctgtacaattcgattattcacaagaaagggtaaactgtttttgtttggtatttccattcaggacattttatctctgtgcaaagaccggagtagaagctgatgatcacaaataagaaaacagctcaaccaaggggaaggcacgatccgatctcggtcgttcatctttaaatagatctttcttgccaaggaatgctctggcccaggagcaaggtggaatgtttccctgacgctgtgatctgcagcaggcttcaaatgaaaaccgactaaggattttctttcaaaaacaaatcagaagcagatgctgattgggacccatataccacgttgctgactcacgttgctgcccttccatgatgttgccatctccttgagaacactgaagcaatcaccattctgatagaaagtgcttaaaccaccactcttaggtctgctcactcttagaacacacaatggaagaggaagggtttttgttttcactcattgtggtccccaagcctattgacactagttgcctagagtcccactgtgagtcatggtcagcctgtctgacatccaggttgtgctattaaccaagaaggaaacagatacttggaggcttagatgacttctgcaggatttatattcagatagaaaacatcaaatattttcaggggagaggtttttttttttaatttttccccctttatacaaaaaaaaaagaacatttccaaaactaaaatagaaaatgcttgtggcatttattttctctttttaaaaggttcagaaatttggcaggtcctttgcttctaatgacaaaactgtgagagctagatgtcctatgggcaattaggtagtataataaaggtaaatgaaggtacaatttttaaaccattattttcaccctgttggggtaaatgttttaaagagtgagaaaacataaattgagaaagggtgataaagtaatagataacttttagtttaataataattattgttattatactactaataatagagcacttgtaagcactaagttatctttatccaacatttctccaaatggactgaaagaaacttttcaaggacagtgtattataacaatccctttcccagaattagttgtatagggttggcccaagagatgtaagaaaaatctcgcattgctccctaagcaccctgggccttattaaagagcaacttctatttccagtcgggggagtaacactaaagctacaagaaatatgtaataatgataggtaataatgtgttccaaagctttttcaaactagaataaggaggcaaatagaagaatgagatactgatgtccacagttcattggcagaatctaaccccttctgttatcttttttaatactatttttgtttagatagaagtttcaaagaagataaaaatgcttgaagagcctgagagtaaaaagattatgctgcaaagctatgatataaactgctcttgcagtccaaagggatacctgattaaagaagtttcttatttaaacatctcagacgcaaaaattacattaaatttttgtatatttcaacaacattttaaatgtattttgttatgtttgtattatataggataaagcaaatgtcaagttaaaatgtattgtgttgtttgtaaagtaagaagttactggccaggagcggcggctcatgcctgtaatcccaggactttggtaggccaagacaagcagatcacttgaggtcaggagttcaacatcagcctggccaacatgatgaaaccttgtctttactaaaaatacaaaaattagctgggcatggtggcaggcgcctgtaatcccagctactcaggaggctgaggcaggagaattgcttgaacccgggaggtggaggttgcagtgaaccaagatcgcggcgctgcactctagcctgggtgacagagtcagactccgtcccaaaaaaacaaacaaacaaaacaaaacaaaaaaaaacagaagttacaaatgaatactcacggatatgtatagttttatgtttgttttcttagaaacaaatgtgtttctttgggtgggtaatattgtgttttactatgtttaccttttataaaacataacctgtttatttatattctttggctttgtttattaaaaagcatgattttgctgtgcatgtaccattttgctattaaaatttatttttaatatttgtaacttgaaa

SEQ ID NO: 1468 - protein, 189 aa, Homo sapiens [sequence omitted]

SEQ ID NO: 1469 - DNA, 195 bp, Homo sapiens
atgatctgcaatatcttatgttctttcttttgtcctattagtttggtatttccattcaggacattttatctctgtgcaaagaccggagtagaagctgatgagtggatcaagatattacgctggaaattgtcacaaataagaaaacagctcaaccaaggggaaggcacgatccgatctcggtcgttcatctttaaa

SEQ ID NO: 1470 - protein, 65 aa, Homo sapiens
MICNILCSFFCPISLVFPFRTFYLCAKTGVEADEWIKILRWKLSQIRKQLNQGEGTIRSRSFIFK

SEQ ID NO: 1471 - DNA, 93538 bp, Mus musculus
  misc_feature (1)...(93538): n = A, C, G or T/U
ttattagatattttctcatttacatttcaaatgctatcccaaaagtcccctataccctcccccccgctctgctcccctacccatttaatctcacttctcggccctggcgttcccctgtactggagcatataaagtttgcaataccaaggaacttctcttcccaatgatggctgactaggccatcttctgatacatatgtagctagagacacgagctcccggggtactgattagttcatattgttgttccacctatagggttgnnnnnnnnnnnnnnnnnnnncacacacacacacacacacacacatacacacacatacacacacacacgtttttagagttgcttagcattcagatttgttcttgcctctgtaatgtttcatttgtcataaccttggagaggcatagtaattagaacttcacaacacggcacttcctccaagtcgaggcagaggtgttgcatatgaaacagtgagcaccaagccagacagagagtagtcgtgcagtagactcccaggcatctctttcccttactgatctgcaggcttcatatcccatctttgtcccctttactccacatgtcaattctcaatttcccaccactcctggcaaattttatgtgaatttcagctgagttatttcttcctctccctgtcatctttggtcgtttgtggttaccatgcaactgtaaaaacatgctatcttcaagccaaggaaaactgcattgcatttaacaaaccctgtgtttattttctcctaagtgtttgcttactgaatctgtccacagtggggatgtggggcagggtggggtgtgtttattcaaagctaatgtaatcagaggctatattttctgagaaaagtaagatagtaaatttatcttatgagtcatttaatggtgtatatattgtcttatcaacaagctagtaaaccttttggcagacaaaaagattgtattaatttgagaattttattgattcacttatacttggtcctacaattgatactttaatattgttagaaatgccaaatgccagtaaatggaagaaacaaagataggcagtaagggcacaccctaatcctagatgcaaactgaaaacctaaatctgttttttaattgtgctgagatcatgtgtaggttagctctctcttattgagccacaaacttagccagatactttcagttgtgttttattagtttatctttgactatgccaaaggggaatctgtcttattcaattatacttactaatatttattacacaaataatacaataaaaattaaacaggacaccaaaaagaaatgtgaaatgcttcctcctattgagggctatctagatagagtcaacatttcaatgggaaaagtgagagaatagaaacccaaagacttcaccaggaaactctcagagctgatgagtactttctgcaaagtagcaggataggatatcaaccctcaagacccagcagccttcctgtttatcagtgatgaagttgctgagaaagaagtcaggggaagctcctaattgcagtagcttcaagaccaacacccctcctcaaacaaagtgggaacaaaccaaaccaaggaggggaaagacttctaccatgaaaacattagacactgaagatagaaattgaagacactaaaagacagaaagacctccctagctcatgggttgacagcactaattttttttgtaattaatcattttatttgtttacatttcaaatgatatcccccttcccccttcccagttacccttccacctacccccccatccgatctgcctcaatgcaatcctcactaaaatatcagtaaaattctttatagtattaaaaggaatcctataatttgtatagaaacagaaaagacccagagtgcccaaagcaatccttagaagcaagagcaatgttggggttaacacaatatatgatctcaaattatgctacagagccatagtgaccaaaacagcatgggacaggcacaaaaccagtatctagactaatggaacagaacagtgtgctggaaacaaacccacagagctgtagctccccattccaaaatgtgtgtgtgtgtgtgtgtgtgtgtgtgtgtgtgtactcattttgtgtatgctggcagtcactgtaccaactgagcctcatgcccagccctcccaatgccaacacctttctctgcttctttattgcacataactcaaaatcctattttgctgggtgtggtaacaaagtctgcaattctaacactgcagaggctgaggtaagctagaggcacaaaggggatgaaacacccacatttttcaccttaaaggttttctaaggtttgcaccccgtgttctcagattcctgggatgcacctgccacagccctgggatgacttatcttgcctttacttagccagacttccaggacaacactgcacgctttaaacaattcagcgagcagttctctagcttccacaggaaaggactgcgctacttatttatacttttcttcctctgttacttatttttttgagacattgtttctctcagctggtttagcctcaagcttgagctgcctcagtctgctaggtgctaggcttaggtggtgactgcccggctttgctcttttctccttaggccaagaccaggtaatactatttgatgctatatatgtcagagtcacaaaagattcagtcattcacatgaataagaatgttcagtatgggctgcagagatagatggctcagtggttaagagtactggctactcttccagaggtcccaagttcaattcccagctcgcacatggtgtctcatgactgtctatgaaaggattgtctggcttaactcttatacttaaaataaataaataaataaataaataaataaataaactttaaaaagaagaatgttcaatatgttcacaatacttgtgtgtatgtgtgtgtgtctgtgcatgagtgaggtcaggtgtcttcctcaattgctttccatgttatttcttttttgtatcagggtctctcactgcaccagaagcttaccgacttgtctcagctggccgacaacaaacctaagcatcctctactctgcttcccttgggcctctctgcccctgcttttacatggccgctgggactcggatgtgggtcctcgtgcgtacacagcaagcactctaccaacatctagctcttcagtgcccacgctactttccagagtgacagaaacatacaacaacaaaaaattcaaattatcctatggaaatcacagactcttctctcctcaccccatccctcagaacatctggtcaccttacccggagaagcacggacttctcaggactggccgtacaggagaggtgaagggagatgaacaaacttgctttaaagactcaaggatgtcttgacttgaaccacagtcatgttgtctatttgccctagttgagaccagagagagaaagcatctactaggaagaatgaggtcagcgtggactctgagagcatccgtataccatttccttcctatgggattgaacgccgatcacgtagtttggctaacaatatctgtggaatggaggattagtgcagtcacttggaggagcacacagggatgggggaggagggctgagcaagtctagggagcacctgaaaagtggcggctcaatggcagtgaaggtaggatggtgtcaagagttaagagagaatgaaaaaaccagcccagaccacttaaagctccaggcagataaattgaaggagttaattacattaggagattgacgaatggctgactgtacacagtgtgtgtcccttcacgtgtaagctaacagcaaatgcttctttgtagaaaacgaagcagcctgaggaaacagcgaggatgagggacttgggaataaagttgcggtgcccatcagtggccccaggggctgaggaagaaatcaatgggtaacttaaagcagacagccttgggctagggagatggctccatgggtaaagactgcttgctcaagcgtaaggcctgaactaggatttcccggacccttataaagcctgttacagtagcacagaggtctgcaatcacagcgcgcccagcacgggaannnnnnnnnnnnnnnnnnnnttcttagtaaaacagttctttcagacaggctttcattatgaagccctggctgatctggaaactcactatgtagactaggctagccttgaactcacaaacatctatctgtctgcctatgcctcctgagtaccaggaattaaatatgtgcgtcaccacaacctgtcaggaaaaactttaaagaatgtctacttattgaatttttatgtgtataagtgtgagcctacacgtatgtgtgtgtaccacctgcatgcagtgcccttgaaggtcaggagaaacatcagattgcctggagctgtagttatgaatgcttgtgagctgtcacagggctgctcagaactgatcctagatcctctgcaagagcagctagtgctcctacccacggagtcattcctccagccaagaaaaccttgttttgctctgtttttggagacagggtttctctgtgtaaccctggctgtcctagaactagctctgtaggccagactggcctggaactcagagatcctcttgcctctgcctcctgagtgctgggattaatgacccacaccaagaaaaacccctttagccaaacgcttctcaattccaacacacattaaaaaatatgtatttcttttgtcccccaaacgtgttgtattagtcattaaaaaatgcaaatctgttgggagccgcccccacatttgccgttacaagatggcgctgacatcctgtgttctaagtggtaaacaaataatctgcgcatgtgccaagggtatcttatgactacttgtgctctgccttccccgtgacgtcaactcggccgatgggctgcagccaatcagggagtgacacgtccgaggcgaaggagaatgctccttaagagggacggggtttcgttttctctctctcttgcttcttgctctgcttgcttcctgcaccctggctcctgaagatgtaagaaataaagctttgccgcagaagattactggtctgtggtgttcttcctggccggtcgtgagaacgcgtctaataacaattggtgccgaattccgggacgagaaaaaactcgggactggcgcaaggaagatccctcattccagaaccagaactgcgggtcgcggtaataaaggttcccgtaaagcagactgttaagaaggattcaactacatgaattcagaacttttcagctggggaacggtggataccagtaagtatagctttacgaggtacgcctggccttgaactttctaacgaaattcaagacagtctatcagaagtaaagtggggaatagctttacaaggtacgcctggccttgaactttctaacgaaattcaggacagtctatcagaagtaaagnnnnnnnnnnnnnnnnnnnnnnnnnnnnnnnnnnnnnnnnnnnnnnnnnnnnnnnnnnnnnnnnnnnnnnnnnnnnnnnnnnnnnnnnnnnnnnnnnnnnnnnnnnnnnnnnnnnnnnnnnnnnnnnnnnnnnnnnnnnnnnnnnnnnnnnnnnnnnnnnnnnnnnnnnnnnnnnnnnnnnnnnnnnnnnnnnnnnnnnnnnnnnnnnnnnnnnnnnnnnnnnnnnnnnnnnnnnnnnnnnnnnnnnnnnnnnnnnnnnnnnnnnnnnnnnnnnnnnnnnnnnnnnnnnnnnnnnnnnnnnnnnnnnnnnnnnnnnnnnnnnnnnnnnnnnnnnnnnnnnnnnnnnnnnnnnnnnnnnnnnnnnnnnnnnnnnnnnnnnnnnnnnnnnnnnnnnnnnnnnnnnnnnnnnnnnnnnnnnnnnnnnnnnnnnnnnnnnnnnnnnnnnnnnnnnnnnnnnnnnnnnnnnnnnnnnnnnnnnnnnnnnnnnnnnnnnnnnnnnnnnnnnnnnnnnnnnnnnnnnnnnnnnnnnnnnnnnnnnnnnnnnnnnnnnnnnnnnnnnnnnnnnnnnnnnnnnnnnnnnnnnnnnnnnnnnnnnnnnnnnnnnnnnnnnnnnnnnnnnnnnnnnnnnnnnnnnnnnnnnnnnnnnnnnnnnnnnnnnnnnnnnnnnnnnnnnnnnnnnnnnnnnnnnnnnnnnnnnnnnnnnnnnnnnnnnnnnnnnnnnnnnnnnnnnnnnnnnnnnnnnnnnnnnnnnnnnnnnnnnnnnnnnnnnnnnnnnnnnnnnnnnnnnnnnnnnnnnnnnnnnnnnnnnnnnnnnnnnnnnnnnnnnnnnnnnnnnnnnnnnnnnnnnnnnnnnnnnnnnnnnnnnnnnnnnnnnnnnnnnnnnnnnnnnnnnnnnnnnnnnnnnnnnnnnnnnnnnnnnnnnnnnnnnnnnnnnnnnnnnnnnnnnnnnnnnnnnnnnnnnnnnnnnnnnnnnnnnnnnnnnnnnnnnnnnnnnnnnnnnnnnnnnnnnnnnnnnnnnnnnnnnnnnnnnnnnnnnnnnnnnnnnnnnnnnnnnnnnnnnnnnnnnnnnnnnnnnnnnnnnnnnnnnnnnnnnnnnnnnnnnnnnnnnnnnnnnnnnnnnnnnnnnnnnnnnnnnnnnnnnnnnnnnnnnnnnnnnnnnnnnnnnnnnnnnnnnnnnnnnnnnnnnnnnnnnnnnnnnnnnnnnnnnnnnnnnnnnnnnnnnnnnnnnnnnnnnnnnnnnnnnnnnnnnnnnnnnnnnnnnnnnnnnnnnnnnnnnnnnnnnnnnnnnnnnnnnnnnnnnnnnnnnnnnnnnnnnnnnnnnnnnnnnnnnnnnnnnnnnnnnnnnnnnnnnnnnnnnnnnnnnnnnnnnnnnnnnnnnnnnnnnnnnnnnnnnnnnnnnnnnnnnnnnnnnnnnnnnnnnnnnnnnnnnnnnnnnnnnnnnnnnnnnnnnnnnnnnnnnnnnnnnnnnnnnnnnnnnnnnnnnnnnnnnnnnnnnnnnnnnnnnnnnnnnnnnnnnnnnnnnnnnnnnnnnnnnnnnnnnnnnnnnnnnnnnnnnnnnnnnnnnnnnnnnnnnnnnnnnnnnnnnnnnnnnnnnnnnnnnnnnnnnnnnnnnnnnnnnnnnnnnnnnnnnnnnnnnnnnnnnnnnnnnnnnnnnnnnnnnnnnnnnnnnnnnnnnnnnnnnnnnnnnnnnnnnnnnnnnnnnnnnnnnnnnnnnnnnnnnnnnnnnnnnnnnnnnnnnnnnnnnnnnnnnnnnnnnnnnnnnnnnnnnnnnnnnnnnnnnnnnnnnnnnnnnnnnnnnnnnnnnnnnnnnnnnnnnnnnnnnnnnnnnnnnnnnnnnnnnnnnnnnnnnnnnnnnnnnnnnnnnnnnnnnnnnnnnnnnnnnnnnnnnnnnnnnnnnnnnnnnnnnnnnnnnnnnnnnnnnnnnnnnnnnnnnnnnnnnnnnnnnnnnnnnnnnnnnnnnnnnnnnnnnnnnnnnnnnnnnnnnnnnnnnnnnnnnnnnnnnnnnnnnnnnnnnnnnnnnnnnnnnnnnnnnnnnnnnnnnnnnnnnnnnnnnnnnnnnnnnnnnnnnnnnnnnnnnnnnnnnnnnnnnnnnnnnnnnnnnnnnnnnnnnnnnnnnnnnnnnnnnnnnnnnnnnnnnnnnnnnnnnnnnnnnnnnnnnnnnnnnnnnnnnnnnnnnnnnnnnnnnnnnnnnnnnnnnnnnnnnnnnnnnnnnnnnnnnnnnnnnnnnnnnnnnnnnnnnnnnnnnnnnnnnnnnnnnnnnnnnnnnnnnnnnnnnnnnnnnnnnnnnnnnnnnnnnnnnnnnnnnnnnnnnnnnnnnnnnnnnnnnnnnnnnnnnnnnnnnnnnnnnnnnnnnnnnnnnnnnnnnnnnnnnnnnnnnnnnnnnnnnnnnnnnnnnnnnnnnnnnnnnnnnnnnnnnnnnnnnnnnnnnnnnnnnnnnnnnnnnnnnnnnnnnnnnnnnnnnnnnnnnnnnnnnnnnnnnnnnnnnnnnnnnnnnnnnnnnnnnnnnnnnnnnnnnnnnnnnnnnnnnnnnnnnnnnnnnnnnnnnnnnnnnnnnnnnnnnnnnnnnnnnnnnnnnnnnnnnnnnnnnnnnnnnnnnnnnnnnnnnnnnnnnnnnnnnnnnnnnnnnnnnnnnnnnnnnnnnnnnnnnnnnnnnnnnnnnnnnnnnnnnnnnnnnnnnnnnnnnnnnnnnnnnnnnnnnnnnnnnnnnnnnnnnnnnnnnnnnnnnnnnnnnnnnnnnnnnnnnnnnnnnnnnnnnnnnnnnnnnnnnnnnnnnnnnnnnnnnnnnnnnnnnnnnnnnnnnnnnnnnnnnnnnnnnnnnnnnnnnnnnnnnnnnnnnnnnnnnnnnnnnnnnnnnnnnnnnnnnnnnnnnnnnnnnnnnnnnnnnnnnnnnnnnnnnnnnnnnnnnnnnnnnnnnnnnnnnnnnnnnnnnnnnnnnnnnnnnnnnnnnnnnnnnnnnnnnnnnnnnnnnnnnnnnnnnnnnnnnnnnnnnnnnnnnnnnnnnnnnnnnnnnnnnnnnnnnnnnnnnnnnnnnnnnnnnnnnnnnnnnnnnnnnnnnnnnnnnnnnnnnnnnnnnnnnnnnnnnnnnnnnnnnnnnnnnnnnnnnnnnnnnnnnnnnnnnnnnnnnnnnnnnnnnnnnnnnnnnnnnnnnnnnnnnnnnnnnnnnnnnnnnnnnnnnnnnnnnnnnnnnnnnnnnnnnnnnnnnnnnnnnnnnnnnnnnnnnnnnnnnnnnnnnnnnnnnnnnnnnnnnnnnnnnnnnnnnnnnnnnnnnnnnnnnnnnnnnnnnnnnnnnnnnnnnnnnnnnnnnnnnnnnnnnnnnnnnnnnnnnnnnnnnnnnnnnnnnnnnnnnnnnnnnnnnnnnnnnnnnnnnnnnnnnnnnnnnnnnnnnnnnnnnnnnnnnnnnnnnnnnnnnnnnnnnnnnnnnnnnnnnnnnnnnnnnnnnnnnnnnnnnnnnnnnnnnnnnnnnnnnnnnnnnnnnnnnnnnnnnnnnnnnnnnnnnnnnnnnnnnnnnnnnnnnnnnnnnnnnnnnnnnnnnnnnnnnnnnnnnnnnnnnnnnnnnnnnnnnnnnnnnnnnnnnnnnnnnnnnnnnnnnnnnnnnnnnnnnnnnnnnnnnnnnnnnnnnnnnnnnnnnnnnnnnnnnnnnnnnnnnnnnnnnnnnnnnnnnnnnnnnnnnnnnnnnnnnnnnnnnnnnnnnnnnnnnnnnnnnnnnnnnnnnnnnnnnnnnnnnnnnnnnnnnnnnnnnnnnnnnnnnnnnnnnnnnnnnnnnnnnnnnnnnnnnnnnnnnnnnnnnnnnnnnnnnnnnnnnnnnnnnnnnnnnnnnnnnnnnnnnnnnnnnnnnnnnnnnnnnnnnnnnnnnnnnnnnnnnnnnnnnnnnnnnnnnnnnnnnnnnnnnnnnnnnnnnnnnnnnnnnnnnnnnnnnnnnnnnnnnnnnnnnnnnnnnnnnnnnnnnnnnnnnnnnnnnnnnnnnnnnnnnnnnnnnnnnnnnnnnnnnnnnnnnnnnnnnnnnnnnnnnnnnnnnnnnnnnnnnnnnnnnnnnnnnnnnnnnnnnnnnnnnnnnnnnnnnnnnnnnnnnnnnnnnnnnnnnnnnnnnnnnnnnnnnnnnnnnnnnnnnnnnnnnnnnnnnnnnnnnnnnnnnnnnnnnnnnnnnnnnnnnnnnnnnnnnnnnnnnnnnnnnnnnnnnnnnnnnnnnnnnnnnnnnnnnnnnnnnnnnnnnnnnnnnnnnnnnnnnnnnnnnnnnnnnnnnnnnnnnnnnnnnnnnnnnnnnnnnnnnnnnnnnnnnnnnnnnnnnnnnnnnnnnnnnnnnnnnnnnnnnnnnnnnnnnnnnnnnnnnnnnnnnnaaacaggcaacatttttctctttgaatctggcctactctatttaacataataatgtcctctctccatcctttcgttttcctgtaaatattataatttgaggggctttggtcgtgggtgtgtgtttgagacggactcactctgtaggccaggctagcctccaaccattgcaattatcctgtcccagccttaacagtgctgaaatcattgaaccaccacgcccagttgagcgcccagattctgaaaggcaaggcaaggtaaggccggtccgcgagcaaaggccctttgttatagcatccccggcccttcatacaaaccaattccttttcactgagaggaggtctgagtctagaagggggttgactcgtgcacagctttccttctgcctgagtaggtagctgcccggctcaggtgccctgtccttcacagggaggggacctgaagcccgcgccgctaggcggaagcgctgctaccattggcccagcagccgctgtcacctgcgcggagccgggcccccaagcgcaaagtccgctgtccgaggccagggagcttgcgccgcagcgcaggtggtccacgccctgggacctgcaagatgccgcttggactgcgcgggaagaagaaggcggccaagtccaaggaggccgcgaggctggtggagggcgagagatccagtggcagccagggtgtccccggacccccagctccggcacgcaagctggtgttccacgcacagctggcgcacggcagcgccacgggccgagtggaggacttctccagcatcagcgagctctacgccaagattgccggcgtgttcgagatcgcgccatccgaggtaagcacaggggcacagcctgtcctccaaccaagctggctgcgcagcagttcccgagcttcaggtagccagcagggtggggtcggtccccagcgcctcaggggaagagagcttggtggtggaaagcccagtcctgggaccggatgaaactatccgctcagatccggcttgtgggtcactggggtcaaggcgactgagttttcttttgttaaggagtctgctgtagacttgctcaggtctagtctcgcaggataggatgtgcgccagcaccttcccggacgcagatctgctggaacaaattaatgccttccacaggacttggactttactcttaggctttctgtcagagagctgcactgggagtctaaccggtgttaaataggagggggaaagtgcctccctggacacaccacagggaggaggaaagacctctcggtgggtacaacgtgaagcttcgtttgctctccactggacgcctccagaacgaaccgtttcggtgttaatatgtaagaaatgtaaaacatgggctgttattccaaaggaagtaactcagaaaatcatagcaaactctccaactagcaaacacagttttcacggaagagctcagcttcattttttccaaggtatctttgaaaagagaccaagaaacataagtaggttgattatttgatgcctgaagccggagttgccataggtcctattttggatgcgttagtctatgggggtttttgtgggcccttttgtgcttactcaagagagctacctgcaaatgcaggtgtgaaatatttcggagctgcagcaaaagactcgagctcaaattcctgaactcatcagaaaaaacaaaaacaaaaacaaaacaaaacaaaacaaaacaaaacaaaaacgcacagtggtaaccccagtgcctaggggatgggcttgaaccagcctagtctacttggtatgtttcaggattgtgagagaacttgtttttaagaaaaaaaaaaaaaaaaagcgaacagagtctaagaagcaatgctcaggactgtccgctggcttctactagcagctacacacatggaaatattttgttcatttttgtgtgagtgtaggtgctcttgccggggaannnnnnnnnnnnnnnnnnnnnnnnnnnnnnnnnnnnnnnnnnnnnnnnnnnnnnnnnnnnnnnnnnnnnnnnnnnnnnnnnnnnnnnnnnnnnnnnnnnnnnnnnnnnnnnnnnnnnnnnnnnnnnnnnnnnnnnnnnnnnnnnnnnnnnnnnnnnnnnnnnnnnnnnnnnnnnnnnnnnnnnnnnnnnnnnnnnnnnnnnnnnnnnnnnnnnnnnnnnnnnnnnnnnnnnnnnnnnnnnnnnnnnnnnnnnnnnnnnnnnnnnnnnnnnnnnnnnnnnnnnnnnnnnnnnnnnnnnnnnnnnnnnnnnnnnnnnnnnnnnnnnnnnnnnnnnnnnnnnnnnnnnnnnnnnnnnnnnnnnnnnnnnnnnnnnnnnnnnnnnnnnnnnnnnnnnnnnnnnnnnnnnnnnnnnnnnnnnnnnnnnnnnnnnnnnnnnnnnnnnnnnnnnnnnnnnnnnnnnnnnnnnnnnnnnntcccggctgagagcaacttcttgtcagagcgtggcctacatacatctgttctgctgttacatgtccggtgttttcttatttttttatttttaaattagttgtttattaggtctgtttaaatgaaattgaggtcaaggcgaggtttcaataagaaaaagagggttttttttttaattttttttttttgagatttaagaaaattgctttatgtgtgggggtgttttgtttgcatgtgtctgtccagtctgattctctagaactggagttagagggctgtcagcagccctgggtgctgggaatcaaatcagagctgtctgaaagaccattcagtgctcctaacccttgatccatctctccagccccaagaaaggagtttttaaaatgctagtctttgttctttcagggttcccaggctctaagggcaaatcacaaagtctttttgttgtgaattatttattttagcgtaggattgccataacacagtgcttgtatagggatgttcaactgaaaaagtgctttcaaataacacttgcctctcacctcccccgggtgaggtagacggcagcttaaccaggtgtgatcgactgtgaatccaggctccactgactctcagtagctgggtagccttggccgaggttgacttctttttagcatcaactacctacccgggtggagataaggatatctatcagctaggcggtccttcagatgggaggggtctgcatgtaaacctaacaggttacactggtgctctaaaaactgtaattaataccgttgatacaggccagttaaacaaatggctgacgtacaagaggttgggcgttgaccaaggtcagcttgggaggaaagaagcgaggctgctatttgtgcttgagtcctctggtttccaagctagtgagagtgttagtgtaacaccggtgagctttaaactctctcctgtaaccagggactccagacttagagaactttccaggagcccctttccttatcatgaatacacgaccctgagctaaagatacatgacttcatccaatctacttagtccctaagaagtattattgtgctcttgcttcacaaagagggaactagggctttgagcttcatattcgaaatcatactttgtcacaggatatttgttcacactttgacccccaagattgtgttatttactgaaaaaaaaaacaaaacaaaacacctatttctagttgtggggtggctcagccttagcacacacctttaatccctctggctggagtacagacattctcttagcacatacctttaatcccaaacaatgaaggaaaagttagtttgtagaaggaagcacctgtgtttgaaagcaatgtctaattgagtggcagacaaattgaccaatcagagaaagatctgacagactaggctatgcccaactcttgcgagaagagaggggaaagggcagctagtgaagaagcagtgcggagagagagggaagggctttactgggacaggtgtacagaggcagtttgcagtgagaacagccgagacccaggtgaagacagaatgagccagagagtgagtagaagccagaagattacaacagattgccaaaggtagtatgaggccaagcagagcaattcagtcagaggccaaaagaagctaatttgaatcagtcagcttagagagaagtattgagctagacaactgagttgaacgagccagagttcagaaaaaacaaacaaacaaacaaacaagcaaacaaacaaacaagaaagactgatctcattcagcagtctcagaggctgggagcattgtaggcctagataagattggatggaggctagaagctttcaggtctaggcctaggttagcagacaaggcaggaagcctgtctgacaacagttagcacaggagaatacaagttacatcgtgacacatggtaaatggcagagcccacatgtaagcccattgccccctgactccacattctccaaagctacattgttaactcgtttttccagtcctttaatagtagcttggaaactatgttaagtgttttcagtttcgggtgcattgacttgcaagataaaattccaacatattaatgagcataaggtgtttggatgtgcaaagcccataagcaaatttttatagcaacaatatgtatattggagtggtggtgtgtgtaatcagcattagttttccagatggatttttaaaacgttaatagtgggtgagatggctcagtggatgaagctcttattgccaaagctgagttctagcctcagaacctacttgatggaaggaacacagactcctggaacacactgccacccctctcccaaaagtgtaaaaaaaaataaaaatcttaattggtataatgagtacagacaggccagagtactggttacctgttcctcctagggaagttattgactgctgagggctgctgagagagaaagaaagggagagggagagaggtctccagtggtataaacaacactggggagtccagtggatagctccacacccaagttcatgaccgcagccctagctaaacacagacacactcaaactgatatgaaagtatgcgggggaattgttggcatgaggtgtggcttgcagggggcaggggctagaggaagataaaagggcatggaaggagggtttgaccaacattatacacacgtacgaaatcatcagataatacagctactcatcactggagagggtaaacatcccaggagctgacactgaagttgcttagtgaaatcaaagacacatcacacagctctcctgtaaccgccacacccattgcataccctccttacagtgtcctaaggaaacgacaaacaaaaccaaaaaccttcagatgtattttaaggagctaaggatggcgggacatacccataacctgagcactctaaagctgaggcacgaggatcatgaacacaagtttgaggccaggcaaggctacagagcaagtctggagccagcttgagccacatgcatagcaagatgctgtctaaaaaacagaaaaaagaggaaagaaagagagaaagaaagaaagaaagaaagaaagaaagaaagaaagaaagagagagaggaagagagagagaaagaaagggggagatagaggaaaataaaagaaagaaaaggaaaggaaaggaaagacaagacaagacaagacaagacaagacaagacaagacaaacagaaacaacaacaagcacaccttggggattctgtcccctcctctgttcttgggtgagggctatggtgatatacacttgtgttttgagatgttagtgtatatatataaaagaaaaaaaatctcctccctaaagagagtagacagggactgcagaagcctcctgactctggagaagtggctgcagggacagaagtagcattgtaccaagagctccactctctcaagaggaagaaggctgaggtcaggtgaggaggcaggtgcaagcgaactcccagggactcctgcgtccccagctgtgccaggcagacagggtagggtgtggtctctgctcactgggttcggttgcagtttacagttggaccaagtgtgcctctgagaagttaagctgctttcccagaacccatgggatcgtcagagccaagacttgacttgagtttcctggttctaactggctgcacagaagctaggaggttcttagtaaaacagttctttcagacaggctttcattatgaagccctggctgatctggaactcactatgtagactaggctagccttgaactcacaaacatctatctgtctgcctatgcctcctgagtaccaggattaaatatgtgcgtcaccacaacctgtcaggaaaactttaagaatgtctacttattgaatttttatgtgtataagtgtgagcctacacgtatgtgtgtgtaccacctgcatgcagtgcccttgaaggtcaggagaaacatcagattgcctggagctgtagttatgaatgcttgtgagctgtcacagggctgctcagaactgatcctagatcctctgcaagagcagctagtgctcctacccacggagtcattcctccagccaagaaaaccttgttttgctctgtttttggagacagggtttctctgtgtaaccctggctgtcctagaactagctctgtaggccagactggcctggaactcagagatcctcttgcctctgcctcctgagtgctgggattaatgacccacaccaagaaaaacccctttagccaaacgcttctcaattccaacacacattaaaaaatatgtatttcttttgtcccccaaacgtgttgtattagtcattaaaaaatgcaaatcaaaactacaatgagatccatttaccaaattcaggattgctctcatgaaataaaacaaatagcaggcctggcaggatggctcagtggtaaagcccttgcctgacaaacctagtgacctggaaccatacggagggagaaggggagaatcggcttccgcaaattgtcctctaccctacacatgtgccgctggtatcccggaagttaccttatcatacactcatgcagcaacagcaactgcaacaacagacagacccaaacagagcagtgctgtgcagggaatagaggggggacaggaatcctgcatactgctgaggggaattaagttagtgcagctactatgaagttaccataaatgttccaaaaaaaaaaaaatgccatagagtcaaactgtatagcttctctgcaattgctcaaaggactttcaattagcatgtcatagagggacctacacagccatgtttattgatgcactgtttaaagctgagtcatggaatcagcttgggtgtctgtcagcttgtggaaagacagagaacattttatatatgcacacacacatctatgtatatatgtatatacataaacatatatgcacacacatatatgtatatacatgtacatatacatatatgccatatacctatacatatatgcacagacacactcaatggagctgtattcagctgtaaagaatgaggaacaaatatggtcaaagttcatgatatatttgaaaatatctctacaaaacccagtccaatgcacagtgaacatacataaagacagctgctgctgctgggaagtgactccttgggttctagctgtttcgtggtccctggaggaagaagtgaatggagcctgtgaattgtttcagatttgctactgatgttggctgggtgcagactattgtgatcagtacatggaaacagatggcaattatgcaaaaagcctctgtcggatgctttcgtccccaaataactaactgagcaannnnnnnnnnnnnnnnnnnnnnnnnnnnnnnnnnnnnnnnnnnnnnnnnnnnnnnnnnnnnnnnnnnnnnnnnnnnnnnnnnnnnnnnnnnnnnnnnnnnnnnnnnnnnnnnnnnnnnnnnnnnnnnnnnnnnnnnnnnnnnnnnnnnnnnnnnnnnnnnnnnnnnnnnnnnnnnnnnnnnnnnnnnnnnnnnnnnnnnnnnnnnnnnnnnnnnnnnnnnnnnnnnnnnnnnnnnnnnnnnnnnnnnnnnnnnnnnnnnnnnnnnnnnnnnnnnnnnnnnnnnnnnnnnnnnngtggaagtggatggtgtgtgtatggtatttgtgtgggagtggtctatgtgtgtgtgtgtgtcgtatatatgtgtatatggtgtatatgtttggttcatacccatgagtgtgtgtgtacatgcacataatactcgaatacaggggaccagatgccttcctcttctctctgtcttactgctttgagatagagcctctcactaaatatgacccttctcattgcagctaggccaattggccagtggactcttggactctgcctgtctttgtcccacaatattgggctcacaggcatgcagagtcagactcagggttttacatgtgtgttggtctttgaactcaggtcttcacccttgtataagctccttaaccactcagccaacccctaaagtatttttaaaagtattcagattatataaaagagttgagtcattgtgcctggagctcgtgagctcttgatcatcgttatacattttgttgaagaggcgttttgaatatttacctcttttaactgttcagcaaggagctgacggctggatatggttataaatccttactgtgaggaatgaaggctggagcaggccgtacatttgaatgtggctagaagctggtatatccagaaaccagaaacttaagactcagtttctttacagggctcagaagttatttctgtggtcttgactatactggccagtgatttttcctcaccagaagtgcttgtagccagggtgtttcagacttctaagaaaaaaaaaaacaaaaaaaaactttgtaatacttgtaaacacacaatgaaaagtcctgggatggaatcaggtgtgggattttctgcttgtatcatgttgatgctcagagtttcagatttgggaatattctggattagagctatacaacctttatcagtttgtatcgttaggtaccgaacagctcatcgaatgagtgggtgaaccatttggtggttccttctctcttgacatatctcacaagtgtttgggatggaggtctctctgctgcacaggcgtgcctctaactcttggcttcagacattcgggccttttgagtagttaggatcatgtgctgtgtcatcatgtctagccagaaaaatacatttaaaaatgtgattttaacatttcaaactctcagccaggcagtggtggtacatgcctttaatcccagcacttgggaggcagaggcacgtgtgatcgctgagttcgaggacaacctggtgtacagactgaatccacagagaaaccctgtctcaaaaaacaaaaacaaacaaacaaaactgaagctctcaatctcaaaatattcaattatttattttaaagggaaaagaacctatgttcttttcggcgtctactcccatctctggagcctgctcccatcttccactttgttgaagaagggtctctcgtgtttccaacgctgcaccaagtgctccaggcgtccagcctactgccccgcctcagctctcatctgaccgtatgagcgctgggtttacagatttgcaccactgcatccaactcgtgattctgtggcttccagagacggggctctcggatcaacaggtcacgaggtcgtcaggtccgggtgacttttattcactgagccatatcccaccccttgctcccatatcctaagcttaccactctcgtctcttctttatagcggaactccgttggggctgctatctctactgggaattagtcagcgtctcatcctgtgctccaaaccctccatggcttctcatctcatgtggtcatcgttctttctgccccagccaggctggctctatggctgtttcttgtgtgcaggaaggaggtccctggctgttgtcttggacgggcttcttctggcaaatgtcctcttggcaaggctgacctgatcatcccctcagaatgttcagcaccctaaacactctcttgcttaactttcctccgctgccttctactgtcctaactgcatgacgttactgcctgtcctgcgccccccccaccccatagagaaaaacctccccaagggctacaacttgagtcttgtttgtttactggtgcaagtctgagggcctaaaagctgtgtgacctgggacatccttgggaactctgatttgcttcccgtgtgttttgagtcaggtgctgtgcagcctaagctctcctcacacacaggaatcctttttcctcagttttgtgatggttgtggttacagtttatgttacgctggggactggggagggcaagcacactgccaactgaactatatcccctgctctgtccctgtatctgtggttttatgttttttattaaagtgtatttgctgaacaaaaggaaaagaatcctcacaaatttagtatttataattctgcatcattggcattaaatctttagattaatatagatattaactttttatattaactttaacttaatggagatattaactttttatattgtatggaggagtgactgctctcagtcaggaaaatgaggaacatcatgtctttaacattttctctttattttcaatccaactcagtttcgtgtgtgcaagcatgtgtgtgtgtgtgtgtgtgtgtagcatataagcttgcaggtgcacacatacctttctgtgtaagtgcaggggtggaggcagatgttgggtgttttattgctttctagctcttgtcttgagacacagtctctcactaggctggaagcttgcctttttggctaggccaactggctaccaggatctcgcttccagggtctgcttgcctccactccctagtagtagtcttacaagcatacatagcaaagtccgaatggggattcaaattcaagttttcatgctggcacagttccctttaacataaaaaacattttgtctgtgtttaaggtgtgaaacagcatttaatatatatttatataatttgatatattgtatttaatatatacaattactgcagtcaagctaattagcatacccgtcttacaaatggtgacatttgcagctgtttgcaaacaaagccacttcctagtgagtcacagcatgagctgccttatgaggcttctcagaagcatcttcccttccnnnnnnnnnnnnnnnnnnnnnnnnnnnnnnnnnnnnnnnnnnnnnnnnnnnnnnnnnnnnnnnnnnnnnnnnnnnnnnnnnnnnnnnnnnnnnnnnnnnnnnnnnnnnnnnnnnnnnnnnnnnnnnnnnnnnnnnnnnnnnnnnnnnnnnnnnnnnnnnnnnnnnnnnnnnnnnnnnnnnnnnnnnnnnnnnnnnnnnnnnnnnnnnnnnnnnnnnnnnnnnnnnnnnnnnnnnnnnnnnnnnnnnnnnnnnnnnnnnnnnnnnnnnnnnnnnnnnnnnnnnnnnnnnnnnnnnnnnnnnnnnnnnnnnnnnnnnnnnnnnnnnnnnnnnnnnnnnnnnnnnnnnnnnnnnnnnnnnnnnnnnnnnnnnnnnnnnnnnnnnnnnnnnnnnnnnnnnnnnnnnnnnnnnnnnnnnnnnnnnnnnnnnnnnnnnnnnnnnnnnnnnnnnnnnnnnnnnnnnnnnnnnnnnnnnnnnnnnnnnnnnnnnnnnnnnnnnnnnnnnnnnnnnnnnnnnnnnnnnnnnnnnnnnnnnnnnnnnnnnnnnnnnnnnnnnnnnnnnnnnnnnnnnnnnnnnnnnnnnnnnnnnnnnnnnnnnnnnnnnnnnnnnnnnnnnnnnnnnnnnnnnnnnnnnnnnnnnnnnnnnnnnnnnnnnnnnnnnnnnnnnnnnnnnnnnnnnnnnnnnnnnnnnncctccctcccttccttccttccttccttccttctttcctctctctctctctctctctctctctctctctctctctctctctctcccctccttcatttccatctgcttctaatttaagttttttatttactctttgacaatgcttatgcacgttgtgtattttggtcagattctcctccccttatcctgtggttgtgagctgcctaaagcagggtctagaaatcagagtcctcttcaagagcagcaagtgtccttgacctctgagccatctctcctgtaaccctcctccatatgggctcacaggaatgaagtcggttctgcatgcttgcatggcaagtgctttactgtctgagctgtctctccagacctccacgcccatccttttagcaagtcaccaagaccccagccctcccctgggaatgcagtctcagcagtgtcctcatttattatacagaggactttggggcataagtcctggtggcctctggatgtgcttcactgatggttgtcagtgctgggttgttgatgtgtgtgtgctacgcacactccacctatcttccgttctactcttccagttccatgattttttttcaatcttcaaggttcctagttacttctaaacctactcttccagccaagaggtttctcatcttcctgctgtctcccgagtcttcctctgtggctgctacgctcatcacatcttttgagaatcctctgtttacacttcagatctttcagttagggtctcctgtgtgttgagttggctatatgtagattaagatggctcttgaatttctcatcaccttggctccacctcctaggggctgaggttacaagtgtgtcaccacgcccaggtcatgtggttcgagagcccagggtcttgtgcttgttagacaggtcaccgactgagtcagatctccacccccacattttatagttttttaagcatttcattctactgtgcctttaaaaaatttttgtaattatatttatgtacagaaaacttagcagtgtacatttaacccagtttagtggcaagttctttagcctctgccttttccagcttggcaatgtgagccacagacttaggacccaggatgttgccttcccagtggtggctcagctaacagctcattattgtaattggtgctatcagcttagccagagcacccttgtcttccgagttaacctgtgcgaaggcaacagtggtgtatgtcttcctgtggaccaggcgtcccagcctggcctttcccttgatgatgcagtagggcacccccatctttccacacagggcaggcaggaaaaccaccagctcaatggggtctatgtcatgggcaatcaccaccagctgagccttcttgttctcgaccaaggtggtgactgtattgactcctgattggagtacaggtggtctcttagttgggacgtcccctttgccagcagctttcttctcagcaggggccagtagcctttgcttcttctcttgctttgtctctggcctgtacttgtgggcaatcttcagcagctgggtagctgtttgcctgtttagggcctgggtgaactggttaatggcagaaggtactctgagctgcttatagaggttgctctttgccactgcaacctgatatagcagggccatttgacaaagcatgttggatctcttttgggctgtatgccctgtgcaatgctgaagccacatagcatcaggccctgagttaactcagtgatgcttgctctctccctgagcgctgggcttgtctaagccaccagatggtcaggtgctccatcaacctctgctaaataaacattcatggtggatgcagtagggcgaagctgagaagatagacagcagtggaagtctcatgtgtgtgggaggggctttagggtatgtgggaggggctttatggtatgtgtgaggggctttagggtggggggggcagctatactataggatatgtgtgtattgagggaggagggggcaactttactctccaggccgggagggtgactcagtttttagaaggtgcagaaaggcctgactcttgttctaaaggtagaacttactcaaccatgcattttctctgttttctgtatataaggtttggtttgctggtattttctgaatttgcactttcttgcctgcgaacttgggaacgtgctaacagccacttcatgtgcttagtatcccctatgaacattggtgtcactttcatgtgaaaacttcaagaaaaatgactccttttgggaattaaaaagggggggnnnnnnnnnnnnnnnnnnnnnnnnnnnnnnnnnnnnnnnnnnnnnnnnnnnnnnnnnnnnnnnnnnnnnnnnnnnnnnnnnnnnnnnnnnnnnnnnnnnnnnnnnnnnnnnnnnnnnnnnnnnnnnnnnnngatagagacactcaggtagcctgggccaaactgtctgggtggctgggatgaactaccctagacccagtggctcctttctaggcctgggagatggttcatcaggtaaagcagtggtgtctcagtgagaggccccaagtttagatttccaggactcacataaagctgggtagatagcgtgcctataatctccgtgcgtctgtggaaagagacaggagaatccctggaagcgttagagcctgttgtcccggtgaacacagcagtgagcaaaaagagagcctgactcaagcaagcaaggtgaggactgacacctgatgctgctctctgacctctagttttctgtgccctacattatgagtcacaaaccagtttctgtttctctgtgtcagagtccagtgtgggcgggtcaggaccttctcatgcccgtggctccgggattcagctccgcgctgcctgcagtgtgatggggtaggccggtgaagactgaggagtcctgcagaaggggagctggctaggctcagcattctgagacagcttgaattagggaaagattagctatgccgttacgtcaccacgcaccagaaatgtgacgctgctgttccccagggcctccgtgcatcctcttctttgtctgtgtttcctatggacccgctcttcgctggaggacacagaggatcccatagcctttcctctaccttgggactgaattgcatgctcccccccccgccccgccccgccccgccacgccccgccacgccccgccccgccccgtgtgtcagaactttacctgactgttnnnnnnnnnnnnnnnnnnnntatgctatacaagagatagagacactcaggtagcctgggccaaactgtctgggtggctgggatgaactaccctagacccagtggctcctttctaggcctgggagatggttcatcaggtaaagcagtggtgtctcagtgagaggccccaagtttagatttccaggactcacataaagctgggtagatagcgtgcctataatctccgtgcgtctgtggaaagagacaggagaatccctggaagcgttagagcctgttgtcccggtgaacacagcagtgagcaaaaagagagcctgactcaagcaagcaaggtgaggactgacacctgatgctgctctctgacctctagttttctgtgccctacattatgagtcacaaaccagtttctgtttctctgtgtcagagtccagtgtgggcgggtcaggaccttctcatgcccgtggctccgggattcagctccgcgctgcctgcagtgtgatggggtaggccggtgaagactgaggagtcctgcagaaggggagctggctaggctcagcattctgagacagcttgaattagggaaagattagctatgccgttacgtcaccacgcaccagaaatgtgacgctgctgttccccagggcctccgtgcatcctcttctttgtctgtgtttcctatggacccgctcttcgctggaggacacagaggatcccatagcctttcctctaccttgggactgaattgtatgatccccccccccgccccgccccgccccgccacgccccgccacgccccgccccgccccgtgtgtcagaactttacctgactgttgatctgttctctcctgtgattttgagagctactctgggcagggaccatcattaggcgacagttagttttataatgctaagctttttattatggaaccttacatgcaaaagcaagagggtagtataatttatccctgtgcccagcgccagcagctatcaaacattcgccaacctttcttcctctcatcctccaataaaagagtttttattgttgaacaaacgtaagcagaggaatgcacatgaggcaaatatcgtgtataatggagcaactgaaaagccttgaagccaggagcataaggaaatcgaccgtttcccaaaagaaccttcagtgtgcttcctcccacaagagtagccattgccttgatttctgtggtaatatatcgcacacagatctttatagtgtttaaaaattatttatgagtgagtacatgtgtcacatatgtgcaggtgctgaaagcatgtgtgtcacatgtatgcaggtgctgagagtgagtacatgtctcagggcatgtatgcaggtgctgagagtgagtatgtgtgtcatatgtgtgcatgccctgagagtatgtgtgtcacatgtatgcatgccctgagagtgagtacgtgtgtcacgtatatgcaggtgctcagagagctagaggacaacattggatctcttggaactggagctacagatagttgtgagctgccatatggatgctgggaattgagcctgggttctctacaagatcagcaagtactcctaactgccgaacaatctctgcagccatgatatttataattttatcacttcagtataccccttaaccccttttaaaattgaggcagtgtcctgtatggtaccaaaccccgtctgtaaacaagaaagatcttcaacttctcaaatgtcttgcattccctttatttatttgtacgtggagtgcacagctatggcgcgggcgcgtgggagttggctctctccttcctccaggtggatccaggagcctaacttgaggtgtttggtgacaggcacctttaccccttatgtcagctttggagtttcgatttcccctgtcttaccttcctaaatttgggggattacatgaccaccaaacccaaacctggcgagctgggcgtggtggcacacacctttaatcccagcacttgggaggcagaggcaggcggatttctgagttcgaggccagcctggtctacaaagtgagttccaggacagccagggctatacagagaaaccctgtcttgaaaaaccaaaccaaaccaaaccaaaccaaactaaaaaaacaaaacctgactagaagcattctgaacacctgttctatacggttggtagtgactcgagaggagtggttttaagaaagcgacagaggcctgggaagggaaggcaccatgagctgttggttcgtgtcccctggtgtcttccaggtcctaggaaaagtgatactgtgtcatcaagaaggagccaccattgaatgattcctaaaagtctgtgtgtctcctggaagggtttcttctgttgtttttcttctgtctcctgaggataaacccctgagctagtcaaggctgttccttgaaacttattattcagaacaaagtaactaattaacaaatagctttgggctagctgcttgctgagctagagaggagaaaggcaagagaagaggtgtggcttctctaagttaggatacaagcaaatgaaccttggccactgccacaggaactgcagctcttgtgtggctgagtgtttggggtattacaggtctagctggaagtcaaagctgggactttgctgccaccagcgaggtcctgcaggttttctggatatctggaaaacaggaagggacctcagagtttgctaacggcaggctgttcacggttgagaaatgtatctgccctctgttagtggctgagtgggttaagaacccaagcactgagaaggcatctttgttgtgtgtataaaaatctccctggagataaagtctggtagagcgacaggtccaactgtttttatttggcggctgacacccaggatccacatgtcagttggtaaaagtcacaggttcctaagttacagtgttaaagtggccttggagggatacacagtgtgagagttaaagagctggggattctgcatctttgttatgatcattcgcacgtccaagtgtcactttcatgtagaggtggctggttatttggtgttagcaccatttccttcctgacgcagggccaactctgactcatcttcccaaactcgccttctggtttctgtcaggatgttcccccttctgtcactgtcacttctgtctctttctgaattcgttgtattccccattttctagcttgattttcctgtctgtaaatatgtgtgggagaagggaagtacacatcaggaaacaggaagagtgtggttactgctgaagtcctagtgcacccttaacaagtgctacctcatctaaagcgaggattccttcagaacctctagaaattaccttgatcccccgtggaggcaactggagctcacagtataggtgaagcactcaagtgcagggcaatgtctttgatcccaagtgtctgtccaaacccaaagtttgtttcttcatctgtttctgcccaactaacacggttaggcttgcctgtgaatctctgtgtagcccaaactggactcaaaaaacaccatcctcctcttgcatgtcttccttcaatgctgtacagaatgattctttttttttaaacaaaaggtctacatatgtagttctggctgtcctataacccatgaggtagaccaggatggccttgaactcacatatgtccacttgccctgcttctgaagtgctgaaattaaaggtgtgcactgctatgtctgcctccacagctgattcttaactctatactcaaatttttctactactaaatgtgtgaacatttttacctctctgtaataatattttaaccaccatctatctgcacacacaatttaaaacataatatattaattgatcataatattagagaggaatatactttttagtatacagatatttggagaaagtagaagacacatgaagcaatcaggcatttgtatctacaggtggtaaaataatggatttaactaatgaaaacagaataaaatcccacggaatgtttatatattctctcattcctttcccacttgttttgttttttaggacagggtcctaccctgggacttagcatgtggcccaggctaggttgagtgtgtggtaattcagtgtaagtctcctaaacattgggtttatggtgtggaccaccgcgtccagcttgctttttcttcagatgtcacatttatactttgtaaatgtcttaactattgggttgtggcgtgtgtgtgtgtgtgtttgtacatgtgtttgtgtgtgtgcgcatgtgtctatgcatgtatgcatgtatgtgtgcatgagtacatgtgtgtgtatgtgtgtgtacacatatgaaggtcagaggaatgaaactcaggctacgaggcttgtatggcaagtgctctgacttgctgaactatcttgctggcccatgacctttttaatttcagttttatttttcctgttttgtttacgtattggtgttttgcctgcacgaacgctttgcactgtgcatgtgtctggtgctggaaggggccagaagaaggccttgagtgccctggaactggagttacaggcatgtggatgctgagaattgaagccaggctctgaaagagcagccagtgctcttaacttctaagccattactccagcctcccatggaaatctaagatagagaacgaccaagtaatgtctgtgaacacttgaaatgatttattgcaacacagcaacaccaggagctgactgaaatgcacgctaaaggttaaataacagaggcagtgcactggttagggatgtcgctgtctgaaatgaaggaatcttgcttttgcataaaacaaatgggtctttgattggcatggtcactgcagtctaggagaattcagaacaaagagtacttacttcccgtataaaacagtcagagcctaggcttacgtaattacatttcccactttgtcagtctgaatatctaacaagacacttgaaaattgtttggaatgtttcccaattcttcaccaagccaggcagttcatgtagcatctctgagccttccaaaccttctgcaaatgctagcgtcacctgatcattgtgacaaccgagagctctcccagatctcagctatttccttagaggttggtaccacccacccctgccctagtcctgttacttggctcccggctcctgcaggcggtgcttcacaccgggaggacagaagaccatctcagctgagtttaggcttctggatcaatcttacggaatgcgttggttcttctctagatgttgaaaatagaactccaggcaagcactgagccacagtcctggctcttacaggtttataatatgcagagtagagcacgtggttgcaatgtctcagtgtcacaggtcaccgcagctctgcacaggttgacaaggttcttgacaggtggtgagtcagcatggtgcaaaagaaaagcacaggctttgaggtcagatagggaggtgggttggggaaggaattcctctgtgtgttattgctaggcatagaaaatgccatggcgggcttatccttagcatacaattctgccagtctactaaacgttctgctaaacatgcatccatgttcagtagtcaaagctaattttcacccctcccgatacccattaagtctcctagaattttggtaattatgttcatatcatggcctgaactggctgattttgtgtgtcaacttgacacgagctggagttatcacagagaaaggagcttcagttgaggaaatgcctccatgagatccagctgtaggcattttctcaattagtgatcaataggggagggccccttgtgggtggtgccatccctgagctggtagtcttgggttttataagaaagcaagctgagcaaggcagaggaagcaagccagtaagtaacattcctccatggcctctgcatcagctcctgcttcctgacctgcttgagttccagtcctgacttcctttggtgatcaacagcaatgtagaaagagtaagcggaataaatccttttctctccaacttgcttggtcatgatgtttgtgcaggaatagaaaccctgactgagacatggccctagaagcctagactgaaagtctagggatggttatcagtgtcagacacagaagagtagttcaagcacagtctctcccagcacctaggccttaagagtttcctttatttttaattaaaagttgttattactgttgtaattgttagtgtgtgtgtgtgtgtgtgtctgtctgtctgccttcagacatgtgtcatggcatgtggatgccagagtgcaatactcagaagatgctctgtctcctctctcttcctcttcctcttcctcttcctcttcctcttcctcttcctcttcctcttcccctcccctcccctcttctctctctctccccctctctctctttcctcctcctccttctctctcccctcttctcttctcttctcttctnnnnnnnnnnnnnnnnnnnnnnnnnnnnnnnnnnnnnnnnnnnnnnnntcctctcctctcctcttctctcctccttctcctctcccctccccttccctctctctctctctgtgtctctctttctctgtctgtctctgtctctctctctctctctgaaggtttctcccactctttctgccatacttgctaccccaagctctctggtcctggctgagtctcctgttctgcctcttgctttggtattgtagcactgggtttcaggtgcccaccatcaaatctggctttttcacaagggttctggggaccagactcaggtcaacaggttcaaacggcaggagccattcccactgagccatcccaccagaatcttctttttaacacatgttttagcctcaacacactcatacaggaccatgccagttggtccttttaagaagaaatgaaaacgcaaataggagagcatacagttatatcacacacccaaataatgcagacagcaaaagaagttgtgagagcaaggataacctgggataaagtttacctaatgataaccaaattgctgggggtgggggtgcaggaaagaaggagattggaggtgaaagagcttgttatccatttgcactgaaatagcagcaggattcctttccatctcccatcctcccatctccccttctcagagtggtgaggagggctacacatcacaggatctgagggaggctgggggaagggagcatgtgtggtcataaaaatagaagcaggcagcacagacacagagtcagttcccagcctggagccagggcctgtactgtgcgttctggtgtggtgacacattcttgggagctgagcgtggtgtccagcagtagccagccagccttctgggaacccttctgaccctgctggctcctctctcctcctccaaatactctgcctgccccagtactagggatcttgaaggctgaatagacatgatgctggcaagcagagggtggggagaaactatggtgggagcagggggcagagggcagagggcagagggcagagggcagagggcagagggcaaggggttagggagcaagcttaagcaattcccagcacagagacctttacgtagacttgtgacctaccttccacagagccctttcagccctttctccttttcccaatgtctggtcctaaagatctccatctctaggcaagaaaagagtcaaacctgagcaaccccagcctagcagagatcgcacacatagtctgcagtaagggaaatcatgcctgtgtgtttagccgcccccttcccacttacccatcattcatttcttacatgttccagtttccaaataaagattaaagttcctgaggtggtctccctccttctcccaaattctttagcctcacctaaggattccaaaaggactttttcctaacaacttccaaatgtcttggtccagaataaatatccatctcccagtccctctgccctctctttcagatagtttttctagtgtatccttctccaagtgttcagcttgctgtctgaattcttgctctagactgtagtaacagaacaccttcctgttctagactgtggtaatagagtaccctcctgctctagactgtagtagcagagcaccttcctgctctagactgtggtaacagagtaccttcctgttctagactgtggtaacagagtaccctcctgctctagactgtagtagcagagtaccttcctgctctagactgtggtaacagagtaccctcctgctctagactgtagtaacagcatagccctcctgttctaaaccatagtaacagagtgccctcctgctctagattgcagtaacagtgccctcctgctcgttctaggctgtagcaacagcagcaccttcctgttctagactgtagtaacagaatgccttcctgctctagactgtagtaacagagcttcttccttggtcgatggcattttcacagctgagtgtctccttgtgccataattcaggccttattttgtttattggtgtgtgtgtgtgtgtgtgtgtgtgtgtgtgtgtgtgtgtgtgtgtgccagcatataagaacccacagaagccagaaggtggcatgggatgcctggggctggaataggaggtgcttgtaaactccccgacatgcatgctgggaactgagcccccagttctctgcaatgtagcaagtctaactgctaagccttctctccagtcccatgcgggtcattttcaaatgtcaccttctctttaggcattttattctaagtgttacgggtcagcatcccaggccaagagaaacagagttctctgttctggaaaacatggtggaatatttagcttaaagattctctggatgccaaacgaccgtctttaccactgtatgttcatgtttgctggtgactggagagcttagttcacaaattctataatgcttatatgccatcccactgtgccaggatgtaaactactgacctagtttcctcgcctggctgtgttcctccccatcttctgcaacaagggggaagacatgttaagaaagacaattggttcagaaagcaggaaacagaagcaccgtttgatttatgatgtcttgaagttggcaagtagcttacattcctcagatgggataagctaacctatctcctctccttgtagggatattgtgggagaggtcattgtctcacttgctgggttagcgcctgggttgtgaccacacaggcaagattaaaactcaagttctcctgcccttctcttgggtctcaggacctgccttgcgattttgattttcttggataagtagttccctcaattagacctcatagcagaaaaatttgttccttcagttattctgggaagtcatctggtggtttaaaaatatggatttgactttttttttctttttttgatagaattcctttgtcatactattttagtcattaggaacactgggaagtagtggttgtgtgggccaaggattacacagaatgattcactttttatttaaggcttgccattgctgacctcggaaggctaatttagaagtgaatcatttatagaaagttctaccctgttcgaggcagggctttctacaatatcctcatgagggtctaaataaagcacacagtatcatgtttctaaatgtctgccttgttgccaattttatatcttttctaagctgtgaaactgtttctagtgactacaggtattaaggctctgtgtatatagcatgatgcactatttgaatcaatactagagatttaatgtgtatgttatagtgagaaaatactaggcaggagatttgggaatgactgtttataatacagagaaatgaatataaatagtttaaaattaccagaaatgacattaaaagaaagcttttcaattattataattcaaatcgagcaatcatgctttgatggtatttgtacctttttttaaaacacctaacatgcatgacttttagagccatttacaagaaattcattttggaagctgtcttactcgtttagaaagtgaacagtttattccacaaactatttagttttacacaacataaaatgcataatctctgaattatagaagcttctcactgaagactgaatttaacttaacaccatagataaagaattgtggattaggaaaaacaaacaaacaaacaaacaaacacaaaccactgaagcctgaattcttgttgtgactttgaccttagacagacaaactctctgtggtctgagctgatgccctgtctgctgagagcacagggctccatgccttcatgtctgagtcagaaggattagttgtgctcaggctgggaggtgatgggggtttagatggccctgtacagatgttagagctcagagacgaagtggagggcaaagagcttggaattagttagccgtggctacagcccttgacaaaacttcttttttactctgtaagccattattttttaaggtgggagaaaacaggtgaaaaagcgagactgcagatataattcagtggtagtgtattcttaaggatgatttggggaggcaggctgtgctggacatggggcctatgtggaagttggaggacagcattcagcagttaattgtcttccaccttgtgctgaggcagggcctcccttgttcctgcctaggtgctgcatacgtgagctttcggatgattccgtttgccttccagcttctatgtgggaatattgggattatagatatgagcaactgcatttagcttttgtgtggattctagagactgaactcatattgtcaggctttcgtggcaagcacggtaactcctgagccaccacactggcccggaagcatgatcctatcatgcttgggaccacgccctaaaacaaacagataaacaaactcacctgtaggttgcttatcccttatcggaaaggcttagaatttgatgtattttggattccagtttcatcttggattttggaatatttgtacatttaacacaaagtttatttacaaattgtttaatctcacacacatagacagaagataatggtgtataacactttaaaaagtaatttggggcagaaagcaacaattttgtgatatagaatattccacagtatattcaggtacaagatgcttcggatggtggaacattctgaatttgggctttcaaattaatgttgtgcaacctgaaagatacctggatcggttgtaacttcatgttgtgtaagtatctggtacccatgatgcatcattgtctcttgtccttaatactgatcttcttttattctttcggacttccatctcctcagcgtgttgtttttagtgttatagttggagtagatgctggtatccacagtgctttagcaaaagggggagcccatgttgaagcagtgtacacctcaccctagaaccagcatagtcaggaaatagttttgaattataaattatgagttgccttggtcatggtgtctctccatagcaccagaaaactgactaaggcctggggatcatatagcagaagatgctgatatttttggaagatttttttttgatagggtcattagacagtcttcactggcctagaattcactatataaaccaatctttaaaacgtagacaatgtgaacatcccaggttcagcagagaagttgctctctccaaggatcagagttcagatccctatcagggctcagaacaaactgtgactctaactccagggggatcaaataacctctagtgtccttggacaccttcactaagatgcatccccctcccccgagacacatatacatatccataattaaaaataaataaatctgaaaaaaaaaaagagagaacaacctaggtcaaacctagtcattaacaacagaaagacaacctcatggttttcttggtgtaatgatggagtgaaaatcctcacatgagagggtgcactcttggtctattcattttcaatttcccttttttattttctgtagtgacaatgactgacatttctaccattcttatttgaaataaagggtacacaaaaaagcaagattcttgggaaaactgagatataagaaaacagttatgaaaatttttagtatcactactgtaggtagccacaggagataactgtttcagctgcttacacttaaaacaatccatggggactggagagatggctcagcagttaagagcattgactgctctcccagaggtcctgagttcaattcccagcaaccacgtggtggttcacaactatctgtaatgggatctgatgccctcttctggtgtgtttgaagacagctacagtgtactcacatacataaaataaatcttaaaaacaaaacaaaacctgaacctataagagtggctgtgtctctgatacttttgcctgcttttgggactctctcctgttgggttgccttgtctagcctccatgtgagggattgtgtgcagtctttttgtatcttgttgtgtttgattgttgtctgttggaggcctgctttttttctgaaggaaaatgtagggggagtgtttctggggaaggagaggtgggtgagggggtggggtaggtaaagcgacatacacgaggagggaggagtccggggagtggaaacttcggtgggaatgtggtgtatgagagaagaatctatctgcaacaatgaaaaagccacatccacaagcaatgcacttctagggtcgcaaaccataacttctttattcacatattgttggaacactagaatctttggccagcgtagttcctgtttaagaaaaacatcaaacaaaagagagctggaaatgaacttcctggagttttaacaataatttgggtgtgtttcagggactcgttcatctgtctgtgggctagaacatctcctgatgcactagggacaagtatttactctgtgctacccaccaagtatccttgtagaatatatagttactctgtgctaaccacaaagtatccttgtagaatatgtagttactctgtgctaaccacaaagtatccttgtagaatatatagttactctgtgctaaccacaaagtatccttgtagaatatatagttactctgtgctaaccacaaagtatccttgtagaatatgtagttactctgtgctagctacaaagtatccttgtagaatatgtagcagcagcgccaccataggaaatgtagcatcaacttatagcgctggttctgcacttaggccttaggtgtcttggccagatcagcagtaacaagtacatggtaggaatttaaaaacaccaggaaagtagcaattaaagtataaatacacagtaagaatgctggccatgggctggagagatggctcaacggttaagagcactgactactcttccagaggtcctgagttcaactcccagcaaccacatggtggctcataaccatctgtaatgggatctgatgccctcttccggtgtgtctgaagagagcaatggtactcatacataaaataaataaatctttaaaaaatgctgtccacaagttaccatttagtttaaaatattgagtaatatgatttattagtcaggattgtctaaaggtatagaactgatagaatttatatatacatatatattcataacatttaagcagttgtatttgttagtcgttgacacacaatttattcctaaaatatttcatccactctttaaattgttcccccgtctcctgtgctgggaactgaatctattagcaacaaataacaaccctagtgcttcacaaggagcaggagagccaagggaaagcagcccagagggcagtctttctgtgtagagaacctgtactagctggacctgcaggcacatacatgggcgggagggtatttattctagtgaagcaggctgcaaggctcaagtcccagaaatatagtgaggtagcttttgtataaacaaaagttttagctaattggggaagatttgtggaatattggtccttgatgggccttcaatagaaagaaaaataaaaaacaagctgggctttggtggcgcacgcctttaaccccagcactcaggaggcaggggcaggcagatttctgaatttgaggccagcctggtctacagagtgagttccagaacagccagggctacacagagaaaccctgtctcggaaaaaaaaaattcctcccacaaacctgaggcttgatttgtgctaggcaagaggtccaccaccaagctacaccctcagggtcacttaaattgctattttgaatcattatgatgcaaaagaaacaaaatacttgttttttaaaaagataaggagggtggcggtacactcctttgatcccagcactcaggagacagaggcaggtggatctctgtgagttcaaggccagcctggtgtacagagtgagtccagaataggcttgttatacagagaaaccctgtcttgaaaaaaacaaacaaacaaacaaaaaacaaacaaaaaaagatgtacttactggttttgatatggtttcgggaatagaacttatatttcagagagggtcatttagttcaaaccactttgaagtcaatgggagttgaactcaggtccttggctttgacaagtaacgactttgtgactgtaagcaaactaatttattttgctaagtctccatttcctgtttgtaatatgaggataacagtgtcctttctatagtaattttgagtgttaaatgagagtgtggatgtaaatctcttagcatagggtctggtcttcagaaacgttgaagacatgttgcctaatgctagcaaatgaaaacgttgtctcaaatcttacccacgcaccaactactaatatactttatgacagggacttttacattgtaaattgaggcctatttcattcaatacatatttattgaataagttcatcagtggtcagggtgttttgttgaagactaatctaaaggctcttttctctctttgcagatcttattttgtaccttaaatacgcctaaaattgacatgggaaagctcctgggtgggcagctgggccttgaggatttcatatttgcccacgtgaaaggcacaaaaaaggaagtgaatgtttataaatcagaggattcgcttggactcaccatcacggataacggcgtgggctatgcttttatcaaggtaagcttttgaaaaaaaaaaaaaagacaatttttcatatcaaagagagttacaaattctcttcggggagagctagccagctcagatggggttcacaaattggtatttcacttttattttaaaagatgtttgaagacaacacttttgaaaaactttttgaaattcttctcttttcttttcttttcttttcttttcttctctttctctctctctctcttttctttttcttttttttctttttttttttggggggggattttcgagacagggtttctatgtatagccctgcctgtcctggaactcactatgtagaccaggctagcctctaactcagaaatctgcctgcctctgcctcccaagtgctagaattaaaggcatgtgccatcactgcccagctgtacaggttttttgtttttgtttttgtttttaaagaagatactctttagagttatctcaataatctaattcttttgtttttatacaaaaaagagtaatatagagttgtaaggaaaagtttaaaatagtatgaaagtgagaatagccaagtaaaaattctgctgtaatgagtacagccaagccatcctctgtgtgtgtgtgtgtgtgtgtgtgtgtgtgcgctgtaatgagtatagccatccccatcccctgtgcatgtgtatgtgtgtgtgtgtgtccaaacaggttggattaagaacccctgagcatgctaaaatctgtgcctgtccaagtgtataatacaaatagcttagcatttgcacataacttgtgtacatcctgctggatagcttaaagcatctctagacctcttatgacatctatataaatagttactgtatcacgttgcttagagaccaaggaatgtctgtatatgtccaggacaaacacaattgttgcatgctctcttgaggcagttccttgttatgtattcaggctgtccatggactcctgagttcaaatggttatcttgcctcagggttggctgctgtattctccagggttctttatagtcacagaactcttgggatgtctctctatattaagggaacttgttgtgatgacttacagtctgcagtcctgtcccgagctattgttctcgccagcaagaacacactcggacgaccggattcttctgcagcaaaagctttattgcttcttcaggagggaagacccagaacctggaaaatggtgttgcttatatagccctcagcgtgacgtgtcagcacctgatttgttgcttgcccatcacctcattactacaccccgcgatgggcagtgacttggcgtgaattcactctcgcacctgctcacaatgcttgtttactagttaggcacagcgggagccagcgctgtcttgtaatggcgattacttacggctctccacacagtccaactaacccaacaatgggcagctgtgaatggaagtccaagaatctagtagttgctcagtcccacgaggctagttgtttcagccggtcttctgtagaagtagattccaacagatgtgctggcaagtaagtgcaagcaggtgaagagtgagccttccttcttccaatgtccttaagtaggcctctagcagaaggtgtggcccagattaaaggtatgtaccaccacacctagatctggaatgtgctttgttccaggctggccttgaactcagagatctgcttgcctcaatctcttgggattaaaggcttgtaccttgttgcctgggcctaagcttttcatggacactgtgcctcaagatctggatcaaaagtgtgtgtcatcccatgtcaagatccaggtcagaagcctgtgtcttccaatctaaagatttggatcacaggtgtgccttgaatttctggattatagttcactcaggcgtagtcaggctggtgaccaggagtagccattatagctgccttaatagcatctggcttacatagaatgctcaccaaacaccagccactctgcatgcacttttgtttaaccttcacagtaatcctagtttgatttattttaatttaattttatgtgtgtggtagcacccatggcagggtatggcttgtgcgtgtgtgtgtgtgtgtgtgtgtgtgtgtgtgtgtgtgtgtataggtcagaggttgatgttgaatggcttctttagtcatgtattttatgttttgaggcaaggtctttcactgaatctcgagctcacagattgttaggatggctgtcaagtgaactcttgggattgcctgatgttgcctctccattgctggaactggagatgcatgcctggctccttatgtggctgctagaaatccaagcttgagtgtatagcacagactttgccagctgaactatctcccattctcacagcaaccttattttactgccacgatgcctttttaaaatttccaatgttgcacgtttaaaaaaagttcagtttaatgaacgttcatgtagcagtgccagtacagtgatgtaagagccatagggtcacacatgtctgctcccccaaaggctccctgtgcacccttccagcgacatctgccctgaaaggtggtacccactgccccttgctgccaccgaccggcaagcagggtttcagacagatgggcaaagagttggccagaaaagggtgacagacacagacacaagggagtgtgctgtataagaatgtaatttttcacaaagtgaacaccagtcttatataatacagaaaacaaaggggtagggtgtcacagcaggcaaagtacattgaagtatctgacacaaaacagaggaatgacttcaaaggactgacaggaaccaggtaatgtttacagtaatgataaaacagccctgcctagagtcagctaatgacaggtaaggatttcacaccctagtcacaatttgtgctactcctttgagccttgtgaaagctaagcaccagggggttctgctctagcagaccttctcatgaataatgcaataccaccaccatcccctttttcctaggccttggtaaattcttgcatatgagagtaacttggctgttcttataagtatctgtagggaatctccatttgtcagaagaattcaccaactttcttctaatatgcaatgtagtctgctatacctggctgtaatgaagattctaggtatactttgctaagcttgccctgagatttctaactcttatccagtaaaatactgtaagaaagcaattgcatgcaagactctccacaatattgcagggacaaatctggggcatcctagctatgggaatgccaaggttccaggaggttaagtttccttgaaactctgcctcgtgactgcttccaggcttttaaacctgtcacaagagtcactactggagtggatgtagcaacttgcttcttgagatttataaaatcaagcattacatatctgcagtctctgcttttctcggtgtgactttgcaatgtgtccatggtggacagtattaccaaagtacaaagacaggatgaggacggttaaatagcttggtcgaaattataaggctgggcaggttcgggatttgaacccaaggagtctgactctagagctggcatttctatgcgctgagctaagattcagtataggctttgcgcagcgcagcaagtttatcacggatttctttgctggtgcaccatcattgttaaagaagcaaccgtagggaagttctcttagctgtagacgcctctctaactgcctgctcgatcggaaggttatttttagctctgcagaagatagcaatgcactggaggtggagtgggtgaccaaatggaaaacccttgagctgggaaagtcatgtgggagagtccaggggaagttcaggacaccaggtacaggcagcagagcctgcctacttctgcagaggagggctcggaagcttccctagtgctttagatgtcagatgttgttctgacattccaagcttctgtttctattttcttttttcttgtcaaacacgtgcctgtttcaaagtacgagtcactggtcctttgcggacagaggtcatgataagaaaggacaaagccaacacacagtctactttaaaatgcagatagtaaaaattatgtaaattggataatttcaaaattgaaaatattacaataattataaaataacttttatatataatttaccaaatgtccagtttttatcatttgttaatttgctgtgtttttcatacacatttatatttatatctgtttttctgtctagacttatcctttttacccctaaccacttcagagtgtaatcactaagaacaaaatattcttcatgttacatatacccatagtacaattatgaagttgaaaagaatcaaacattggtttgacttgacaaactcattctcagagctggcgatgtagttcagcgggtactacttgcacgcacaaacctttgggttctatccccagcacagcataagtggccatagtggccacacccatgatccccacactcagatggtaaaggcagagcgaccagaagttccaggtcattgttggctctgtggagggtttgaaaccaaccttctttgagccctagtctcaccacaagacaaaacaaagaaggaaaaacttatctctgtccactttggttttcttggttattttccccacctcccctcccttctgtaagcccagtgcggcagcctgctttctgatggttgttccacatctctggaataatcccttagcttttttttttttcttttgggagggggtggtttttctccttagtctattgattttgaggccagcctggtctacagagtgagttccaggatagccagggctacacagagaaaccctgtcttgaaaaacaaaaacaaaaacaacaacaacaacagcaacaacaacaacaacaacaacaaaaatgtgtgtgtgggtacttgtagtgcacgaacctctgtgcatgcctggtgcctgcagaggctagaaggggtgtcagatcacctgatctggaataaagatggctgtaagtgccatgtgggaattgcacctgggtcctctgcaagagcagccaatgcttttaacgtcggagccatctcttcagtccctaatctgttactttctgatgtgtcctttttttaaaaaaattaggtattttcttcatttatatttccaatgctatcccaaaagtcccctctatcctaccccccattcccctcccccccctcccacttcttggccctggcgttcccctgtactggggcatataaagtttgcaagaccaatgggcctctttccaatgatgactgactaggccatcttctgatacatatgcagctagagacacgagctctggggggtactggttagttcatattgttgtttctgatgtgttcttatattgaaagacaggatatactctctggagcagggaaattatccaagtgctgaaaattactcaggggaccactttggaagggccaagacgagaggaaaaagttctttagattctttagtgaatatagaatagtataattctatatatactagtaaataatgcatgtctttcatttttcttgattctttggaccagataataccctgagcagtattattaaactctgttcagatactgtgtgattgttaaaacacattgtatttcagaagtttatattcattaacatctcatttaaataaaaaagggttcccaagtgtataggtgtatgtggaggccataggtcaatgtcaggtggtgtccctcaggagctatctactgtcttttcagagacaggatctctcactgggatctgggcaagttccaggagtcctcttgcttcagcctctccaagctgggattagacacacacacacaccactcctggactttatatacccatgcttgcagacatagccaacacttgcgctgaccgagatattgctcattcttacttgttctttcctttcctttcctttcctttcctttcctttcctttcctttcctttcctttcctttcctttcctttcctttcctttccttcccttcccttcccttcccttcccttcccttcccttcccttcccttcccttctcttctcttttcttctttctttccttccttccttccttccttccttccttccttccttccttccttccttctctctttctttcgtcagctttatacaagctagagttatctgggaagaggaacctatgctgagaaagtgcctccatcagatgcctatagaccagtggcctttagtccagttactcctgttgtggtgactcccaaacctaaaattattttattgctgcttcgaaactgtagtgttgctattgttatgaatcataatgtaaatatctgtgctttccaatggtcttaggtgacccctgtgaaagggccattcagctccaaaggtctgggattcataggttgagagctactgccataggcaggcctttggggcatattcttgattaatgattgatgaaggagtgctagctcgctgagtgcactgccattcctgagcagagggccttaggttttctaagggagcaggctgagaaagccgggaggagcaatccaggaagcagcatccgtccatggtctctgtgtcacttcctgactcctggttcttgccttaagttcctaccttggcttccctcaaagggacctaggaaatctaagccaaataaaccctttctttctaattgctgttctttgttttctgttttggtgtctgtgtgtgtgtgtgtgtgtgtgtgtgtgtgtgtgtgtgtgtgtgagagagagagagagagagagagagagagtttctttatataatcctgtctgtcctgaactaattatgcagactaggttgcctcaaactcacagagatcttcctgcctctgcctccaaaacattgagattaaagacatgccccgccattcccagccctggtgatggtgtttcatcataactacagaaccctaatggacacacccacttcctcagtttttattccgttggctcaggagtccggggctcaggtcagacgtaaattagccagtgttatgctctcacacacagagcatccttgggtgctcttctcctggttttacctttctggtttcctgtttctgctccacgtctgtggcccacaggtgctctgactctctctcctgctgctgtccgacttctggtgcctgcctttctccttctggcctgggcgctctctggtgacctttctatcatctcacagcttgggtgatagcgtctcattgttaatctgacctttaattcacaggtaagagtcatgcatcacttctaagtcttttacatgattaagcttatgtattgccttattttaaataaatttataacacatattaaaaaacaccaaaagatatatatgagaacactgcaatttgtttttgtaattaatcaagagaaaaaaataggcttcaggtgaattaagacatcaattaagattaaaaaaattcaaaattaaatgcagattctcaaatcccttattgggttaaaaatggttatctaacagtgtattttataagttttttttctcctttagatgtcaatcttttgtttaactttgttattttctgccacagtttagaaactagatttttaagtggtatgctattgattctcttcagaattctcggtgccatctaatggattttagacctcatagtgaaactgcattacaggcacactgtagagaattaagctttaataaactttaataaactggcacaggctccccttatttaggagccagatgcaggggtattgtaagttgcaggctagcctgggctacttagagagactgtgtctctaaaaacctaaatccaacaaaacaggctgttaagatgacacagtgggtaaagatgcttgctgcaaagcctgacaatctgagttaggtcctcaggacacacacggagaaaggggagcactggctgctgagcgctgtcctctgacttccacaggcatgccagggcactcccatacatgtgtgcgcacatgcagacacacgggcacacagacacacagacagacacaggcacagacagacagacagacagacacagaaacacaggcacacacagacacacagacacacagacagacagacacaggcacagacagacacaggcacagacagacagacagacagacagacacagaaacacaggcacacacagacacacagacacacagacagacagacacaggcacagacagatacagacacacaaacacagacacacaggcacacagacatacaggcatacatacagacagacagacagacacagaaacaggcacacacagatacacagacacacagacagacagacacaggcacagacagacagacagacagacacagaaacacaggcacacacagacacacagacagacagacacaggcacagacagatacagacacacaagcacatacagacacacaggcacacagacatacaggcatacatacagacagacacaggcacagacagacagaccgaccagagacacaggcacacaggcacagacagacagacacaggcacagatagacagacagacacggagacacaggcacacgggcacagacagacagacacaggcacacaggcacacaagcacagacagagacacatacaaataaacaaatgtagtaaccatgtaaaacacaaaagaacaccctcatcaaatagcttgtggtccattctccgtgggcctgtgcccctcccatttaaaatgcatcaacggaaatcaatagggtgaaccttccctcactgatggatgcaaagctctgtctcacggactcctgaaatgttagccatgcttgccacgcagtggaggttggtctccttggctgtaatcacagcgttccttaagcctttgcatttgtaacaacaggtttaagcacaaagctattagatgtgtcttgttcaaattgtttgacaaggaagacccacgtatcatggagcagaagagatatctcagttgctgcccctccgggggacatgtttggtttccagcactgcagccctctctaacttcatctgcaggggatctgatgccctctgtagattctcacaggggttttagaaggatgtgatgtggcaggtgtgacaggtacgcagagggaagaacagtgtctcacccttcttaggtgactgggttggaggatgctggggaaagatgtctagaggaaatggtagctgtgagctagctgaattctgaatggaaggaagatgaagaataggtggagatagggcgtttgttctttctcgcttcaccttctgtccctaagtgagcattaaactacattgtaaatatgtcagcaggaacacaagaggtaaagccacacagttccacatgatatcaccattgattttctctctttcagagaattaaagatggcagcaccattgactcagttaaaacgatctgtgtgggggatcatatcgaatgtataaacggagaaaatattgttgggtggcgtcactttgaagtcgctaagaagttaaaggaattgaaaaaggaggagctctttactttgcagttaatagaacccaagaaggcttttggtaagttgagcccgtgtgtggtgtgtgtgtgtgtgtgtgtgtgtgtgtgtgtgtgtgtgtgtgtgtgtgtgtgagagagagagagacagacagagagagagagagagagagagagagagagatatggatggacagacagacaaagagaaaccattttcttccccttgtttatctaagaggcaggatactgctctgtggggctgtgtgcttttagcataccatcttgtctactgtactgtactagggaagaacacagaatattacagacagcactacttagaaggaaagtaactctgaagggaaaggaaagttttccattgaagaacctttttctaaaccaagttctgcagagtcagatgtccagggatggagctggaggtggggttgtgccaacggatgctgtattgtctcactgtgctgagcagagagatttctgatggggctcttcaaaccacaattgtttcccagggacccaagcaacagaggttggcttcttatggacgtggtacttagcacagtcatccgctctgtttcacagactcagaacactttcttcttgacatttagagtttgccacgtcatgaagtgactccctctttcatgtcacatctggttttagccacagcagctgtgtctcaactcttggtgaaacctccagggccatcccatggtgtgagaatgtgccagcttctcttgcttcagcgcactattttaatgtgtgaagtcctcatgcacagcagtgctaaaacatcctcagcaggatcatctggacctgtcctgactcatccctgacctcgcccccacacaccctgtgttcttgctgatgccttcataacacaaatatttcttctaacttgtctctaacgttgtttcctcggggcaatggatgcaattacatattgcccctcccccttccagcgagcgacaggtcacctccgaatccatggaattaggaagtactctgtgttaccaaatgactctttgtcaattgatataaatgtagtgggaattgtgttgtgtataggagacgattccactgaaaggttgagaggaggatgcttgcggcctcgttgcttctcagggaccatggtagagctctaagtggtgctgccatactcctgcctgtgcatcagcacctatgcctttctcctctcaggatggcaaggtctctctgcagcagtccctttccacccagctcttccaatgtttgctctttacactgatgggagtcgggggcttcgcatacattgtcttacacaatgaagactctttgtaaagcaaagctagtctccctataacttaagaaacagaactccttcttatgtttatctccaacactgttttcgttagggttttattgttgtgaagagacgtgatagccaccataactcttatagagggaaacatttaattggggctggcttacagtttcagagattcagtccattatcatcatggcgggaagcatggcagcatgcaggaggtgctccgtcttgatctgcaggcaacagaaggagattgtcccactgggcatggcttgagcatatatgagacctcagagcctgacctgtgcagtgacacacttccttcaacaaagccacacctactccaacaaggccacacctagtccaacaaggtcacacctcctaatagtgccattttccatgggcctttaggggccagttacattcaaatgaccacaaacacagtctgtcttccagagttaatctttttatatttttttctattgtgtgcactttagttattgtagatgtttttgcttttgtgttgctttcaaattcactatatattggaggatggtcttgaactcctgatctggaattacaggcatctgccactacgttcaactattgtatacattgaaacccctggagtccctgtatctatatgggacattgttaatttgggtgccggattactgatagtttcgagtcgtacacgggttgttgtgcttagtcatactgttctatggttaaaccctgtttttctccttcagaatcagaaacatgtaataaatatacttatgtgctcagtctctctagaacttctctagagcctcatggagtccattgacacactgaggagaagccctgagtagggtttttctaacaggaagatattgagttagagtccacactatgttggtgtggggtcgggatatgtgcaagttgattttggagtggtggctggcttttactccgtgaactgatggcctgcaggtattttcccctcagtgggctgatcctttactggggccgctcagaaggaagccccttcactcagccaccttctgacgctgggttcttgctgctctgctttttgtctctggaataaagtaaagttttttgttctttctctggcttttccccaatgtgtagtctttgtcagggaggcaggtctcctggttctcttggtcccaatcttatcatctgtgtgtttccttcttttcttcatgcattttctagaaccatcattgacttagaatcaggagcaaattttgttcctttcctttcctttcctttcctttcctttcctttcctttcctttcctttcctttcctttcctttcctttcctttcctctcctnnnnnnnnnnnnnnnnnnnnnnnnnnnnnnnnnnnnnnnnnnnnnnnnnnnnnnnnnnnnnnnnnnnnnnnnnnnnnnnnnnnnnnnnnnnnnnnnnnnnnnnnnnnnncctctcctctcctctccctctcctctcctctttctctctctccctccctctctccctctctctctttctctctctcttctttctttcttccttccttccttccttccttctttctttctttctttctttctttctttctttctctcatgtcttagtcaaagtatggttgctatgaagagacaccatgattatgacacttcttataaaagaaagtgtttaattagagctggcttatagtttcagagttttattctattatcatcagggcagggagcatggcagcactcagcactaagagttctacatctggatctgcaggcaacaaaaacacctgtcctggcctgggctcacctccaaacccacctccagtgacacatttcctccaacaaggccacaccacccaatccttctcaagtagagccactgccttaacattcaaacatatgaatctataggggccattcttattgaaaccaccataaggatgaaggaaaaaaacattccattgcctgatcttggaccatatatgaattcttgaattctctgtctagaatatactaatattctagcttttatctgctcttggtagatgtcaagaacatattggtacatttctttcaacaggtcccttctgagccattggtgtgtgctggttttagagtgctaggtaatgatattggccacttattgatagctcactgtatactatctctggactgtatgcttggcatatgctaagatccacatgtacnnnnnnnnnnnnnnnnnnnnnnnnnnnnnnnnnnnnnnnnnnnnnnnnnnnnnnnnnnnnnnnnnnnnnnnnnnnnnnnnnnnnnnnnnnnnnnnnnnnnnnnnnnnnnnnnnnnnnnnnnnnnnnnnnnnnnnnnnnnnnnnnnnnnnnnnnnnnnnnnnnnnnnnnnnnnngagggatggaggtgttggggattgagtctgggaccttgcacatattggcaaatgttcctccttttggttatatctccagcccaggaaaaatcctgaaagaagggttttgagctacacctgagaggtggccaggtgcttgctctgtacacttcctggagaaagttgacccagggaacaggagcagaatgggctcagtatgggccattgtgtatttgagagtgctgcacacaccagtgtgtcagaaatgaaaaccaagtgtcaggaaagtccacattatcaaaaccctgatctctgaagacagggagtggtccatggagaacccaggatggtgtataagaggccgtagcatggtgggccctggatttcagaatgataactgagactgtatcaatgaacatataggatttgatgttgaagtcaggaaatcagagagatcatattgcattagctgtggagaagacagaatcctgaactaaggctggtcccacaggtgtggagacgagaaatggcttggaggaacagctaacgctatggaagaaccatttatagataccattcctgccatgggacagacttgactgcttataaatcataagagtgggttatttatacctttaagtaggcaaatgccacaagacatggttttggggacaatcccaggacatactaaacaccctacaatcaagctacctccccagcccaagacagaacttttatttagagagttgactgtcgaatatttattgcatattcctaaatgtcatgaaggttggattgtaaactctgttgactgcagagataaaggaataagacttgcaaataatcaatagatttatgggttggttgagggattctttgagatgaggtgagatggggaagatttagaaaggagacagggaagagagataagaagtatattttgggatctcatgtgtttgaaatctataaagacagtccagttgtgcaaggctgtgggcattgaggactgaagcctagaagaagggttttatgaatgactggactctaatactctggggaaaaaaatctactcattcagcgtgaagacagaggacagtaaacggagcttcatgggaaatgccagcatccacgcagcagaaggaaaaggagctagcatagtgaggacggccaaagggaggctgtaggtgactgtaggccactcttcctaagagcagatcccctgggctttggagctcagggaggagtaaaggccactataaaacatatccttgggaatcttctgtgctggtcagcagtcccgtcactagtaggaccagccacctactcagagcagggctgaaaacacactctatcttagggtttccattgtgtgcagaatcaccatgaccatggcaacccttataaagggaagcatttaattggggctgatttattggttcagagtttagtccattggtgggaagcatggcagtgtgcaagctgacatggtgccaggaggagctgagagttctctgtctggatccagagcaacaggacgagagtggcactgtgtttagcttgggctcttgaaatctcaaagcccaacctcctagagacacacttcctccaacaatgccacacccaccctgactgggcactcctaatgactcccgctaccactccctgatgactaagcattcaaatctatgagctgatgactaagcagtcacatctatgaacctctgggggccgttcccacccaaaccaccagaatgatcttgaaccttctgagccttctgcctctacctcccaagagctagagtcacaactgtgtactaatatgctgtttctgcagtgctagggattcgaaccagagtctcatgtgtgctccatagcactctactaacagctccattcccagccccagggaaaactttatttgttacaaacacgggtctgtttcagttatgtatgtttgtttgtgtgtattaatagtgcatattatacattagcgtgtatccgtttctcacggagagtcacagcaaaaccatagtactgaaagctgctcggaggaggacttctttctgttggaagggtgaggtgacgccttccccatacctgacgtgatttcccctggttagttgctatctgatccgcttttctttcctgagctggagtcttctatgcccttgtcatggcagcctgccagcccttatcacgtgctggctgcaacgtctccaaagatattttttagggcctggctcatttcctttctccttgtgccagtgtaaagggacatagctttcacaatgagctcaacccctgctcactgaaaacccagactgtcctcagctgtgtaaccctgttgaaaccctgttgaaatgactcttgaaaccagaccagtctgaccagtttcttttcccaggagacctttgaactgtagtgggcataactactggggctaagggtctttgtgttttgcttaaatgagtcttatcctggagatatgtgactattaccctttgagatcggaggctcccagaaggagatctgtgttttccaagtcagaaggggagttgggaggaaatggtttcctcttaagacatctgggggttagattttggggggtatttaggctttgtagcaggtctgcttttagaggcttcctttctgcgacatgtacccatcagaatgggatgttaagtatgtggaacagtgtggttacacactgttggagtgacacagcgggagatgacgcagcagccctgcattagctcactcagctttccaaacgctgccctgaaaacctgaggagaaaaatgctccttccatcacacaacttcctaaacttcaaacattaaaaaaaaaaaaaaaacaacccctgcattcccttcctcttctcccttcttagggtctcactatgtagccctggctggcctgctgctcactacgtagaccaggctggccccagttttgcagagccaattccctggcttctgctttctaagtgctcgtattacagagacgctacacagatcttcagaagatgatgtcgactattcatgctacatttagtgtaaaaaattcaactacaaatactttggcttgtttgttgtgttctctggactctataaactaccctggacaaatatgaaataactgacaggagatgagatgaatacttaggtctgtcactctgccaggtgctgagtgtgtgagaacgagtgagtgaatttcttaacctttctgtgccttggcttccctacaccaaaagtaaagatgccgattagacttgaccacattagtctgttgtgaagactacactggaaaagtggtacggtagtccttaatacatcaaatcttcaataatagttagctgttatcacaggttaagcgtcccttatctcaaaatctaaaatcagaaatgtttcctaactgccagttcttgagcaccaggcctgactaggaatggaaaatcccatacctgtcccaatgggttgggccacagtaagaacacaggtgcatcaaaaataatgttcatggtggccttcaggttgtgagttagaggtatatgaaatgccaataaagtttgagtgtcccaggataccctatcatacacatgtagctggccccagatctgaaaacctgatagctgaaacacttctgaccccaagatttcagacaaggacccttcagcctgtgcagtcactgcaagggtgtagcttttctgcaaggagtaattttagcaacagaggaacttacaggacacagggacagcagagcgggtgagaacagacgcttgttaaaaactgctgctgcctcacctcaggtcctagcaatatatcatgatggcagcaaccattcacttttgtaagggatctctctgtctctgtctctgtctctgtctctgtctctgtctctgtctctgtctctgtctctctctgtgtgtaatacatgtgtgaggggaacgttcatatgagtgtggtttacttatggagaccagaggaggacagtgagtatctcttatacactctgccttgtttcttagcccagggtctctcactgaacccaaagctcacagtttcagctaggctcgctcgtcatggagctcctgtcctctgcctgtctctgtcccccaaccctgtgtagccatgcttggcttccttatgtaggtgctggggatttgaactaagctcttcatacttaaatagaagtgctgttatcccctgagccatctctcccatctacttttataagcaaaaaaaaaaccatccaatccccacagtcattctaaacttaaagctgttttcccagggtctctgcgagaaggtcacagtgaccagagcctgcttcctgactactgccatgctgagtcactgtgtactgtccccaggcgtttacatttggataaagaggcaaatacactaagaagctactaatcttactaacagtagtaacgcttactggatgtgtgattgaaatacgatgaagggaagacaaaaactctgagccaagacactggtgtttgcatcttttccttgattctttttttcttttttaaaaagtggttattctattttcagttcaaatgttgttccccttcccagtcccccccccacaagccccctatgtcctccccctgcctctatgaggtgctccccaactcgcctacccactcctgcctcaatgctctagcgttcccctctcctgggtcatcaagcctccacaggaccaaggggttcccctcaaagtgatgccagatagggcagttctctgctacatatccagctggagccatgggtaccccctgtgtactctttggttggtttactccttgggagctttggggggtctggttggttgatattgttgctctttctatggggctgaaaaccccttcagctccttacagttcttgccctaacttccctcttggggtcctcacgctcagcccgatgtttggcggtgtacatccgcagctctggcagagcttctcaggggcagctataccaggcttctgtcagcaagctcttcttggcaatagtgtttgggtttagtgtccgcagatgggatggatccttaggtggggcagtccctggatggcctttccttcagtctctgctccactctttgtcctgcacttccttttgccaggaggaattctggattaatatttttgaggtgggtgagtggccccatttctcaaccgggggccatgcctatccactgatatggtctctacaggttctctctctgctttgttggatattttggctaatgtcctccctgttgggtcctggggacctcttgggtcccaggcctctgggactttctagtggctaccctcagttcccccttccccactgcttcacacctactttcaaattcccaaccctctatacttctccccattcttcccatatctgaactggccagcttttttccttccccgtcttctcctgtgtgttcttttgtactgggttatctcactcaggattatattttctagtttcatccatttgcctgagaatttcatgaagtcattgtttttaatagctgagcaatattcattgtgtaaatgtaccacattttctgtattcatttttcctctcagggacatctgggttgtttccagcttctagcttcttattagctcagtgatcactgggttacatagcccagattcccctctttctaatctataacatctgaatttagcacgactgatgcatgtgaagtatgtggaaccgtacttgagtcacagagtcgggagccgatgctgtcatgacccagttaatcctcacacgattccaagacggctttcccagtgaggaaactgagtcttggggtggattcattactcaccgagtcacagagggtggagaggaagtgtagggagagagaagcctggccaggtccgaggtgttaacagtgtgtggtgttcctgctttacaatgtcccgcaggctcagaggctgccgcgctgtgatgtagactgcacagttcattcaggagctgggcataataataaataaatgtaataatatgtaagtatattataatataatgtttatataataatatatacgtataatttataaatgtatgaattaatatataataacacataaatactaaataaataaaaatataataaatgtgattgtgtgattgcgtgggagtaagtgggaaggctgggtggaaactttcccaagaggatgccatgagacagatggctatgcctggcttgtgtcaaggttaaggaccagagaaaagtactgggcctcctgaccagatgataacaggtgtcagaactgtgagagcgagtggtggttttccaagagactttcttcactctggcttggcttgaaagtggacacaatgactagacagggtgggaccatgatcactgagaacaaccttaggcctttggatcctgggatgcaaacaaagtccacccagacaaaactaagacagatgagttttctcgcgaaacccacagctggggattggtgcacaagtgtacttgtttggtattagtaggggatcaagaatcctctttgacaattatttcttttcttttaaattttaattaattaattaatttatatgcgtacactgtagctctcttcagacacaccagaagagggcatcagatcccattacagatggttgtgagccaccatgtcgttgctgggacttgaactcaggacctctggaagaaatcagtgctcttaactgctgagccatccagccccttatttctgtttctttttacacctttaaaacagatttatgtgtatagtattttgtctgcatttgtgtttctgcctggtgcctgaggaggccaaaaaagagttttgtatctccaagaactagaattacagctgaagagcggccagacccaagtccttgagagagcagccagggattttaaccactgagccatctctccaggccctgctttggcatttcttatgcatgggattgtgggctgatgtttggaacacgccgtggaaatctaatgggcattgtgagaggggacgcgggagcaggtgggactgggtgagaaagaagctccgtgaaaatcacacctgaacttgtcctgggagcgtggcaggaacgtatttgaaggcaggagggtttgggaggtccgtggcagtgaagagcaccagctgcaggaactgcagcaggatagtcagcaaaagctacttagagtcagggaagcttggaagccaggcggggggaacacgggctttctttggaggctgagagtgagccgttccatgctggttttaaaagtgacacacggtgaagtcacaacattaagtcagaaagactagtgctgctgtatctgactagagaagatgctcgctcgggatggtgtttctctggccgagtaacagagaggaaatgctacgtgctgagggccgtgagcagcagtgggcattcttgagcagcagtgggcattctaaggaaggaaagaggaacaattcatcagaaaaggatttctcattctcctaagttgtcacctctgaggtgtcctgcctcagtctgctaacccagtcctgggaggttccagcctccgtacactccactccagcctaggatgtttccggcctctgagactcgctgctggataaggtcaccccttcctagttctttctgaactctggctggctggttcaactcagctgttgtggctcaaactcctctcccagttgacttattcaatctggttttcctcttgacccctgagttgctctgcatggcctcaactctagcaatcttttctactctggctccttctcattcccgttttcgttctgtcttcacctgtgtctagcttgttctcttttcgacctgtctctttaaaactccacccccccacccccgcgcaccccccccccttgctccactctccctctcaactctcctgtcctgctctctgagaactctgccatatcctgtgccgcactctcctctctctcctgtactgactgtctcttctctttcctctctcttcttgagagagttaggcacagcctaccctgtcaagtctttctctgatttgtcactttgctattcaattagacatcatttccaaacacaggtgcttccttctacaaactaactttccttcaatgtttgggattaagggtgtgtgtctgcattccagcccgagggattaaaggtatgtgctaagggccaagtcacaccctaactagaaaccgcttcaaatatctccttaacactcttaggggtaggcgcaggtaggagctggcttgctggatacctaggcctatgggagggaagcccataactcacccttactcttgaggtttctgtcctggaaggctgaatgaaagaatggtgttaacattagaaatgggggctggagagatggctcaaccgttaagggcactgactgttcgtccagaggtcctgagttcaattcccagcaaccacatggtggctcacaaccatctgtaatgggatctgatgccctcttctagtgtgtctgaagacatctacagtggactcatacattaaataaataaataaataaagcttaaaaaaataaatgggcatttggggtgtggaaggggctttggggaaaattcggggttttagatcgataatgcattttatctgtcattgacgaacattgttttggtcaaggttttaaagtgcttacaaggacaaaatggggttgtcattaatgtttaatgcagtataactcattctgtcacaatgattctgtggaagaagatgaatgaagggccaggttgtctttaatggggcgtagtaaatgtttgagatgaattctaagcaaaactggtctaaatattttcaatggaagactcagctggttaccaacatagggactctttctaagcaagctgtaaacccttattgaaaacaaaaatttgccaggtatggtgttgcaagcacttgaaccacagtactcaggcggtagaggcaggcagatctctgactttgatattagactggtctttgtagtgagtacaatccccatcgagagagagagagagagagagagagagatagaagtgcggttggggtgtagagtgtttgcctagaatgtccggagtcttaggttcggtccccagtaccacataaaccaggactttaagaatcttcagcctgtaatctcatcgtgtgcgagctgaatgtaggaggatcaggaattcaagatcacctttgactacaaattaagttcaaggccagtctgggctacatgagaccatgtctctaaataaataaataaataaataaataaataaataaaacaaaccaataaccaaaaagttgtcaactagttaaaaaaagaaaaagctacaagcaccgtatgtgcataacactcatgaatgcatcagacataattgctaactcccagtttagagccttggcccaagggaacgcccttcatgcccagccctttgatctgctgccaagtatcctgagcagctcagggctcacagcagtcggagggaagttttagatgaatcatcccaggcaggccagagagagaaagcgcagagtcacccggctgggcgggactgtgcaactgccctctccttgcttctgaagtctttgactttgcagaactcatgggctggaccggtttctcctctgctctgttctgtcctctctgccgttggctgtggtcatctcgcgtctttacccctggtggctgggtgtctgctcagacaccacttttaaaggaagattctgaccccccccttctctctctctctctctctctctctctctctctcacacacacacacacacacacacacacatactcaatgcacgtttgtgtatgtgcataattaaaaataatcgcaagattgtagagttaacacagcagttctataaaatgacacccgttggtttcaatgctgtgtaaaaccactctcttcctgtgggataaaccggtggtagggtctgctcctagtgaacctggcttgtatttgtcagtccctgagatctgtctgttctgggaacccagggacggcaagcatccctggatttgcagcttggagtctgttgcaacgttctgccaagctctgtcgtcccactcaagatggaggcaggttaggggagggctgtgtttccctttctgggatggagggggcagaggccagagttctgggattacatccatcaccctggctctccacagcactgttcttcccctgcaaggcctcctgctaatgggacagcctctagaggatctcctgtgtggagcatctgtgaaggctttgctgcatctctctgttttggggactctgagtggaaccctattaggcttatctactgctactcccaattgaagggagccattatatggctttatttgagaggggtgaaaatatatgcgaatgaagacaaagagacagagacagagggagagaggcctgtgcttctgatgtttggannnnnnnnnnnnnnnnnnnnttgggcagccacagcagtctgctagtaggtgtaggctgcccggcccagagtcctccatgcattcgctctgtgggagcctgctcagccctgtagacaacattctgcttacagataaggattttactcctcaagctgtagctgcaagctccgaggatgctggcttagttgagagtctacagtccatgcttttaatcactgcctgtgggccatggtgcacattgaccaaagggcgattgctgtacagggtaaaccattagccacggccattagaacatgactgtaagctatgacgttgtgtgaaaaccaagtgtaccatgggggccgtcagatctcagtggaaagtccccatagatgtcccaaaaggtcagggcagttgggcttggtggctcatgtctgtaatcacagtactcaagaggccaaggcaggaagatcattggagtttgaagcaggcctgtgctatataatgaattccagcagctcaccctgagctggtaagtaagaagaaaagagaaagaaaaggaaaaagaaaaaaatatggttaaagggccagatcatatttttgaggagttagaaaaaatgaaatgagcccatacattcagctgaaatttaatgagaaacatattttaaaaattacatcagttttgaaccgtaagagattaatttctttttttctatgttactaaaatactgatttttttttctctttcactttctttataaatggcttccagccatctaggatgtaacccttctctatggtctcttgtgtgctcgtaagattttgttttgcctttcctcctgacttctgaaacttaaacagaagttctaggtggatcccagggtctcaggtgtgccaggcacaggctctgagctatgcctcactccctggactctcttgaccgctcaggtagcgttcagtccctttgtgcctactgtttgctgagatcctgttctttgcccctgccctcaagtgtggcatcatactccaggctaagtccttcgtggcatgaagaaccgggagagtgccacttcctcttgctactgaggagccaagccacgttgctaatgcttgtcctgagacacaacaggctttcgaatcagttttgtctacactgatttccctgggattcacatcctggctttggagtgggactggagacgaacgcttttcttcctaccagacagctaagattgagtttgtaggcttgctaaaaatgccagctgatcgtcactaaagcaattcacgtctgtatgaatgctgcactttaatttgagacataaaaatgtacattatagctgggcgtggtggcgcacgcctttaatcccagcacttaggaggcagaggcaggcggatttctgagttcgaggccagcctggtctacaaagtgagttccaggacagccagggctatacagagaaaccctgtcttgaaaaaccaaaaataaataaataaataaataaataaataaataaagtacattattttacaattctcgacctaaaagggcttttattcatcatcagtatcatcattatttgttttcactcatcattagtcattattagtgtgtatgttgtatgcaaggcacatttatggagggcagaggatgtgtttattttgatcctgtggatgggactcaggttactaggctcatgtggcaagcatctttgtcctttagctcctaaaaggccttttcttttcttttcacacaaaccagaatgtgtgaaatcttccctccccagcttgcttcattccttccttcaggtctcatgtagccagggttggccttgaactcagatcttcctgcctctggctcctgagtgtaactgccaccacacctaactggacttctttcttatataatcacaacgttaaggaacacatgtgagttctttcattaaaaagaagagcctggtttgtgaaatgaccatgactgtaatactttttccaatctcctagggccacccacttgccttcgtttttttttttttcttcaactcttacaaagttgctccaaagcacttaacctaattttttgggtaattatagctccccgtgtcatcagctcgtgttctttaaaattaaatcacataattagagtgacagacatcacagctatgagaaggtttgggagaaacacagctgtctctcggtgacactcggttcactgcagaggcagccagcagtgatggggtgttctatgttctcagtgatggtggcaggcagctatccaatgagagaggagaatccttatgtgtgagtgtagtggccttacaggttgaggctggctacagatctacagtctgaaccatgtcccctcctaactcatccccagagaagcctgtgtctacccatttctgtgcactgatggatttagggcctgggtctgcctgtccagacatgcagaggtaggctatactccaagttcggccagactatcaacgttcagaatctttaaacattccccaaacattaaccctgtcttctcctacaccagcctcgcgatgagagccggatcatcctgcctgttttcatgtaggaacaagttgacctgcccccgaaacctcctcaaatcttggaaaaagccaggctgggtgacgccagtctggaggctgtcagaaagcagagcttaacttctgctttagtgccatcaagtggtgggcttggaagtgacactctctgagaagaagctggctgtcataaaaacaaatgctaccaataaggagattttggggcagtgactcttcgtgacactcagtgatgggcgcaggccctaagcagctagggtaccaagagtgagcccaagtgtccgcacggactgtgatagagacggtcagcgtgagctctccgctctggttggggaggtgccgatctgcggcggcggtctgtggggcgtatatgggcaaactgcgtcacagacgactgtgagcctccatgtggttgctgggaattgaactcaggacctctggaagagcggtcagtgctcttaaccgctgagccatctctccagcccgtaatttcccttctagactctgctgttgtggagaggagtgttgcggagacttgtcctagcttcgtttctgttgctgtgataaaatatcctggcagaaagtggagaatgcatttattttagctcacagttcatggctacagtctatcatagcagggcagtgatggagacaggaaattagttcatttctcatctacactcaatgtggaaatgcttatcacccagctcaggttctcgcacttacataaccctggactcgagctcagggactggtgctgcacgctttctggctgggtcttctcaggtcagttaacatgtctacggggccaatctgctctacacagtctctcactgagatggtatcaaattgacaagccacctctcacagatatcctctgtagaggtgggctgatttcacagagggctggacatgccttttagaagctacacactccagcactagggtccttcgctttgtaaacatgaggtgcctactatttgttcaatgactgcggaactggttcattttctaggagtagattgtgttcacgagcctttaagcaacagtggttgaagcatatgctaatatacactcgattagacacatgtatgtaatactagaataaaacacatgtgtgttgattgagcagttcactgtctgctctgtaggaaattttgttttagaaacaaagaatgctgggtagatggcagggggacactgcggtggcgctggtgtgtgtgctgtgtgctgtttgtggcagaatgaagtggagagatgtgggcatgtgtgtgctgtgtgtttcccagctctgttgggacgtggcaaacttgagtgtggcatgtgcactcatgtgtgtgttttgttcacttactggtaccatacaactaagcctgacttccctgctttacgaatgtgaccctgggctgggaacactcccactgctggccagtgccgatgacagactgacctattctttctcaccggacactgtttttgaaactgtgctctgagcagctgagagtcctctcttccccagggacatgtagtaactggcaaggccggggctgtgagctgagtttgtaggtgcagcctcactgttctggaaagatgctcagtcactgaccaacctctgggcatcatctcaacaccatttatggcatccttccttctcgggtaggctgtctattcatcctatggtaactttcagaggagaacttggactttggagattctgaccctaaatttgggttaaaatgaatgtgtgagattcttgatcacactgacctagatacccagaaagaaaacagaacttggcagaagatgcacaccggtctagggctcttatcaagagcacacctgcgtgcacctctgacgtctgcacagacctctctgctgctcgaattcagcagtacgttctgcaggtcctcactgactgactgcaggctcagctgctttctgggtggtcgagcccctgctactctgccctaagctgcagctgcagagggaaagcagccaaagggacttgaacacgtttgcagaggttatgggttggtagcctgtacttatttagatcctgatttctttttatttttgtcagtgtgctatttttaaaggattgggcttaatggcttaaattgaaaaaagaatcaggaaattcacacaaacctctgagtatccagtttctttgccaacagtgagtctggctaagcagggcctttgttcccacagggcatgtgttattggagaggtctagatggggcacaccccttccaattactcgacctcccctctccctgggttgtgttcctgcttaggattaatgccttggaaaaccacacttactgcattgcaaaagaaaaaccaaagtaaagtgtaggcaaagtgagcccaggacagcagtggcttctcttggacgctccctggagactgtgggagttccttctttggaagtgccccagcttattttaattctgggcctcactctgtaggatctcctttgaagccgttcttccagctgctggtccctgaggggctgctgtgttgttcagtaaggagtgaagagtttgggaatcatgtgataagagtttagcaatctccctgcctcagcctttcaagtgctgacattagtcatgggccaccatgcctggttttgaattacagctgcactggctttaatttccttatttgtaagatggggttgataacagcaggcttcacaggacagtctatgtggtaggtggaattctgtctgcaaagcatcaagttacagtgcttcccttcatcagccttctctcttccccagcctccttcatcagccttctctcttccccagcctccttcatcagccttctctcttccccagcttccttcatcagccttctctcttccccagcctccttcatcagccttctctcttccccagcctccttcatcagccttctctcttccccagcttccttcatcagccttctctcttccccagcttccttcagacagagaggaagtcccatgggacttcctggctgctttctgggccactcacacttctttgctctgaaaataaaaccaactccttttgttccgtttgtaaagcttccagaccctctcacctggatgctttcttctggtacatccaacagccctcagacatatgggaataatggaagccaggtgggctgcgtgtgtttttggtaactctgtaaggaggcacaccctttatcaaatctgccataattgtgtattgtttcctagaggaaattaccagtttctcacagcccctgttgggagactttctgagctcacgccttttctactcatgtgtttttacagaaataggaccaaggtcgaaagccggaaagacatcaacagaaaaaattggtacttcaagagggaccctccgtctgagatcgaaaggccccgctacagtagaagagctggtatgttatcccattctgtccggaaatgtacaggtctgcgcatttatgagagctggtgataaagctaacatagtcatagcgtgtaaaatgcactcgggcgcaaaacgcatactttgagtgcatttctgcctcatgcgatctgaaaaccactgtggtagcagtaagaggaaaatacaccagagcttgggaagagaggccgtggtcagcgggactccccgctcctgcagatcacttatctagacttgtctgtggacatttgggttatctaaaacttaaaagaactcaacccaggcagagtccgaagtaatgcacttatggagactgttacagtgaaagattatagctgtgacatcctaagataaagatttcctagtcgctctggctcttttttttttttttttttcatgctctacattcttctgccagcaaaaccttgtgggtccagctctgtgatataccagactnnnnnnnnnnnnnnnnnnnntttgcttagaattcatctcaaacatttattacgccccattaaagacaacatggcccttcattcatcttcttccacagaatcattgtgacagaatgagttatactgcattaaacattaatgacaaccccattttgtccttgtaagcactttaaaaccttgaccaaaacaatgtttgtcaatgacagataaaatgtccccccctctcccccgaccccgttctcctctcccaccccgcccccaccgtgacgtaggagctcaagcgttttcagcattaatgaattaattatggatttattttaggttgagaaaagcaagggtttcacatattgactgactgtgtcaacgcaaaggtcagtgtcagagtggaaaatgccagaaggtgaagagaggatggagggacagaggggaaggaagagaacagcgggggcgtagcccgcagagatccgagtgggcggggcagaagcgggtctggtctactcactgcagcgagggcagtgcagatgtagtggaggtgaaggcacctgagacttgcaggtcctgagagcagagcccaggctctcactgtgtgtgaatgctgccgccctcagattcccaggtttgcagaacagagaatgagtcaggtgactagttaggatgctgtttacagagtggtccccaatgcttgctggatgtcaggtgtccagggtccgtgaggggctggtttgatagagcagatacttaaagactcagtgggtcaacgctgtctttgggactgcgcgagtcactcgggatgctgtgggcatcactcgggatgctgtgtgcttcgagggacctagaggaggatggtgagttaggcattcagtccctcacgctggggaaagctccgtggtaggagcttgagcagaggcccatgatgcaaagcgagatgaacggtgggctcagctcactttctcctctctgttctgggaccccagttcatttaacagtgctgcccacggctagggccgggtcttcctgtgtcagttaacctggtctagaacgtcccttacagagattcgcagagatgtgtttctacagttacagttacatgtcacccagttgacagaattagctagcacagaggcgagtgcagctgcgacaccagccgcagtagagtcaacgcctttgaaagtgagccgatgagttctgcgtggaacagcagggcaggggcatctttaccttttcctttgctcattccgctgcctggtatactgctggagactgccactgttcctcgaatctccgagcaagcctcagtggaaggcaaggattggtgcaggaggaatgtgtagtcagtgggtgggagcttgcagcgcacgctgggagaatgctctcttggctctctgctggaagctgtggggaagagtgaacagctttgccatagtgagcagaagaggcaggctgtgctgggcatcttcatgtcccgtgggatgaacatcatctctcagtagttaacgcaattaatgggtatctgctaagcaccctgctctacagggttcttgtaggtttcagtgaaaggagggtagcctgtgatctatctgggaagctgagaaaaagctattcaaatataaacattaaaaatccacagatgtgcatagtctgtttaattaaataggtcaattaaaattagctcataatgaaaagaagctagttcaacgctaatattaaattggtataaatagcctgcaatcaagtttctgaaggatttaaagaactaacaggatttgaaacaatctcccttctgacctggcacaaatgcgggaagctgaccatgatgctgcactcccaggcctcgtttatttattcgttgcctttgctgagcctggcagtctgggcactagtgattcaaggatgaataacggcccttttcctctcttaaagaaagacagaagccattaggaactgatgaacagttcgggacacacagtgtcacgatgaagaggctgtcagggacaagggaagacaagaaagcagccagcagttccctctagaagcggcagagtcagtcggcgcaagtgggaggtgcattatgaaacagccactggcttggggaaggtgcacgcggcttgggagactggggaagcggtgcagcgagtgccactagggggtgcacgcagcctgagagcctagggagctgctgcagcgagtgcggctgggtggcgaggaggctggaggaagagatgagtgagggcgtggaaggctctgtggtaactgtgggggcagcaacactgtcagttgtgtattttagaagaattccttggctcagggggatgcgctgtagagcaggatgggtttgagagggaatggcagggaaggaaataggaaacctctgtctgaaggaaaggatgtggacccaagccgactggatgtggctggaaacaggcaagggatcaagagctgtttcagaaagcagtggccagacactggtgccatttgtatctgaggagcaccgccgcttgttaccactccttacactgtggccagggagaaaggaaggttaatatcagagctagctgatgtcatagtcactgttctattgctgggaagagataccatggccaggccatggtgtctttatagaagaaagagtttattgagcttccagtttcagagggtggtgagcccatgaccatcatgtggggagtatggcagcaggcacgcatgcatggcactatagaagtagctgagagattgcacctgatccagagtccagaggcagtggagggggttgcacacacactaagtggagatggtggggcttttaaaatccccaaagcctgcccccagagacacacctcttccaacaaggccacacctcctaatccttcacaatcagttccaccaagtgcagaccaaacattcaaatgtatgcgtgcctatggggaccgttctcactcaaatcgcgacacttgctatagccagtctgacagacgattaaaacccattgcatcgaagcaggagcaatcaatgctgtcatttgcttttcttaagatttagttccttatacgtgaagttttgaggaagctggggtataactcggtagtagggtatatgcaatgtacaagcctgggcttaatccccacgaggaagttaacactcatgttaaaattttcccacacacgtgcatgcacatacactttctacaccctcacccacatacataaccacgtgcacacacttgcactaacacatgcacagagaaacacacacacatacactgtacaatactcacactgtcatatacacgttcaacttatgtactctatgcatatactctcacacattcacatacaacatatatgcacagtgctcatacattctatacagctatccatacatgtacaattatactcaaatacacattcacacaatgataccatacactcacaatacttatatacataaacccatacatagatacatagtccatatacttgccgtacctaaacactccacatacatgtgtacacacagaaatactgacgtacactcaattgcagacatactcatacttcacatgaactcttacacattcagctacatgtataccctacacacacacttgcatatactaaacctcatacattcacacaatgacactgacacatacaggactgacatacatatacctagtatacatgtgtacacacatacatactccatatccccacatacatactcatatactcacacatagtttgagcacacactctcatacacattctcacatacatgtacacattataaacacacagatgcacacactcatacacattcacatacacttactttatacacaaacattctgaatactcatgtgcacacacaaattcacacactcacacagactcatacacatgcatacacctatctctctatatgcacacatcacatgcacgccatctcacaactcacagtcaaatattacacacatgcacacaaaaaacacttataccaatacacagacctacactcctcacacatacacacagtcacacacaatgcactggcacttccccatgtacacactcacacacactgatgatcccagcagggggaggtggagactggaggctcccttgtgtttgcgagctgaatcagtaagctccagactcaaggagagacgctgacttgaaaactataaaggagaacaattgaggagagcacttcatgtcggcctctgacctccacacagatatgtcacacatgagacacacaaagacacactgatacacacacacacacatacacacacacacacacacacacttgacacacacaggacatacaggtacacagacatacagacacacacactgacacacacagacacaatgacacacgacatacagacacatagacactgacacacacaaacacactgacacatggggatgggggaggggagagagagagaaataccaaggattccaaccttctcgtggcgcaggccccctaagttctcgtcacagactatattctccaggcctgtggacttcttatggtgaccatagcatgttctgtcgaacttcacatattctcatgtatattgtccgctacccgaggtgtgtctcctgtgtgtctaacacctctccacctttggaaacgcagttcttaaatcacgcccttctgaaggcttccagcttgtgtacttgtcacgccctttaaaacgactgtctgatcacttatgctacaactttgtcctatcgaggtagttcggagcttaggaatggcgtccttttctttctttttcttaaagaaaaaaaatccatactatttaatgctgacactataagtatttactgtattggtttacacttagctataaggtcatgctgtattccggatatgtccactaaacttagctaatgggccagctacttcctgctgtgtgtgctccgaccaccacgggattttattttgtgaatgcaatatcttgactttctcttctcgcagccctctgaagccaaggcaaaggcaatcggaaaggttgatgatctccttgagctgtacatggggattcgagatattgacttaggtaagactgttaacgaaaacttccgtgccgtgtacaaatgatgcccagttatacttccaagataaaaaggatttgtggagtacaacagaacataaaaacagtaaagagtaatgattcaccctgtcccttgccgtgagatattggtgctaaatccacttttaaaattttatctagactgggtgtggtagtccatgcctttaatctcagcactcagagaagcagagatgggtggctctctgtgagttcaaggcgggcctgttttacactgtgtgttccaggacagccataactacataatagaaaccctacctcaaaaaacaaacaaaaaatttagtaaaattttaatctagacactgcaaataataatgtcccctttaccatgttctgtgcattaaactatatatgaaaatatataaataaatgatacatatggaaagctttcctacctgaggtgccacctttacattgatcattgattacattatgcacttgtacatcatttaataggatttctgaaataggggagaagaaaactcagaattcatgaacagttggcttggcactaggatttctgggtgtttcctaggtaattttttaatgttactattaacatgacaaggtcttgattcattaactaaggtttgtgcttgctaccctaccggtagcaaatattgcaaaacaaaactaaagcaaaaaacaaaacaaaacaaaacaaaaaaacaattccaactatatttaaggtgggaaaaaaataagagaaatttgtggtttttataactaaaacatccagaggtggatcttgtcttcaaaaatggctggctctggagctggagagctggctcggaagttaaggtcacttttcctgctcctgtagatgatctgagttcagctcccagcactcactcacacggcagcccataaacatttgtagcttcagttccaggggctctgacgccctcttctggcccccgtgagcactgcacacacacgctgcacatacatatactcatacataaaacaaatagaacactagatgggtaactccagagatagtatggatgatacggtgcctgagcagctgcctccatgtgatgagaagagttggggtaacaaagaacaaactctgctccgaggaggaaggatgggaaaagccatcaagggagcgatgggagagctgaacaaaagggggactcagaaaggagactcagcacaaagaagccaacagagcgaagcttggactgtgtggtccctgctagtgggatgaggggagcggaagcctcacatcagaggtaagtcaagaagtactggaaacgcgtcctgctcttgcaagcccagacacaactggggttttgaggagacagcgattcttcaggcatggtacatcgacacttgaacaggaggtccactgtgtcgctctccatgtctcacagggctgtggctgggcatccttgctctgagaggtgactgctcaaaattgagcccctctgcctgattcctgtctgtagcatgtagtttctaccactccagctttaagctctgggtgggtggactgtgctaccagccccacccaggagccaccctggatccgaggatgaaacacacacacacacacacacacacacacacacacacacacacacacacaccttatttttaatatgctttttgctcagtggcgggctcttctaagcctctctcagctattgtgcccttcttttcacccccagctcatcaccctaaatctttcttcagtttagttgctcagttacctttagtcctagctcagcaccctaaatctgctctgagcttagttgcctttctaatctcccacctgctaccctaggtccagtaggggaagtgtccaatggccattccaccagagatctcacatggccggtggctctttctccctctaaagcatggtgaatttctttcctcttcctgtgtctgctagcctgcctatggggaaactggaagccccgcctcttctgctcagccattggctacttgcatctttactgttccccaagaaccaattggggaacaggaccttcagcattcattttttttcgattggagcatcagacaccccctctacacctgtcctggagacaggcaccagtcagggccatagacttgtcttgcagctgcagtgggtggatgggcttgctctatctgtttcagcaggtacctgttcttggttcccaggggctggctgcagcaggatgtggcctggtttctcccaggctgctgcatctattcgcgagcataggctcacactctaactcccagggagcctgaagtcagcccactacatctcgggcatggggcatggcgtatagccagaggaggtagtgggacatagagaccgggaggataatgtggtctcaccctcagtatctgggcacaggtctcatcatcctagaatgaatttgcagcctcatggtcctgaacctcagggcgtttaaggctcagtcaggttggcctgcacagacctcgcggttgtgtttgtgtttgtctctcacccctaaggcactgagagacactccctcagtcggcacattagtcactccgtggtgttagaactgagaggtttgggagcacagcagaccccgcctacccctacagaaggcagagctgtaggttgttagcagaagaccttcctatgcgaagaagccacagaagggaagatggggtggggtggggtggggtnnnnnnnnnnnnnnnnnnnnnnnnnnnnnnnnnnnnnnnnnnnnnnnnnnnnnnnngaaagacaagagcctacacatccagctgcctctggccccacagacgctgactcagcccgggcttacaggacccaagagaagccagtgtagcatgccacctgtgttggcagcccttgtcttcagttttcttttgaccatgctttcggtatattgttattttatcttatttccaaagctctcatgattatactatttctatgatattgtttatatatttttcatgactgggtgacctctctttgactttcattttctttcagctttctccttagcactctgatttattctatgtttccgtaacctgggacctcttctggctcccccctctcctctctgctttattttatcattcctgtctctgtactaaccttaaataatgttaacctcacctcacagggacagctctgtccctgtcagtttatgataggtagtgatgtattacgaggttttaatctaagtgtaccgctgcgagtcttgttgggttccctgcagttgatattttagtaatttgttttctcctctctgagaggtgctggcaactgaaccttaagaacaggctgctcattaaaagccagataaaacggatgcggtatacagccaaacgatgcacacctcacagcacagaaacacaagaaacacaaaaagcaagggggcatgactcttcagcttgtcaaaagactataaatcttcaacaattgagtttaaaaatactaactaaactgggtaaaaagtcagacaaaggatttaagagcgtacttatacggtgatcagggacaacacacaagaaacataaaagcagataaatgaagtaagaaaatgaatcttgagtgtagaaaagaaaggcagtcaaataagagatattccacaagaaaattaaagttttgaaaaaaaagagaatgtgtcggggggatttatttggcttacacttaaacattagtgctcattatcaaaggaagtcaggacaggaactcaaacagggcaggaagcaggagtcaagagctgatgcagaggtcatggaggggtgctgcttactggcttgctccccatgacttgttcagactgctttcttataggacccaagaccactagcccagggatggcaccacccacaatgggctagaccctccccatcagtcactaattaagaaaatacctcagaactggatctcatggagggatttcttcaattaaggttctctcctttcaggtaaatgcagcttatgtgaagttgatataaagccagtcagtacagatttagttattctgtagtgtaaacacaaacacatagaaatatcatactgtactgcttaaaaatggtgcatgcttttaatgccagcactcaggaggcagaggcaggtggctctctgtgagtttcaggacagccagggctacatagtgagaccctgtctcaaaacccaaccaaccaaccaaccgaatggaaatgttggaaatgaaaaattcagcgaatcaaaaacaaaacagaacaaaacaaacccgaatcaaaccacagtggacagcatcaccaataaagtagatcaaacaaaagcaaggatatcctgatcagaaggcaaggccaatatactccacacttagacaccagggaaggagacagacagctaagcagtaaaacccgaaagcccaaggggcagacagatgggctgagataaaaactgaaggcgtaaaagccattcagtgtccacggaaatcccccaaatctagggaaggagatgactgaccaggcagaaccccgacgaggtacgatcagaggagagaagctagagccaaactgagcctgtgcacgccagggtcacctcacctccagaattctagttttggggaaattctggtattgggatcaatggctcaggcttgtgacaataatacagatgcatagaaatgagggggagagggtcaagaggggggcagtgacctcaaaaatacagacagtccgtgtttgttgggaaacgatctaattcatctgtctttagttgagctgggattagggagaaccatggctctcagtgtcggacctcggggctgccttcagctttagatgagttcatagttctagaaatcataatagttatttctattaaaatatagacgcgggggtgagggtggagaggtggttcagcagctaagactacttttgtccatccagaggatgcgatggtttcctggtacccacggggagtgactcgcagccactgtagctccagctccagaggatctgacactctcttctggcctccatgggctctgtgctttccccgacacacgtatttaattatgcagagatacaataagtctggtgcttatggaagcctgatgagaccatggtagctcacggaactgggactgcaggcggttgggagttgtctcatgggggctgggaatggaacctgaatgctcttaactgctgagccaactctccagctccccccaataaaacaatgactttgcttatgtgtgtgagtgtttggcctgtatgtatgtatgtgcaccacgtgcatgcctggttccttcggaggtcagaagaggcgtcagatccccagggactggagttatggatgattgtgagtcaccatggcaacgctggagacctgtgtcctctacaagagcaagtgttcttaatagatgagttgtctctcaagtcctacaaattaaatctcagaaaatacaaatatagtacagcagaatgttggatatagtacaaatgattataaatgaatttaagacacaagtctttaaagatgaattttctgggtcaatgaaatggcctattaggtaaaggccttttgttgctcactgagcctagtacacgcacttgtggacacacacacacacacacacacacacacacacatacacacacactcacacagacacacacagagagaacacacatactgttacacacagacacatacacatacacacacacactcacacatacacacacacactcacacacacacatacacacacagacacacacatacacacacacagacacacacatacacacacagacacacacaacaacacacaatggagaaataaatataatttgaaaaagaaccttaaaaaatgaattttctcttattcccagaaattaagaccactaaatattctaaaaaatgcatcgaaatcacccggtggtcccttgtcagttaattaagtgcctgtagcagattcctttgattgacacaaagccattgtcatcatccatggttagtgatgtgatcagtcacttagggaggcaaagaggaaggaaagtaatatttgaagaatgccagctgttgttaaatgaggaatttctgttgttcagatacaattagcatgaaatgtgcttcagaaatgcgagactaatgtaacagacaagcaagactgatacctgcatctccagcattctttgctttcagaacctctctctctctctctctctctctctctctctctctctctctctctctctctccttctcccttccgtcctctcttccttcattcctcctccctcccctactttggtttttccacatagagtttctctgtgtagccctggctgtcctggaacttgctctgtagaccaggctggactcaaactcagagatcaacatgcttcactgccacacccaattacataagagtctttgtaggatgaatgtacttcggtggctgtaaagttaagctctgagccaagctatcatggagtaccttgagattctggcagtcgctgagtcccctggactgatctaactcaaggacacgccttacagttccttctggaagctttaaggcaacagctaactgcctgtggacctacagtgtcttctgataccaatataggattttgaaactaattctgtcagtttcagaatttagaaatttatcctattaaaaaggcagaaatatgtgggaaggcgatttgaatggtagttcctaagttatttttcccttgattccttttgtagctggttagaaaggtatatactaatgatgtttcatagtgagggacatctttcttgcttgggttcctttcattggtcagtgaaacagtgtacagtgtggagagccccttataagtcaatggagtctggagtagatttctattaaaaagcacatagtaggggctggagagatggttcatcaattaagagcactggctgctctttcagaggacctggcccacatggcatctcacaaccatctgtaacatccagaggatataccatcctcttctggcctccacaggcactacgtatactgcatacacatggtgcacagacatacatgcaggcaaaaaataccccacacatgaaaacaataggtaaataaaatattttttaaaatatgtagggtgagggtgaagcttataggtagagcatctacatatgcatacatatattcacacatatatacatgcatatacattcatatacatatacacatataaagattataagaaatgttaatttttatacctaaaacttgtttaaatatttacacacttaatggaaacagtatattggtcaaaattttgtggtggtaggaacataaaaagagtctcagagtggccacaagaggtcagcacttagttgtaatatgtatggtattaaaaatcttggttgttagtgcttataagggactgagcaaacatgtagggtggattccatgggcgtctagttcctgggggaagtttttaggagatgtgtactgacagacacggtttctgagacacagaacacggggtttaagtaacttcctagggaaggcagatcacagacccatcctaattttcgatcctaagctataagttgctaaagaaaaatgtcacagaattcaaagtgctgtgtggcaagctgtaaactgttcctctggtgaggagagcgttggctccatgtggtgggggctgggggagggaagggacacagattctcagtcactgtgggaaatgagctgtgtgcaggaactgactttcttggtgaagttagccatggggtttctcacagtgtgtcttcacccatccagataaggagagggcttggcacaagttttatccacagagcccatgtgaaaatattagatgtggtggtgtgtgctttaaagcttagtgttggggcagtagagacaggaggattcctggagctggctagattacagtatagtctaactctaggccaacaagagacctgttctcgaaaagaggtggggaatgtttcagggaacggacagcatttaaggttgcattctggcacacacacacacacacacacacacacacacacacacacaggccccaccagacaaaaagaacaaaacaaaaaaccccaaacaactaattgacgggctctcaggttggtgacagctgcacacctggtacagtggacagataacgaaatctatccctgccccttggtgagtgaaagtgtgtgtgttgctttggggtaagtagtcatggtcctgctaacattttatcagccctctgatgctaattcatggctcatcgattcttaaacattatcgttgacagctacaaccatgtttgaagctgggaaagacaagagcaacccagatgagtttgctgtcgctcttgacgagactctgggagactttgcctttcctgatgagttcctgttcgacgtgtggggagccatcagtgacatgaaacaaggaagatgatggcgtggcccgtgttcctgcagagatgaccacagttctgcaggcagccttctccggggtcttagacactgttatgaactctactttagcctcctgtgtatgagatacagtcttcgaaatgtaattttgatttatggatgatgtttaatatagtttcttatgtagtgtgtttaaggtaaattaaagtgtgatccattttaatatttgttcaaaagctttaaaatttttagaggaatctttctacataggtgattttggtccctgtttgtacccacggctctttccacataaaatacttgattacaacagctttgtgggtatttttcttcaacatcttgcatgtttatgagcatgtttgaagttgtatatttattgttacatatatgtgcttaactgtttgtacaccctgtgcatgaagtgcttaaggaggccagaagagggaatctataaccatctgtaactctccgactggagtgacaggcagttgtgacctgccacgtgggtgcttggacgtgcacctgggtcatcttcaaaagcagccagtgtggtcaagtgctgaactgtctccagggaacccctttcttcataatcttaatataacgggaactaggatcagagtctgattcaccccatagcattttccttttgttatgttaacatgaacaggatgagtttaggaaatggaccgtggatgatgtctgccacaggtctagaagtttggtgctcatttttaaatgagcaggaggaggtgttcatctgactcattgtttgtagggcattttctgtaaaacaagggttgattttttttaaattgctcttaaaagcaattggttggaattgttgtgtgtgcacgaatgtgtgtgcgggcctgtgtgtgctccggtgtgcgtgtgtgtacatgagtacaaggtataaacatgacaagtagaagcatttgtgtttgattttgtttttttcagacctttaactattattactttcttcacctataacctctgtctgctaactcttctaaggcctccaggccagtgcttagatttgtagcgtttttactctaaaatctgacatgctgtctttggcgcgtgagcatgtggtttaagcagcaatcgtcttcggtttcctaaacatcggaggaaatgctgccaggaaccggctgcccgaaggatgtagaggaggagggcggaatggaagagtgcgtccacctgttcttttagaggcccggcacccttcctctgacccttgcttgattgagaagattgagaggaaatgtcagtctaagcctccgtgggcatttcacggatgtaagaggaatggaaagaaccggccccagcgcagatcatgtagtaaggcggaagagggcgtggccaggcactccggtacctcagatggaagatgcagagcacctcggcagcaatcagaaatgataaccaggagggcgtgctccggcaaaccagaaggaatgcctttttcatgctgggttaatgcctcggtaactctgtccttttcggcaaaaacgttactttttgctgtctcctccgtcacagcagagcggcgctgtggttcacgttcttcatttattaatctgcgccctgcacaggagcgatttgaatccttagcgagaagcacaagcagcccgtaggatacagaccgtttaattctgttgtgcgtatttgaaaataggcttcagctcgagctgtggtctgttagtaattgttcagcgagtcgtctgtggaggttccagaaatgcctataacttaggagacacaaaagagagctggtgttttaggaccggtaaagttaccagacgaagtagaaggcccatggaaacatcgtagtttaaacaatagcaaaaatataaattcttggtcactagatgttagatttgaaatgtttattgtatttttttatcatcattatgatttttttggtgtatgtgtgtgtttgagtaagactgtgtgaatgtgaatgtacgagagtttatgagtgtgtgtcagtatgtgtgagtgtgtaggaattagagaatttccttggggctgtatatgtttctcctttggaggtcttcaggaagactagaattcagtttccccatgtcttacagaaaaccactgtcatggtgatctttgtagagcttgggtatgcaaggcaccagtgtccgtgaacagcatcacctcttcttgtctgttagaatttggaggtcacttgttaccaagggtgtcagctggacccaggtgctgcacacactaagagaattccctctggaatgttctcatctcttgcctctactgggagactaataacaaggtcagttcttcaggtcattccgtctccacacctgcagaaacatctgtttgtgatctttgctccctttggcaatgtacagtgagtgctttcatttcctcttgtgtagtttgatgtggtgtgtgtgtgtgtgtgtgtgtgtgtgtgtgtgtgtgtttgtacatgtgcacatggctgcacgtgtcagtacttgctcatgtggaggccagaggttgacatcggtgtcttcctcagttgctctttagctcagttttttttgagacagggtttctcactgaacctgggactcatcgacttggttaggctggctggctggtgagctccagggatctgcctccttagcacggggattgcagacacatactatacccagtgtttacaggggagctgtggattagaactcaggtccccatgctttcatagcaagcactttaccctgagccatctccccactgaattttagtgttatttgaataaacgtgacaggaatattatgattactcaggccttcattttttaaaacataatactgacttttttttttttaagttatatctaacttgtagcccatgggctctatgcagccaaggacagactgtgagtgtagctcaacacaaaattgcaaacttaaacactaccccaattattggtgtgtatggtggtttgaataggaatggtcctcatagacacactgtttgaacgattggctcccagggagtgtcatgtttaagaggtgtggccttgttggaggaagtgtgtcactgtgggggtgggctttgaggtcttatatgctcaagctatgtccagtgtggcagcctccttctgttgcctttggatcaagatgtagaactctcagctccttctccagcaccgtgcctgcctggatgctgccgtgctcctgccatgctgataatggaccgactctctgaacctttcagccagccccaattaaatgttttcctttataacatttcccttggtcatggagtctcttcacagccataaaaccctaactaagacaatgaagaatgtcaacaagtatttagtcagccacttcaggtaatccttagcaaccccttgagtaacgttcacctcatttttaaatattttaaaaaagtaggttgtgggaaattaagtcacttgctcaagggcacatatgtagctagtggcaaattcaggacttgaacaggatttggagtcaaattctcagctctctgcaaagccgactctgttaacgttttacgggaacaatgtgaagtgtacatcacccaaccaaggaaagctgtagggaatgagggcccagaaagcaaggctgtagactcagctaacagctctcactacccgaacaaagagccgcctcctcgaggccaggctaaccagcaggtttagattatcagatggtggattttagatgcaaaagtacttggttctttaggtgaggaaaactgaagtgagtaacgactatgctaggactttgtatttaatagtgcactcattgctctatgtgttcttcccaggatggcttaaaagtttttttttttttttttttttttaaagaaatcaaagattgggaccatttctcggcaagtaagaactggctttaccaatcttacaatgcctttgctggtgtaagtgatctcatggtttaattgatttggtcccagctaatgagtaactttgttgtttggactgaatgaacaaggtattttgtttttgttttttcacttaatacataaggaatatctgaaaggctgtcatcaatattaaactccaaataaaactacctttaactgtactgactaaaacccaaaaagtttctccttcaggggtgatccacttgtcagggggtgtactcaatgcatcccgctttagctgagggccagggtggatctggagtgggaaggcagctggaatgaggtccatgttataattggtcattctgaactctatgaactatgaccataccactccttcagttttcttgattaaacatcaatagtcagttgggattagtcttttaaaaagtaaattaattcagagctagagagatggctcaacggttaagagcactgagtgctctttcatagtgcctgggttagattcccagcacccacatggtggagcatgaccctgtgtaactccattgtagggcatctgatatccaattctggtctctgggcacaaacgtgcgtgcaggcaaaacactcataataataacaatctaaagtgaatgaactgtcataataatataataacaataatatcaaattaaacattaaatgtaataataataacaataataatacatgaaagtgaattaactgtcttccaggtaggctcatccaggtgagcctatctcatttcatggcccaggtgggccaaccctgctttttgttttctacctcgtctgaccagtaggtggcactacctgcacgggctgccacctcgaagctgcctttctttcccttgtgattccgataggtctgtcaggtgtttggtgtagtcttcattctggcctgtctagtctgattcttaagcacagccaggtgacagctaaagtgtctctgatactcagctactcttctgagccttggggactgcacttggtgtctctgagagtattgaggctgatgacaaattctaccaaaatcagcccaggttccactaacccggagaggcgctgactggtggagcgctgccggaatgattgtgcttaatatcctgtgaaaattatagacgacttcataccaagcagaaaattaaacaggcgcattaaaaaattttaaagcttaattcgtggctgcaaaacttttaaacgagttttgggcaaacaggaaattgtgaattaaatggttctttgcttgaataagcaagccaagcttcgtggcagctaatgatcaatactctgcagctcatgaaaaggctttcatctttattatgatagaattctgtccggaggttgattcaggttttactgttctaactgcggtcacttgagcttcttattctttgtggcatttttcatatttaagtaatttgccatcgctttgagcgagagcagttttatcttgggaatcttcctgtgacttatgttttaattctactgtctcccgatgctcctgttaaccgtggttaaatatgacatttgttatagacaagatttttcatttgtttttatttccttagaagcatatgtagccttggcacctttagttaattagtgaataattagttttgtgttcatgcgtatgatgtgcgtgtttgcatggtcacgagtcactgcacgcatgtggccgtcagggaaaacggtggcgtgttggtcctcgccttcgcctctgttccgagtcagggtctcctgttgctcttttcctgatgtgctctgtgcttcaagctggctggcccttgagcttctggctgattctctgactgtaccttcgtgtctcacggtgagagagcaggtactacagaggtgtgtgactgaatccagtgttttctgtgggttctggggtggaactcaggttctaaggctgggcagaaagcacctccaccaaaccacagagccacctcctctacctgaaagttttaaaagtggcttttgccctagtttcctataatcataacgacagagaacttgtactttatccggtacacttgtgccttcatggtccaggatacacaggagtgatttctgtaggatagtgtctgtgggtgatttctgtaggatggtgtctgtgggtgatttctgtaggatggtgtctgtgggtgatttctgtaggatggtgtctgtgggtgatttctgtaggatggtgtctgtgggtgatttctgtagggtggtgtctgtgggtgatttctgtagggtggtgtctgtgggaggtggagttgcctaggagagagcggcaggatcatgaatcaactccgtcaacggagaggtctgctctgggtttcacaactggtcatgacatcacgtatccatgggagaggggatgccaaaggataagtgtcttccacgcctaaggggaaggccttccctgagcagcactctttgttttgttgtattggttttctaaatttaaaaaaaattatgcatttatatcccaaatgctgccccctcctggttcccattctcagagttcctcccccaagtgccctatctttcacctctgagaggggtctccgccccccccccccatatcactccatcctggtgcatcaaatccctgtaggattaggcaccttctcccactgaggtcagacaaggcagtcctctgtctgctgcatatgtgaggggcctctgagcagcccatgctctttggttgttagctcagtctctgggagctcccaggggtccaggttagctggcaccactggtctacctgtggggttgccatccccttcagctccttcaatctttcccttaactcttccttaggggtcccttacctctgtctaatatttggctatgggtctctgcatatagctcagtcagttgctgggtagagcctctcagagaaccaaggttcctgtttgcaagcataacacagcatcactcagtgtcagggattggtgcctgcccatgggatgggtgtcaagttgggttggtcactggttggccattccttcagtctccctgcacagtactctgtctagttgagaataggattatctaacttccagaatttagtcttttgctccaggagtggcatggaccatttggttttacttctgtgaacagacaccatgaacaatgcaagtcttataaaggacatttaattggggctggcttacaggttcagaggttcatcaaggaggtaggcatggttttgggcagacctgagagttctctatgtttatctgaaggctgctagcagaacaccagtttctaggaagttaggacaagggtcttaaagcacaagcccacaatgacatacttattccaacaggtcatacctccaaatagtgtcactccttgggctaaccatatacaaaccatcacagccaggcattaagctattgttagattcattgacattgctgatttgtggttcacttttgacaccactgtttgtttattagtatgccatcctctttttaattgaagccaaatatcccaacaaatgttgcatatggatcttagtagcctgtgatgggctgtcttttctttttcttttttaaagatttatttattattatatctcagtacactgtagctgtcttcagatgcaccagaagagggcgtcagatttcattacagatggttgtgagccaccatgtggttgctgggatttgaactcatgaccttcggaagagcagccggtgctcttaaccactgagccatctctctagtccagggctgtgttttcttgattgacagttacagggatctatatgattcactttctatgaatctggaatagtctttcaaccttttaagggcatgcactggctagttttatgtcaacttgacacaagtcagagtcatcagagaggagggagcgtcttgagaaaatgtctttgtaagaactggctgtaggcaagcctgtagagtattttcttaatttgtagttagtgtgggagggcacagaccactgtggacagtaccactctgtgctggtggtcgggggctctataagaaagcagctgagcaagcagtgaagagcaggccagtaaggagcacccctccatggcctctgcatcagctcctgcctccaggttcctgccctgcttgagttcccattctcatttattttgagaatggactgtgatatggaactgtgagtgaaataaaccttattgatttggccgtagtgcttcatcacagcaatattaagcttctctgagacaagtttttaccaggtactggggtattgctgtgacaggcctgaccgtgtttttaggatttttggaaggtctttggaacttggggctacaaaagccattgactgttcgaagctcggtgagcttttctgtcggaacttggatgactggaacgtggagagctacgtagaggtctgacttgtgaagttccataaggaaacttcacataagttaaagactctaagggctgttgccattttgagttgagggtctatgtttctggttcaacaggggccaaagaatcagctgtgattagccactgaactaaaacctttgctttactgggacagttgatgatggtcagctagagctaagaaatattaagaagagaccaatacactgaggtgaaattttctgagaggtgcttcctcagagtcagccatagaggcagccacagaggcagccacagctgtctcttgcactggcagccaaacttgataatgtgtaagagtcacccaggtattgaaggcctgaggggtcatcagtgccactgaggcttggcgccatgagaggccaggagaggccactggagaagacgcagctgcaatagcaattggagccccaagattgaaagggtcatggagagaagttgaggcttggcaccatgaagagagcccaggagaggctactggtgaaagtgcggcccagtcacagcagaagcccccagcactttggagataccatgacactggaatgaccaccaagaacagcagcagtggggaggggagcctgcctgagtctagaagaaagatgtgagtggtgcagggtgcagaagtggagaagatacccagccctttggagaacagatcatgggtgaatcccagatattgatcactgagtgacttacactgctggagtgtggttttgttttgatctgattgtgactgtgccctgaaacaggttgaagtaaggaagtatttaacttatttctgatttttacaagaggccacagttgagagtgtgaatttttaaaagagattttaggttttaaaagagactttgcagttttagagagattgaattttaaggtgcttgaatttgtaaagacttcagggcattttaactgtgtaaaatattttatattgcgatgtcgatattaacgtgtgttcttggtgatgagcaagaaaggaatgttgtggcttaatagtgtgtgtgacaagaggccaatcaggttggccagttctatgtcaatttgacacaagctagagttatctgataggagggaacctcatttgagaaaatgtctccatgagattagtacgtagggtattttcttaataagtgattgatggaggagggcccagctcatggtgggtgtattatctccggggtgatggtcctgggtgctgtaagaaagctggctgataaatccatggggagcaagccagtaggcagcacccctccatggcctctgcatcagctcctgtctccgggttcctgctatttttgggttcttgtcttgactgcttttactgatgaaatacgatgtggaagtgtaagccaaataatcactttcctccctagcttgctttggtcgtggtgtttcaccaccgcattagaaacctaactaagacagggcacaatctccacaggagcatcaggctcactggtattgagaaagggtccctgtcttctcggccttccactgcttgctgcccctgggctctgtgaagctggacttcctgtacatgatcctatgagaaccgagttacagagaacagaatctgtgtgcccactggcttttccaccggagccgagttcctgaaaaacaacttaggcttgtttatttatgaacacatgcctctgccataagcactggctccttccccaactaactcgtaattatataaccggtttaaagtattcagtgtctgccacagtgctagttacctctccccagtttcatgtgtccgacttcctctgagtccgggtgaatcttccctcctctgactatctcccagagttccaacctctctaccggaactcccaccttctacttcctgccttttgctaataggctatcagctttttattgacaggtggtgcttccacaaagagattatctctataaattctttctaagaagaatgggttaggtgaatggcccagaattttttagaaggactcaaggg

SEQ ID NO: 1472 - DNA, 1594 bp, Mus musculus
gcaaggcaaggtaaggccggtccgcgagcaaaggccctttgttatagcatccccggcccttcatacaaaccaattccttttcactgagaggaggtctgagtctagaagggggttgactcgtgcacagctttccttctgcctgagtaggtagctgcccggctcaggtgccctgtccttcacagggaggggacctgaagcccgcgccgctaggcggaagcgctgctaccattggcccagcagccgctgtcacctgcgcggagccgggcccccaagcgcaaagtccgctgtccgaggccagggagcttgcgccgcagcgcaggtggtccacgccctgggacctgcaagatgccgcttggactgcgcgggaagaagaaggcggccaagtccaaggaggccgcgaggctggtggagggcgagagatccagtggcagccagggtgtccccggacccccagctccggcacgcaagctggtgttccacgcacagctggcgcacggcagcgccacgggccgagtggaggacttctccagcatcagcgagctctacgccaagattgccggcgtgttcgagatcgcgccatccgagatcttattttgtaccttaaatacgcctaaaattgacatgggaaagctcctgggtgggcagctgggccttgaggatttcatatttgcccacgtgaaaggcacaaaaaaggaagtgaatgtttataaatcagaggattcgcttggactcaccatcacggataacggcgtgggctatgcttttatcaagagaattaaagatggcagcaccattgactcagttaaaacgatctgtgtgggggatcatatcgaatgtataaacggagaaaatattgttgggtggcgtcactttgaagtcgctaagaagttaaaggaattgaaaaaggaggagctctttactttgcagttaatagaacccaagaaggcttttgaaataggaccaaggtcgaaagccggaaagacatcaacagaaaaaattggtacttcaagagggaccctccgtctgagatcgaaaggccccgctacagtagaagagctgccctctgaagccaaggcaaaggcaatcggaaaggttgatgatctccttgagctgtacatggggattcgagatattgacttagctacaaccatgtttgaagctgggaaagacaagagcaacccagatgagtttgctgtcgctcttgacgagactctgggagactttgcctttcctgatgagttcctgttcgacgtgtggggagccatcagtgacatgaaacaaggaagatgatggcgtggcccgtgttcctgcagagatgaccacagttctgcaggcagccttctccggggtcttagacactgttatgaactctactttagcctcctgtgtatgagatacagtcttcgaaatgtaattttgatttatggatgatgtttaatatagtttcttatgtagtgtgtttaaggtaaattaaagtgtgatccattttaatatttgttcaaaagctttaaaatttttagaggaatctttctacataggtgattttggtccctgtttgtacccacggctctttccacataaaatacttgattac

SEQ ID NO: 1473 - protein, 312 aa, Mus musculus
MPLGLRGKKKAAKSKEAARLVEGERSSGSQGVPGPPAPARKLVFHAQLAHGSATGRVEDFSSISELYAKIAGVFEIAPSEILFCTLNTPKIDMGKLLGGQLGLEDFIFAHVKGTKKEVNVYKSEDSLGLTITDNGVGYAFIKRIKDGSTIDSVKTICVGDHIECINGENIVGWRHFEVAKKLKELKKEELFTLQLIEPKKAFEIGPRSKAGKTSTEKIGTSRGTLRLRSKGPATVEELPSEAKAKAIGKVDDLLELYMGIRDIDLATTMFEAGKDKSNPDEFAVDETLGDFAFPDEFLFDVWGAISDMKQGR

SEQ ID NO: 1474 - DNA, 111332 bp, Homo sapiens
ttgtgaaattaatttgttcatatttttatttaagaaagacatccaaggaggcagattatataaaatgtttttgaaacacaatgaattggaataattttagaaaactagactattctgaattaaatattaaatacagtttatcacagtgatagtttagttgataacttgaaatattcatttgtcaagtaaatgttcttcaggactcgaattaataaacagattaaaaatgtgattagcatgccaattgttgaaatttccaactaaacttcaaaatgattgcaagtgtttttaacatttctcttataacttatattcactatttaaataaacttttcttagtccaaaatgcttgaattagaatattgtcattcattatttttgaacaacttaaatatatgccatgttctgatagcctactttcaatgcttaagagtacaatgaaatatgccatatgaaaattatgataaaaaacagagcatgtacttgatttagaagatactacatccagcctgggtaacagagtgagaccccccatctctacaaaaaaattaaatataaaaaattggccaggcatggtggcacataactgtggtcccatgtactcaggaggctggggcgggaggatcacttgagcccaggagctcatggctgcagtgacccatgtttgtgctactgcactccagcctggataacataaagcgagactctgcctcaaaaaaaaaagaagatactacaggatcttagagtatgccattcattttcattacgaacatctattgtgcaataataatattttaaatcatttattatgtggtaggtactgtcacctgatacacaagtatatttacagtatgttttatgcaatatttattttagctataagaactaaatatctttaagtgtgaaaaattaaccgagagatgaaaagattcgcccaagattgtaatcgattaccactgtacaaacagcacaatgacttgaaccaggtctcttggttcaatctaaaacttgtgctcttaattggcatactgaacagcttccttcaattataatagttgtggaaatgatagaaaagtgacacatctcatcatttcaatttgttaacttgaattctgaaggaaaagtagaacgcagaaggcccaccaaaaaattttacttggattttcacgttatctctagtccatataaatcaacattctctgcatttttgattggcagatataaacttcagccctgcttctggtaaaattacaacaaaaccttaattatgttatattgaactattagggttatattttaatgatggttttcaggtcaaattcttaatttaaaaaaatgtactgggtaagttcagtgttgtaaaattaattaccaaatgtggcaaaatatttttggataacatttactagcattccttttccagtataactgaggaacaaaatgaaaaatatttggcggtttttgggaacctacactttgcatttatttcaagtttaaaatggagaaaattatctcattaccagctaatgactttcagggtttgacaatcttttacctcccccctaccccagcaaatggaaggaagattgactccaggttttatgtttttggtctacaatagaattactcaaaaatttctactcttatatgaaatgtttttttcttaaagacattatatttctttttgtcattgctatatcttggccttaaaattactgtaatgattatcttcaatagctttaagttattcttttcattgaaaatatttggattgggtgcagtggctcatgcctgtaatcccagcactttgggagaccaaggcaggtgggtcacgaggtcaggagttcaagaccagcctggccaagatggtgaaaacccgtctctactaaaaatacaaaaattagccgggtgcggtagcaggtgcctgtcatcccagctacttgggaggctgaggcaggagaatcggttgaacctgggtggcagaggttgcagtgagccaagatcgtgccactgcactccagcctgggtgatagagtgagactctgtctcataaaaaaaaataaaataaaattgtttaactctatccagtattttgggtctgtataacagaaattatttgttgaactctgagtcatcaaaggcttgtatgtcaaccaattactattactatttttcagttttgcatacagtgcttgaagattaaaatgtgtgactttgaatgtggctgtgcgttaaacctcgtgcagtttttccatatgtatgttattgtagaactagtgttaaattagcttactgtccacatttgttcttgtctcttcaatgtttattcaccataaccttggagatgtggagtaatctggagtccatgccagagggtttcctctaagtatacacagatgagataatgcatgtaaaatattgaggactaagccagacacacagtagttgcttgctcatggagcacctacatattcttattattaaatttattcttccccctctatcaccccacctccttttcctctttccattttccatttctgtatttccaattactcataataaaatttatttgaatttcagctaagagttatttcctcccccatttgccaccttcagttgttcattgttgccatgcaactataaaacatgctatctttagtccctgggaaaactgcatatggtttaacaaatcctgtgtttattttctcccaagtatttgcttactggatacatacataatggagagtggggcatagagggaggtgatcagtgtgtgtttcttcagaactcctaatgttacatgttgtaattagaggctatatttgctgggaaaaacaagttagtaaatttatcttatgattcatttatagcttcttataaacaagacaatttcttataaacaagacaatgtcttataaataatattgcttttggcagacaatcatagaatttttaatgactcatacttgactttatagttgatactttaaggttgttgggaataccaaatgctgagtggaaatattgtagattgataatgtgggttgaactctaagcctagatataaattgaagacctaatacttttaattaattgtttttaatttatcttaagtagtaacaaaggttaatcaatgttatccaattatatttactgatatctattatatatataatactatgggagaatctggacaggataccaaagaggaatatggaacatggtttctatcatcaaggacttatcttgctggatttcataatttaccgtatatgaaaaaagtcagtatatatacaaacaaaactttgttgtaaataaagttttttacaatagatgtgtattaggaactcagaaaaatgagagactaggtgggctgatatgccaccgtttctatttacatctctagatccaacctccaaccctctcctctctcctggaggcatctgcagcctgggccatatcagcagagactccattccctctggccttgggcttaattcaatgttgagtctaggtaggtaatccgagggtgggactggaatgaggtcggtaggcacatttgtggaacctgggacaagaatacaaatagagacccagataccataagcctaactatttaaaactgcttgataatcaactgtcaaataatatatgttttatacttctattttggccaatatatcttcatagtgatcggaatggataagtccaaatttaagtgatcggaatggataagtccaaatttagagttctccaattcaatagttccacactggaatatagggatgtgggagaaacaggtctctgcctgaagcgtaccccattctttttctatccagctctgttctgtccttccctaatccccactttaccctggccaaaagctgctccttagccatctctcagacatagggatgctggctacctggaccctggtgaagcctatgcacattctggaggcaggctgggggccacttgggcagggaaatcagggatcctgggtgtgtagaatgtggtctagaaaggagggcatgaattctgggtggccattcccccttgcccttgtgggctccctaccttgggtggtatgcagctaaaggaatgccagagcagaacttctgcccagctctaagggtaatattgggtcaaggtattaatttccccaagtgctttccttctagattgccttggcctacatgtttccttcaagcaaatgtcatagctcctcttaaaatgaactctctctacagaactttttaattcctcatgtctttggatttggggataaaaacagccctgggggccgggcgtggtggctcatgcctgtaatcccagcactttgggaatgcaaggagggttgatcacgaggtcaggagctcgagaccagactgaccaacatggtgaagccctgtctctactaaaaatacaaaaattagctgggcatggtggcgcatgcctgtaatcccaactacttgggaggctgaggcaggagaatcgcttgaacctgggaggcggaggttgcagtgagctgagatcacgccactgcactccagcctgggcaacaagagtaaaactctgtctcaaaaaaaagaaaaaaaagaaaagaaaagaaaaaaagaaacagccccggagtactaatattatgcttactctctgactaccacctgcccagtctctttattaaaccttcaccaaataccttaacttggatgtaccatttgtttcctgtgtgagcatgcccaatacagctggttccttaagtgagattttacagcaaaagtgaattcgacatagccttgaggggaactttcactttctaagtaagaaaaaacagaatttagaaattgaaagggcacaaaagattatagaatccaacctttccaccctatgtcaatacactggcttcttcctttgatattttgacatggctgaaagatattcttctctttgaagtttttcttagtttcacaccttctggtgttctgtcacatgctcgcagatattgataatgaatctgccatgtaccttatgatgattcacttctcttcctacttttctttagtcaaatttctgtgagctctttattcatacaatgcattgtgaagtcattgtgctttcacttgatgggaatgcatcatttgcttagtattataggttttctcttctcttttctcattagtccaagacaaagtaatactatttagtgctatagcaatcataaccatgaaggcaaatttgagccctgaaactctgtggtagtatcctgttttcaaagagttattcagatgaaccagaatatattacattactttttggggaggaggtggtaaaatatgtacattatcttcattgaagtggtttatcactctctctctctctctatatatatatatatatgtcagattttaccaaactgtacacctaattttttaaaaaaagtcagtacaggccaggtgcagtggctcacacctgtaatcccagtactttgggaggctgaagtgggaggattgcttgagcccaggagtttgagaccagcctgggcaacatagggaaatcccatctccacaaaaaatcaaaagaaacagaaaagtccatacaattatgtatcaattacaaatttaaaaatatttaaaaagtcatttgtctttttcattcttgttccgagtaaccagtgctgttttccaatggttaaatgatacaatgtctttattacaccagctcctgagagctgattgtgtacaacattcccaactctgtttagaggtgtcatgtagatagctggaactcagccatggtgaagtatttacacaatgaaaattagcaaaatcgaggctttttcatgaatagctggttaaacgattaccagcccatcactagctgttaacataaataaacaaagactcattgcagtcctataatacatatatatttttgacatggggtctcaggttgaactcaaggttctggactcaaggggatcctctggcctcagcctctcaggtagctaggactacagatgcctgttaccacgcctgacagtccttaattttgtgtgtgtgtgcgtgtgtgtgtctcactctatcacccaggctggagtgcagtggcatgatctcagctcactgcaacctctgcctcccaagctcaggcgatcctcccacctcagcctcctgaatagctgggattacaggcatgcaccaccacacctagctgattttttttttttttttttttggtattcttttgtagagacagggtttcaccactttgcccaggctgctctcgaactcctggactcaggctatcctcccgccttggtctcccaaagtgctgggattacaggcgtgagccaccgtgctgggcctcagtccttagtctatatttgaaaattttattttattttttatttttttgagacagtctcgctccgttgcctaggctggaatgcagtggtgagatctcggctcactgcaacctccacctcccgtgttcaagcgattctcatgcctcatcctccagagtagctgggactacaagcgtgtgccaccacgcaaggctaatttttgtatttttagtagagacagggtttcgctatgttggccaggtcctggcctgcctctgcctctcaaagtgctgggattacaggtgtaagccaccacgccaggcttcagtccttaatttttaactgtgtaaaagaattctgagaccaaaaagtctaagaatcacttggtacagtgattgcttatctatggagcgagaaagtcttactaggggaaaaattaaaaaaaaaaaaaaaaaaagggactttggacttccagacactcgaccctatcaaatcttttgcagattcatactgttgccttcaccaaatgccaccactgccattctcccatgggggtcattgttgacccagtctttcccccaaagaccaagagggtctggggttgaatgatgagcttcttcttaaatttgaagagcccaaaggctgctaggaaggaaggggctgcaacctcccctagcaaacaccaaagatctatcaccttacgtcctatagctacttgtggacaaaaaatggaactttaaggtactgctaggaaaagaatggcatcagatcaagttttccagataatggattccaactccagcaagtgggataagaggttcatgacacaaatatatttgtattaggtgaatcaatcaccaggataccaagatcggttactttcacaaactgctctgaggcaacttaaatacggaaggaacttcagagccagctcttcggctccaggctcctttttaactacttattgtggtgtggaaaatatcagcttgctgaggatttatcatcttaatagagagctccttgggaaggaaaagggtgaaatttaaaaaaaggatcttcattaaagaatagggagttgattatgttgcagaatcgtatcttcttgttttgcgacacgttggaaacataaactttagagctttttcatctccactgcacagaggtctgattgcttctgtttaaaaatggggatctgctgatggatttcagccagcttcttcaggtctatgtctgaatacatgattgtttcttccttgagagccctagcagcaaaggttcactacagtgctgtgtccccaggcaacataggaggctttgtcatcttgggcaggagaatgtggccacatacacctgattatcaagagcctgaagcaattcccagtgggctggtccagtggtcaaactgaaagcccctggataaaccaacagctggcagcctttccgtgtgtagatttgtgcaagctctgcaaaccagtgtcatagcagatgccccgactcattctgcagtaaggagtatcaaatgtggagaaactgttgcctggactcaacattgtggattcttgaaacgtcatttttccaggaacaccagtgttaagcagatggacctttctgtgctttactagtaaagttccatgaggtgcaaacacagcataggtgttatctaatttcccagcatcctcttcagggatggaacctctagtgaggttgtattcctttgctacttcagaaagcttctgtgtggatttaccaggaattttcgctgcatattcaggaaaatattttgtgccatatggagaattaaagcattccaacaaagaaaccattttggctccttgcgttgctgtctcccggacaaggctacaagctcgagtgttgttatctgatttgatgaagaaacttgaagctggatgagggccaagtggaaagttgccctggctctcctgggaagcaacagcagcagcactggctgagtgcaggtgtccctgtattacttttctaagtcacagaaacataaaacaaaaatgttaaagttatcctaaagtttttttttttttttcatctcgctctgttgcccaggctggagtgcagtggcacaatcttggctcactgcaacctccgcctcccgggttcaagcgattctcctgcctcagcctcccgagtagctggaactaccggcatgcgccaccacgcccgggtaatttttgtattttcagtagagacggggtttcaccatgttggccaggctaatctcgaactcctgacctcaggtgatccgcccgcctccacctcccaaagtgctgggattacaggcgtgagccaccgcgccggcctcctaaagaattcttaagactctcctcccccagtacatctgctaaccttaagttgagaaatatggattttcgggactgaattgatgtgagaggtgagggaagaggaaaaatcctgatacgacgactccacaatgtctggtctgggagtgcttggtgatcctattaactgaaatcaggagtaaaaaaaagaaaagatagatgcaggagaaatgatgaggtcagttttgttcagtctcaatttgggtttcctacagtacattccctttctggtagaataagctggagttggagacatttggtagacaacaacgtctgtgaaaccgagaatgttgatgtgaccatacaggaagaacatgcaaagctaagtaagaagggaagtttgtcgaggaaaaactgtcggtgaatgcaactcctggagactagcagttagcaaggagcagggtggggacggggagaggagaggtaaggaagccaaaagaggacaaaatttaagaagaatgaaatgggcaacgcagaccaagtaagataaaaacctaaaagaattacttgtatttggtaattaagatatgatagtgatttcactccactgaaattgcatagtaagtgaaatttcagtagtgtgggggcaaagtctgatcacagtgcttctaagagcagagaagtgaggaaatttcgtagctaataattcaagactgttttgctttgttgtaaaaagcgtagttggaggggactggacttgaaaacaatgcaataaacgcgaggtagggaattgagggaactcacacttcacaccgaatggcctcaattttctttgtactatatgaggcaaggtcctctgtagagactaagaagggcagagctggggcaaatggctttggaggcgtgctgaatgttgggagaggaagcagcccaggaaataggcaaaagggaaactcagaggtgccaaggacccggctgagggggtttatgaatacaacgtagcaccaagctcaaggttatgtgactttctcttccaattctgccctgcagagcgtaagacgcagaaaatgcagacgaaggttgacttctacttaaatccctatccccgaaagtccagacgtacggacccgaaggcctgtggccaaatcatgcgtgggtgcctactacagatttatgaaaagcagagaagggccagcgtgtttgccttctaaggcgtattgttctgtagcgtcggcatcctcaggcgttcacgtaaatagagccattttttacaaggagtagggataaacctggtgataggatgagggactacgtaactttctttctctccagatccatcccgggggaggctgggcgggcgggcggctgctccggtccaggggtggaggtcggggccctgacccgacgcagccaggcggaagcgcggctgccattggaggctgcttttacctgcgcggggcccggggcgcaaagtccgaggcgccggggggaggaggcggcggacggcagcgcaggtgggcccgcgctctcggccctgcaagatgcccctgaagctgcgggggaagaagaaggccaagtccaaggagaccgccgggctggtggagggcgagccgacgggcgcgggcggcgggagcctctcagcgtcccgggctcccgcacgcaggctggtcttccacgcgcagctggcgcacggtagtgccacgggccgagtggagggcttctccagcatccaggagctctacgcccagatcgcgggcgcgtttgaaatctcgccgtcggaggtaaggcgccaggtgctcaggctctcccgcctctccgccgcgccgcgccgcgccgcgcgtatttctgtgggcccaggagggttgagcggcgtttcccggagcgcgaaatccgatgccgtgttgagtccgccgggggcgtcccgggggaaagtgagtgtgccttccctggaagggaaaatttaacttggcaggaccgcagaaagtcacagtcccccttgctccgagatctggcctttgggaagcgggttgagggaggcaacctttcttccgcttgcaaatgtgtttgctccagatgtcccggattccgccggccgttcaaggcgtgagcaccttcccagactcgagatctggcggggcagattaataccctccacttcatctggactttactctcctgtttcctccgcaggcgtgagagtcacgcaggtcatctccctagattaacgggggaaaaaaaaaatagaagtgccttgcaggtgatacccagattaagtgggggggaaaacattgaagagccttccaggtaataccaaacggaggcccactttcccccaatctgtcatttctaacatcagcaccagaaaccctttggtggtatttccaagaagtttaaaaagctgggctgttattccaagagtggataacctagagattcatacttaatcacgtgggactagttaacaaaattttcatgaggaagatcagctcttttacatcgtatccttaaaaagggactgaaatttgctttaattagatttcatgggggcctggaactaagtttgacacaggcatgacctaaagcactagtttatgtgaacgtttatgtgaccactttatttgtgctaacccaagtgaactgcaaaggtaggtgtgaaaagttagctcaacaaaatattttgtccacatttctaggaaaagcatataattttgttgccctggactcagaggagtgcagagagctgtctttgaggcctacagcggcacctggagttctttaattagttgtttatcaggtctgttcaagggaaattgaggtcaaggcaaaattccaagaggagacgaaagagagcttaaagtgtaaccctttgttctttcgaagttcccaggcactaaggggcaaatcgcaaacccatctgtgaattatttgtattgatataggatactaataatacttcacatttatataggattttttttttttcaaaaaacactttcacaggacactttcctttgatctctaggggaggcaggtggcaggttaaatacgataacttggacatggagccaggttctaccctttactagctgtgtggacttgaatgagtttaacttctctcagttttcgccatctgtaaaatagagattagaatatttgtcttgaagagtattgtgaagagtggagtccgtatgtaaacgtatcagattgcatagtttatggttagggcttaatacatggtaactaatatgattaatacctaacagttaaatgaaggactgaagtacaaagtgattggcccttagccaaggtcacatacctagcaaaaaaaaacttgactgtaatttaaacttggatcttctgattcctaagctagtgagcttgttagcatacttaactgacaactttaaatgtctttgctgtaaccagggacttcagttttagttacagatggtcctgggtttatgatagttagacttaagatttttgacttcgccatggatttattaggatgtaacttcctggacttaagatttttccactttatgggtttattggggtattaaatgcatttttgacttatgatatttttgactcacaatggatttattgggacataacaccttggtaagtagaggagcatgtgtattttgcattaacacttctcatcattatatatgacattattctgagctcaaggtacatgattttattcaatctacttaatccctaagaagtaagtattattattaatatccccacttcacagagaggaaacagactttgaggttcagaatttttccagaattacacatagcaagtggcagagcctggatttgaattcagtgtattctttttttttgttttctgtttttcttttcttttttttttaatgagatggggtctcactctgttgcccaggctggactgcagtggtgcgattatagctcactatagcttcaaactcctaggctcaagcaatcctcctgcttcaccctcccaagtagctgggactacaggcatgtgccaccacatctggctaattaaaaaaacttttttttagagatgtggtttttctgtgttgctcagtgtggtttgaaactcctactctcaagtgatcctcctacctcagtctcttgaataacacagacacggagccattgtgcccatcttttttttttcctcccatgaagctatattgttacccaagttttccagagtctcagcaatagcttggtagccacgttcaacattttcagtgcactgacttgcaaggtcagtttccaagataatatacacgagttgttttcatgtgttagatcaaagtttataacattttataacccgggtatatgggtaaaaccccagttttaccatgtttatgcatataaccaacattaatgcaagttttccatctggattagaaaaagttaattatatgcagaataaagtattggtcatcatagcatagtacgcataatatttcagtggttcactctgaaacagaagtaactcactaaaatgaaatgcacaccaaggagattccattttcatagcccatttccccagcaagcaattacctcagcaataatgatgtaaacaactttttttggttggtttttgttttttgagatggtgtcttgttctgtcgcccaggctggagtgcagtggcacgatcttggctgactgaaacctccacctcctgggttcaagtgattgtcctgcctcagcttgcctaatagctgggattatgcaccaccatgcctggctaatttttgtgtttttagtagagacggggtttcaccatgttggccaggctggtcttgaattgatatcctgacctcaggtgatctgcccgcctcggcctcccaaagtgcgtgaaccaccacgcccagccctgtgatgtaaataacttttgagatgtcagtggggacaaaaacatttgccccccttaatgggattgaatagatagttaactcagaagtcctgccttttttctagagtggtggctgtaaggatataaatagcactacatgaagagctagccactctttattgaggagaaagggaaaagacttgatgtcaagtggagcagataatcagggcccataatgtgcccacagctgtgctaggcctgtaagcctacagtgtgttcactccatcctcaccagaatcttttcattttacaatttagtgaagtgagactctgagaagttaaataggctggtatgtggctgagccaggatttgaattctggtttcctggttctaagtctattacatagcagctgtgagattcttggtagctgcattcaaattccaaatacgaacccagaaaaacctctttttttttttttttttttttgagatggagtctagctctgtcgcccaggttgaagtgcaacggtgtgatcgtggctcactgcaacctccgccttctgtgttcaagtgatcctcctgcctcagcctcctgaatagctgggattacaggcacacgccatcatgcctggataatttttgtgtttttgtagagatggggtttcaccatgttggccaggctggtctcaaactcctgacctcaggtgatccgcccacctcggcctcccaaagtgagctgggattaccgacgtgagctactgcacctggccggttccaagtctattacatagcagctgtgagattcttggtagctgcattcaaattctaaacactaacctggaaaaacgtcttttgtaaacaaattttttttttcaataaaagcctcagacttaaccacaaaaatatttattgcctcaaaaagatgttgatgtgagactgacagttgtggacttcagctagtgttttgtggtccctgaaggaataagctaatgaaggctgtgaatcagttaagatttgttattaagttgagacagatggccagttatgcaaaaatccctcatatctgatgccttttttcaaaacaattaaatgaacaattcagtaaaaagaaaaaaaaccctgtaaattaatctcatctaaagaacaattaactcctacataaatgcaaagactcttcttgagaaagtttaatacataccatctttttttttttttcttttttttgtgacgggagtctcgctctgtcgcccaggctggagtgcagtggtgctatctcagctcactacaagctccgcctcctgggttcatgccattgtcctgcctcaacctcctgagtagctaggactacaggtgcctgccaccatgcccggctaattttttgtatttttagtagaggcagggtttcactgtgttagccaggattgtctcgatctcctgaccttgtgatctgcccgcctcagcctcccaaagtgctgagattacaggcgtgagccaccgtgtccggccaatacataccatcttttaaaatatccaggttacatgaaactctcgagctatggtcatacattttgttgaaggggcattttgaatatttgactactgtaattgtttggcaagtagtttttaccatgatatattttcctaattctctattatgtggaaatattgtaggaaaaaataatgaatgtgaaaacttaagaaaagacgtataataaaaaaaagaaccccactttgctcaatacattcattttgtaaaatgtaaaaaaaaaaagaaatgatgtcatcattattgatccttggacattaaaagaataacaaagaaatattattaacaaaaaaaagataagttttatagttagaaattttacatgtccagaaactggaaattcagatgcagtttctctgcagaattcagaaattacttccttttacttgtttagattagtttgcgtgtgatattagataccaaatagttcattgaataataaatgagtaattcagtgacttattctctccccatacataaagcagtcaaagaaagcagagtacttgagaagcagaaaaggcaagaagtgttattcttttttttttgaaatggagtctcactctgttgccaggctggagtgcagtggtgtgatctcggctcactgcaacctctgcctcccgggttcaagtgattctcctgcctcagcctcctgagtagctgggactacaggtgcatgccaccatgcccagctaatttttgtatttttagtagagacggggttttgccatgttggcctgtcttgaactcctgacctcaggtgatctgcctgcctcggcctcccaaagtgctaggattacaggcatgagccaccgcacctggcgtagaattgtgatttttaaggtgagattttatcctcacaagcatgctgttatttctcttaaacagacaaaccttcttttgacacctgttcccatcccctgtattaccacctcatttctcctttttagcaaaactcttcaaaagttgctgtctctgagatacaatttgtatctcattttctgctctaaacctttcatggcttcccctctcacttggaacaaaccaaaatactatgatgggctacgggctctgttacctcttcagaatcgttgttccttctgctccagccagactggtctccttgaatgctggagccttaagacttttgcattggtttttgcctccgccagaacctcttcctacagaatgcccttccttaagtctgttcaaatgtcatcttcttggtgaggctagcactgatcatctctaggtgcaacactccctgttcccttctctgcttaatttttctccgtagcatactatcctatgtatatttaacttattttgtttatggtctgcccccttgccccaatagaagctccacaaaggcaaggatttttgtctttgtttactgatgtggccctcaagggcctagactttgcctgaaacatattatagttggagtttaaaaaatagttgttgaataaaaggatcctcaccaattcagtagttaaaacctagtgtctttagcataaagctttagtattgattacaatactaatatcttatgtaggtgttaattttttttatgttctgctatgaggaaagagactagcctttaggtgggggtagtgaggaacatcactcatatctttaaaattttttgaaaataaatgtatatatttaaggtatacaacacgatgttttgatataaatagtgaaataattattacagtcaagctaattaatatatccatcttagaaactatgaaatttgaggctctgtttgcaagcatagtcacttcctaaatgagttacagcatatgaggagctgcttcctgaggcttcccagaagctgcttccttttctcaacttgctgacactagcactgagctcttttgaaagtcaatattctgtatttatgtggtacttctagaagacatgaaatgttctgcagactttatcatttcccagcagtgcaaataactggcaagtggaactgttatctttctggttcacaaatgggaaactaggacgaatagagaaaatagggttttactgatttgcatatagcaccccctgccctggaaaaacaagttacaaaaatctacaaaaaatgaaagaattgggaattgggtgtgaatattactattgaggtctgaggaatatgaagtaagcccgtcaaaattgagtagaaaaagtgtgagaagcagtccctgacatctggtaggggccttggcacttgcaggaaggccttggcattctgttgcacataaacaattgcacagcatgtcaacagcagataagactgctctgactgtggtaatttctcctaccttacagataggtttactaagattcctggtcatagaattgcacccatttcctgacagcaccctatccagaacaaacccatgctttggaccctctcccaaatcacctaacacaagcccaaatcctttgtaatgtctctttctgaaacccccaggatttcccatagagtgctgtcaccctcctcacaaggagcaataaactgcaggtgagaatccctggtggtctttgcctggaaggtgttggcagttgtcacttgtcactgttgggttattacaatgcagattctaaagaggcagcctgaatttggtttccctgactccactcatcctcttttagtattttaatgctgtgatcataccagtctaatcttagcactttggaaggctgagaagggagaatccttgaagccaggagtttgattgacaacagcctgggcaacatagtggtaccctgcctcttaaaaaaaaaaaaaaaaaaaagccaaaaaaaaaaaaattagccagaggtggtggtacgtacctgtagtcccagtattcaggaggctgaggtgggaggatcactcaagccggagtttgaggctgcagtgagctatgattgtgctgctacactccagcctgggcaacagagcaagactgtctaaacaaacaaaaacctgcaaggggctcctcattacttacaaaccaattactaccagccaaacaatgtctcatattcctgtctgcctcttgagtcctctcctatgcccactgttccaatctcacttcttaataatcccctttacattcaacaatatttaactgtttcattccattgtgctttttctcatgctgttctttgttccagtaactcctactcacttttctagtcctgtaatttcctccaagaagcctaccctgtgaatccagaaatctggatacctgctattgcatgatttttaacatagcatttgcacataagattgaatttagttactcctctgtttcttcctgagggctgggacttttttcctttttaaatcttgttcttagatggttagctagatggtttagctgctccttaaaagtttactaaataaaagtagataatggatatagtaggagagaaagctgaggatatagatagtagtaagactacaaatgtccttgaagttgtatggattttattctgtaggcaatgagaataactcagatctttttcggaagaagcaaggatccctgacacatattttacaaagtagaagcacactcaaccattcattctctgtattttctttctaaataatattcagtttaaatggaatataatggtattttctggatttacatcataccatctgagaagttataaatatatcacagtcattatgtaggcttgatatcccctcctgagcaccagcctcatttttatatgaaaaattcaggcaagaaaaacatgactcattttgagaagtgggaggagaatccaaccagctgccttatagacctcattgctgtcaggagggtatgaaatggataagactgctgttgtgctagaagtaccctgaagaagatatctgaacaaccctaaaataaagtttacacccttgggcaggggtagactcctcttcaaaccctggctacctgtaggttaatagccagccccttcacattctcccacctgcaatcaccaacccagctaccctgagtggagtggaaggctcttgcaggttatcttgggcaatttgtatgtatgtatatgtctgtctggctgctgtaacagactatcaaaaactgagttgcttctaaacaacaaaaatttattgactgggaagtcctagattgatgtgccggccatgtggtatcttgtgggagcccacttcctggttcatagacagccatcttgttgcatcctcatgtaacagaaggggaaagggagctctctctagggcctcttctatgcaggcactaatcctattcctgaaggcttgaccctcatgacccagtcacctcccaaagaccccacctccaaataccgtcacctggtaggaggtgggggattaggcttggggacacacacatgttcagtccatataaatatttatattaaaatgtatagggaggtaaggaagcttaggacagcttctgcagctgcacagtcaggttccatggacagttggaacgttgctcattctgttcaggttaaagcagtagctttatactgtagagaactgagagcaagtctagttgtccttaaccttccatctcagcctctctctctccctgcttattctacttttgactgattctttcttctcatcctcttgactttgctcctcccattattacctcaccccactgtgtctttgtgtttctttacctctctactttctgtgccctgcctgtgtatcttattaaacttcctaagaaagagtctttgttgtgtcagggtacagcacaggtgggacaggacccttgggcctgtgggtcaggttcatctctgctccagcctacagggtcatgtggtacagaggtaggtgagcagtggataaggagtcctgcaggagagagctatgcacatggtagatattctgagacatcttgatttaggggaacgtaaatggcagacaccttccatggcctgtttagaaaacgaaagtattttccgttctctatgacctttatgcattgttctctttatctggaaatctctcccctactctttccctgttaactcctacttgtgctgcaggacttgcaggtcattacctgaagcctccccactacctcaggactgggttctgtgcctatcctctaaacttccataactcttatcagactttatggtcatcattgctttaatgtctgtctcttccataagattgagagccactctgggcaaagactggcagttagtatgcagtaaaacttatggctgggcatggtggctcacgcctgtaatcccagaagtttgggaggctgaggcaggaggatcacttgagctcaggagttcttgaccacctgggcaacatggtgaaaccccgtctccacaaaaaatacaaacaaattagctgggaatggtggtgtgagcctgtagtcccacctactcgggaggctgaggtgggagtatggcttgagtctgggaggtggaggttgcagtgagctgagattgcaccagtgtactccagcctgggcgacaaaagccctgtctcaaaaaaacaaaagaaaaaattattacagaaattttaaatacatgcaaaatcaaggaaatagtgtaattaactccatgtgcccagcttcgacaattgtcaacatttgccaacatttcttttcttccctcattaacaaaatttttattaaatataacacaagtagagaaaagcacataaaacaaatgtgtaaattaatggataaattgaacacctttgtaaccacacctgtgtcaggagatagactttatcagcctcctgagaaccttccatgtgccccttcccacttgcacccaagagtaacaaccatcctgactttcatggtaatgaatcccattatatagttttttcatttatgtgctttcctaaacaccataatttggacttcttttaaatatgtttttgagtcttttttaatctatagattccccttcgtcttgttctctttccagtgtatttgttgaagcagccagatcttttaccctgtgtgtttcacagtttgttttttgctgattgcattcctgtagtctagtttggcatccccagtcactgtatttcctataaattaatagttgtagtctaggtttaatcagttggggtttgatttttttcccgatgagacaatatcaaaagtgtagttaaaattttatattgaatgaataaaatcaacagataaaataggggtcttaccttttaaaatgtcatcagttctattctactggaatagactccatcccattttgaaaagtctctcctatgttttttatttcagttgtctgtacggtgaagcaactgtgtttttctataaccctctgaatgtatggctgggactatctgtgagcccttcatccctaagaaaccctctcagctataccctcagcagagccagatgtgcttttcctacatctgaatgctggcagaatttttctgatgcataattgtacatatttatgggatatgtgtgagattttgatataggcatgcaatatgtaatgatcaagtcagggaatttagaattactggtggaattttaatttttcaaaagaaatcactgtggagatatttcttcctgttatgtgtataaagaaccaaatacagggaagaaagaactaaaaaccctgtaataaaaggtgtgtaccatgtcaaaaaagtttactttgatcatttgtacatgttatgaatttatagctggaaagagtgattataatacagttttaaaatggaaggtagataatttaggcatgttcaatcttattcttcattagaaaacttattggttattggctttgtgccagtcactgccccaaatgttgggatacatcaatgaataaaacagacaataatccttggccacatggagcttacattctagtcctccatcctatgagatgggtacttcttgagtcaatgagactgaatgcaatagacattgttgggttattctctgaactcttataaattataggttttctttttatacccacatttcttgccttaaggacctagaaaaaaggacctagaagcttttgctaagcaagaggaaaacataagtatgtttatactttttgctggaaaatgttccatcatttatatggccactcttaatacctcctctgtgccatatactcttaaacctcccttctgtttggaagcatggaattatagtatagcttagtggttaggagtgccgcttactatctctgagaccttgggcaagttattggctgctctttgtttctgttcctcatctgttaagtggggttaatgatacttgtcatcacaaaaggttgtcgtgaggggtacatgaaaaatcatgtatgtaagatctgtgcctggcacatagtaggtattttttaaatggtagttataattgtagagttggaagagtctttattgtattctaacttttgaacttgtttaccaaatagacaaccatctttagttacttttaactgatttttttttaattgaaggattcactcagagcgcttattaggagttcagcattgtgcttgatgctgggaacttaaaggtgaagatgacatagccccatcctccagtggagtgtggttcaatgacaaacaatttgacaagctagtgtgggtttcctaaaatgtgttccaagcaacatgaatcccttgacatattatagaaaaaatgcctccagttgtcaaataactttgggaactgtattttgtaaattcatgatacatattaatggctttgagaagtccactaaaaatttaaatatccaagaatcttggtgtttattattcccttcacttatttgagtatcgtgctctcccttttttcctgcataacaaacactccgtggaccaatattccaagatatatacttcaaaaaaatgctggtatgttttttcaaaaatgattcatcagttattctgtgataaaaagggactctatggtaactcataacgttctgttatagtgaatgcccatttagcaccaaagaactctgccaaatagcttccatttcatccttgtcctttactgatcgttttgctgccctgtcctcctcactatccaactttgggcaagtcttccctcttgttggggtgggtgaactacaccagtggttcccaaagccagttgcctcttagaatcaccttggtgacctttttaaagaacacaggcttctgggcttcacccctacagattttgactagggcctgagaatgttgtcattttaaaaaagcttccctgatatacttaggtggctggcctgtcatccattggtagattgtgtgtttgggagccactgaattaaatgaagagatccaaggtcttttctagcttgaatgttcctccagagcttgtgcattcaattaaaaatattccagtgtcatctttatgtacaaagtattgagggacatacaatgatgactatgacagtgttttgcaagtggcttgactatagaaatccttgaaatggtagagaccctggtgtatctaaagtcatttaggctgggtgcagtggcacatacatgcctgtaatccaagtactttgggaggccaaggtcagcggatcacttgagttcagggattcaagaccagcctgggcaacatggtgaaatcccctctctacaaaaaatacaaaaatgagtaaggcatggtgatgtgtgcctctagttccagctgtagtcccaagttgaagcttggataggactcgggaggcagaggcaagaggattgcttgagcccagggaggttgaggctgcagtgagccatgatcgtgccactgccctccagcctgggtaacaagagtgagaaaaaacaaaaaacaataacaaaaagaaaaaaagaaaaaataaataaagtcatttagagatcacttcttgttagagacgtgctagacagagaatttaaaactgaagtgccaatagcactctgtgaattagagattaaaaaatgaagatgtagtatttttgaacttaatgaggacttttggaaaatagaattctatgaatataattcagtaaggcatagtagtataaacttgacataagaatttttttagaagctgaagcatattttctgcttttctgacatcaaatgtaatgtttggaaatttgggatggtgatatcacacaaattcttttatagttgtttcaaagctttataggtaaaggatataggtgggctgtaatcaattcgtaagatctattcctaatctaacctgtttcatctctcttttttttttttgagacccacagtgatcatcacttactgaagcctcaacctcctaggctcaagtgatcctcccacctcagcctcccaagtaactaggattataggtgtgcaccaccatgtgtggctagtttttgtatttttagtagagatggggttttgccatgttgcctaggctggtctcaaactcctgagctcaagcaattctcctgcctcagcctcccaaagtactgggattataggtgtgtaccactgcagccgaccgaccctctttcatctcttgattttatctcagtgttaactgcaacctacctctcaagtcctcctcttcccattaacctgttggctctcagttaatgagggcatccataatgtttgaccagaggctgccaaaggaaagtgatctcttgcttttgtgctgcattcatttactgaagttactagcagaaattactctctataaagctgaagtccactgtggagctacacagtaaatgattattttagttgaaaaagtaaggtatataaattgaatttttacatggtaaacatccaaaagatgtgggccacccagaaccatctattgtaaccactttctttactgtccttccagaaaaatactctataaatgtgtgtgtgtgtatatagatagatagatagataggtagatagataaacattcatatctgtgtggggggtatatccccccactttatcttcttttttttttttaactcaattaagagcatattgtattctgttctgtatggttggtagtgggagaagaacaggagtagccctaagaaagaaatgctgaggcctgggaatggcagtcactgtatccttgcagtgtctcatagggccaccagggagtccttgtgcaaggagagctgccactgtgtctttaatggtgattagacaaattttaataatttctaagaagtctacctgtttcctgaaagggtttcctgtgctgcctttgtttccctgtgtcttcttggtgtaaacccccatcacctgatataaccaaacgtgttccttgacactgcttattcagagagaagtaactaacaaacacctttgggctagttgctcacttagacaaagaaaagaggaagccaattgaaggtggacggctctgtcactgcttgtctgaattgggatccaagaaactggccttcattactcatctcagaaactctagccctgctgtttggggtgtgtggagtattctgaggtttgggtgattaaaatgtggagtgggaagttgaagggacttagagctttgtcagtggtagaatggtttttttttgtttgttttttttttgttttgtttttgcgatggagtttccttctgtcgcccaggctggggtgcagtggtgcgatctgggctcactgcaacctctgcttccagggttcaagtgattctcctgtttcagcctcctgagtagctgggactacaggcgtgagccaccaagcccagctaatttataatgaagtgttctttacactaattttaaacaggccccagtttcaagtgattttcctgcctcagcctcctgaggagctgggattataggcgcacaccaccatgcccggctaatttttgtatttttagtagagatagggttttgccatgttggccaggctggtcttgaactcctgacctcaggttatctgcctgcctcggcctcccaaagtgctgagattacaggcatgagccactgtgcccagcctgaatgtttgctttttagaaacatatttgaccctctgtaggtggtgtggctaagaggcttaagaactcaagcattcagaatgtgtatttgctatgtgtataaaaatctccctggagataaatcaaagcacatggagagggatgactaaaatccaggctctacatctcagtctataaaagtcacaggttcttaagttacagtgttaaagtagccttaaagggatacacagtaacaaagttgaggaaatgataactgtgtatctattcttaaaacagtttacatatccatatatttcattaatgtagtagtggttgtataattggcgttaacactatgtccctcatgatccagggccagaaccttaatttaaccacctgaagcttctcacatttgatactagcagtgtgttctgggtgtggttgggtattaggtgctggtcatgattcctgttatttccttccttcttctgtgttctctgtgctttccccttcctttctccattttcctgcctgtatgtaaaagtgggtggaggaagggaagcatttcttaagaattgaggagaagggaattactgtgttttttctttttctttttttttttttttaatttgagagggggtctcagtctgtcacccagactggagtgcagtggcaccatcttggcccactgtaacctccacctcccaggcttaagtgatcctgtcacctcagcctcctaagtagccgggaccacaggcgtgccacagtgcccagctaatttttttttttttgtatttttggtagagatggggtttcatcatgtggcccaggctggtctcgaactcctgagctcaggtggtccacccacccaaagtgctgggattacattcatgagccatcgtgcctggccaaggaattattgttgaacacctattaccacttaacctatgctatcttaacggaaatggtaattcttgctagaaccaccagaaattattacaatctatagaagaagcaactggagcttagagtaaaagtaaattactcaagtttcacagcccagagggatatctttgacttgaggtctatctgacgtcaaagtctgtattctttcctttacgtaagtgattcttaaccttagcagacccaaaggcttcctctaataacaaatattttgtgataccgtctttactttcctgaaataggattttaaacaatgttttctacctatacgcataattgattccttaactctaatattagaaacaaacttggattttaatatccaagtatttggaaaagttatcttaaaaggcatcaagcagctgggtgcagtggctcatgcctgtaatcccagcactttgggaggccgagacgggcaggggtcaggagttcgcgaccagcctggtcaacatggtgaaaccccgtctctacaaaaaatacaaaaattagctaggtgtggtggcatgcatctgtaatcctagctactcgggaggctgaggcaggagaattgcttgaacctgggaaatggaggttgcagtgagcctagattgtgccattacactccagcctgggccacaagagctaaactccatctcaaaaaaacaaacaaaaaaaaaaccaaaacaaaaaacatgaagcagttgcttgtatctacttgtagtgaatacatttggatttgaaaagagtaagaataagatgagattcaggttgggtgcagtggctcatgcctgtaatcccagcactttgggaggctgaggcgggcagatcacttgaggtcaggggttcgaaaccagcctggccaacatggtgaaacccatctctactaaaaatacaaaaatttgccgggtgtggtggtgcatgcctgtatttccagctactcagctactcaggaggctgagacaggagaatcgcttgaacctgggaggtggaggttgcagtgagctgagattgtgccgctgcactccagcctgggtgacagagcaagactctgtctcaaaaagacaaaaaaaaaaaaaaaaaaagatgggattcaattgattgtttttgtctctttttcctcatattcaacattttaaaataagagatattaatgtttgtaaatgctcatagaattgccatagtgcaacaacaggagcagactgatataaatgttttatgttacaaatccaaataacatgggcagcattgctgtcaatgacttgattttctgaaacgataaataactcttggtaaggcactgcataaaaaagtacagtcttcccttgatttacatggtaattgcagcccatagaaattcagaataaaaaatacgctgtgtgtaacacagaattaggggctaggcttaaatagttgatagtttccccccatccttccagcatgaatgtctaataggacatttgagcatcatgtggaatacaaagcagttcttcatgaagctgggcttctcaagcattgcaattcaaacagaatccttgacccatgccctgcttccctcaaatgccagtggtgccatacaatcattttaacaatcaaagagaccccttgatatttccacctgtttccttagaggccagtattggctgtcacctccagcaatactgttttatacttggttgctagaggttaagtaattgtcctacactgtgaagttagaagatgataaaaagggaggtgcgggagtgagtggggatgggaaacaataagagggcgaacaaggagaaagacgtcctgttggttttgtacttttagttttaggatccatctttttaaaaatgttttttagagagagggtcttgttctgtcacccaggttggagtgcagtggtacaatcataactcatgcaacctttttttttttttttttttgagatggagtctcactttgttgcccaagctggagtgtggtggcacaatcttggctcactgcaatctctgcctccctggttaaagcgattctcttgcctcagcctcccaagcagctgggattacaggcacatgccagtacccttggctaacttttttgtatttttgtagagacagggttttactatgttggccaggctggtctcaaactcctgacctcaagtaatctgcctgccttggcctcccaaagtgctgggattataggtgtgagccactgtgcccggccctcactgaaactttgaactcctaaactcatgtgatcttctcgcctcagcccctgagtagctaggactatagacaaaagccaccacacccagctaatttaaaaaattttttgtagaggtaggatctcattatgttgcccagggttagtcttacaggactgtaattaaaagagtagaacatgtgtttggcttgttaaatttgtgatattcttcctatgcactgacaatggtcaagctgagaaccaaatcaggaatgcaatttcattcacaattaccacatgaaaaaaaaaatacccaggaatacggctaaccagggaggtgaaagatctctacaaggagaactatggaacactgcccaaagaaatcagagatatcactaacaaatggaaataggaagaatcaatatcattaaaatggccatattgcccaaagcattttatagattcagtgctatccctattaaactaccaaggacattcttcacagaattaaaaaaaaaaaactgttttaaaattcatatggaaagacaaaagagcctgaatagccaaggcaattctaagtgaaaagaacaaagttggagacgtcatgttatctgagttcaaaatatactatagggctatagtaaccaaaataacttggtcctggtacaacaatagatatatagaccaatggaacaaaaaagagaacccagaagtaaggctgcatgcctacaattatctggtccttgacatacctgacaaaaacaatagggaaaggattccctattcaataaatggtgctgggatgactggctagccatatgcagaagattaaagctggaccttttccttacaccatatacaaaaattaaatcaagatggattaaagactttaacaaaatccaaaattataaaagccctggaagacaacctaggcagtaccattctggacataggaatgggcaaagatttcatgatgaagacatcaaaagcaattgcaagaaaaagcaaaaattgacaaatgggatctaattaagctaaaaagcttctgcacagcaaagaaaactatcagcagagtaaacagacaacctagagaattggagaaaatatttgcaaactaggcatctgaaaaaggtctaatatacagcatctataaggaaagttacaagaaaaaaaacccaactccattaaaaagtgggcaaagaacatgaacagacacttttcaaaagcagacatacatgtgaccaacagtcatattaaaaaaagcttaacatcactgatcattagaaaatgcaagtcaaaaccacagtgatataccgtctcatacaagtcagaatagttattattaaaaagtcaaaaaataacagatgctggtaagattgcagagaaaaaggaacatttaaacactgttggtgggagtgtaaattagttcaaccattgtggaagacagggtggtgattcctcaaagacctaaaagtagacataccatttgacccagcaatcccattactggatatatacccaaaggaatatagatcattttactgtagagacccgtgcacatgtatgttcattgcagcactattcacaatagcaaagacatggattcaacctaaatgcctatcagtagtagactggaaaagaaaatgtggtccatatacaccatggaatgctatgcagccataaaaagaacaaaatcatgccctttgcaggaatgtggatggagctggaggttattatccttagcaaactaatgcagaaacagaaaaccacatactgcgtattagcacttataagtggaagtgaaatgatgagaatgcatggacacatagaaagaagcaacagacactggggcctagtggagggtggaggatgggaggagggagaagatcagggagaataactagtgggtactaggcttaatacctgggtgatgaaataatctgtacaacaaactcccatgacacaagtttatctgtacaacctgcacatgtaccccgaactttaaatgaaaaaaatcatgtaaaattgagtagcgattttagaaaaatttgtgatgtctcaatcttttgtaatatcttgaagtgtcacctgttgctgtggctatttgacaggtttatagagtcctatagcaggtgcaaaagttagggtggaatgatagggaagcatagggtttgagatcagatggggaggagggtttcagggtagggtggcctgtcctgggtttgattcctgtagatgacaccttctagccattttctcactaataaaatgtacaatgaattaccttataggtctgttgtgagaattaaatgaaatagcatgttaggtgtccagaacaatggtacaatggttcaataaatgttactcctgttttcctcaaaaaagatgctggatgacacttatttttgcaaatttttcttttctttttcttttctttcttttttttgagatggaatcttgctctgttacccaggctgaagtgtagtgtcgtggtctcagctcaatgcaacctccgcctccctagttcaagcgattctcccacctcagcccctgcgactagctgggattacaggtgcccacgaccatgcccggctaatttttgtattattagtagagacagggtttcaccatgttggccatggtggtcttgatctcctgaccttgtgatccatctgccttagcctcccaaagtgctgggattataggcgtgagccactgcacctcgcctcaaatttttcttataatttttctattctagaccaggtacagttttcattctcccaccctttgcctacatccagaaaataagaacaaatttaatgtctatctctgtagatggtcctcagtctaaactacctgtttggattctgttatagtaactaacccggactctctgtggatggtccttagtctaaactacctgcatggattattttatagtaactagcccggactcttctgatgagggctctttcaatcaaatttagtataaacctaataagcaatttcagtcaactaagttgaacatttcagttaaacttgggcaataatacaatttattcagaattgttttgtattgcatttgtcaatgcttattcttctaagccaaaaaaaaaaccttttagtaatacatgtagttcttcatgtcgtatttctaggcatagagagtacctgtgacagaatttgtttcagcatataattctgttattctacttctttcccccactgaacatttagagttaatatccaactctccccatactcattaagtctcctagaatcttggtcattatgctcaagttgtggggacttgtattttctcccaagaagcccaggattggggcatgtggggaagattacttcaataccaagggatagaagaactctaccactgcctttcctcaacatccaaatcacatgactttccttttatcccatgctgtcttagtctcagcatcttgaagtgggagcattcttatttgatcagcttaatataaacaggttagtgtaaaattgatatttcaaaccaacccagatgcttcagagagtgaaagagatagtatctataattactctggaacaacagggataaactgggacctagagttatcccagttataaccaaactgcttgctagaaaaggagaaagaagaaaaatatgatgtgagaaagtttatcatataattattaattgccaacaatatataagccattttcctggggaataaggaaggttttgcattataggcattttttggaaggctagggagagggagtatgtgtgctcataaaaatagaagcaggtagcaagggctcagtgtcagcacccagactggagccaggagactggtactcctcatcctggctctggcttggtgacacattcctgggagttgaggatggagtcctgtggtagcctgtcagcttcttcagctcctgcccctgcttggtcttctccctctcttttctaagtgctctgcctcccctagcaccgggagtcttgcaggcaggaatggcggtaatgttggcaagcagagagttggaagaaactgcttggtgagagtagggaacaggttgctgataatcaacaactccgagcaaaggtcagtcagccagggcagtgcctgggtatctccaagtctgtgacagaattctgttcttggctgctcttcaccctttcccattctcagtttcctgggcttattctatccctggggcaggagatggttcaaaattgaaaagcctgaacctagaagaatcctcacatacactccagattgagggctaacctcacttgtggattcagtcctgtcaggcccacccataggtgaattttcttatgctctcaaacttcctgatgaaacatataagtgtgtgaggtggtcagtgaatttgccttcacccttttctcccagatcatttggctccctcatctagggaaccctgtagtacttttttttttttttttttttgagacagagtctctatctcccaggctggagtgcagtggtacaatcttggcttactgcaacctctgcctcccaggttcaagtgattctcatacctcagcctcctgagtagctgggattacaggcacctgccaccacacctggctaatttttgtatttttagtagacacgggctttcaccacgttggccaggctggtcttgaactcctgacctcaggtcatctgcctgcctcagcctcccaaaatgctgggattacaggcatgagccaccgcacctgacccctgtagtacatttttatgatgacttttaggtgttttagtttagaagaaacatctttctctctcaagatgtttgatattttctcaggtggcccatattttccccatagagtgctcatctctttctgtcagaattcctgttgtagggtgtagtaaggaatagactgtcttcccccatcactccctctgacacctgaatggctcaccatgcttactttccaattttccatgattcatttgggtggtttttaaatatcacactctcttcagacatttcattgtaggggttagaattcagcctcgtgggccaaaaggaacacagtgctctacgaacttctgccaaacaaattttaaagttttgtttaaggatccttttgaggtctaatggcaatcttttacaagttatatttgtatatttggtaatttggaacgtttaatccacaaatctctttactaataattataatgtataattatgatgttttataaaccatcctattccagcatataaaatgtcccctgttatagtctctctttgcctgtttagaatctcttccatctttaatgttaaacaagaggaggcttttaagaagataagtggttcagaaagcatggaaaatttaacagcacctgacgggggaaatagcagtgatttatgatgtctttcaaattggcatgcaatgttgcagcattattagactaggataagctcaggtatctcctctgagtgtaaaaagattgtgggagaggatgatatatatatatatatatggctatatgcatttgatttattttattcgttggtttagtatttgtgtaatgtccacaaaggcaagacttacacctattccaattctttatccttttcttatgtctcaaggattgctttgggattttgattttcttggatacacagttccctttattatatttcattagtaaagaaagtgttcttttggttatgctgggaagtcatttggtagattcaaaatatgaatctgactgtttttctttttttggatagaattcttatttgtcatattattttactcattagtaatactgaaaaaagtagttctactggagaagagcacaaagagtgatgattcaccttttatttaaggcttgccactgctgacccagggcagctaatttagaagtgaatcatttatagaaagttctacacagttcaggacagagctttatacaatatactcatgaaggtctaaatagagcatacggtatcaggtttctaaatatctgtcttgtcgccaattttatgtcttttccagcctgtgaaacttgtttctagatgactgtagctattgacaagatgaagtcaaaggcactgtatatatataatgatgcatattttaaaactaatcctagaaatttagtacatgcattatactgggaaaataataggctgagattttaaattactgtgtttataatacaaagaaacaaatgtaactagtcatttttaaaactagttggaataaattttaaaatcatttataataatttaaattaaataatgttattgctattttgatatttatgtttggcttttaaagtctaattataaatagttatattatgcaaactgtcttactccttttagaaagtgaggggtttattaaatgaacacaatatatttggttccatacagagtataaaactgtatagtctcttctagaaggtttttttttttgctcctcctcctcttcttcctcttcctctccttctttctcctcctcctccttccttctccttcttcttcttcttttttcttcttcttctttcttcttcttttgtttcttcttcttctttttttttttctttaagaaaagaagaggtcccactgagttgcccaggctgtctcgaactcctgagcgcaagtgatcctcctaccttggctgggactataggtgtgtgctgtcacgcctgtcttctaaaagttttaaattcaaagctgtgtttatatttacatcacagctacagtatcatgggttagaaaaagcccgaattctagttctgactttgtcattcgctagctgtgtgaccctacacaaatcacttaacatgtctgagctggttttcttttctgcacagggcatattgatacttgtcttcaagacctgactcacaaggatttagttcagctaacgcattaggaagtgaccagtaacttagatgtccccacacagataatagttgtcagagaggcattgccgggaaaacaccctggagttggacaaccagggttggagttccaactgcaccaattactatatatgtgaccctacacaagccattttctcctctaaacctttgttttctaatctataaaaaaatggtattatgatacatctcacataaaattgttgttgataattaaatgaggtaacatatgaaagtagctggtacattaatcagtgtttcttggaccttaatgttgattttgaaaaaagtccttgctgaccttcctctccccagctcatttactttcacgatacagcatttcactggaagtgggagccagtatccaaactgtgtacaaataagagagatgagcagtttcccagtctatgcatataattgaagactagtttgagttctagaagttccttgatatgacacatttaccaaatattttgggggcaattatgtagcataagacactcagctttttggaagagttttgagcaatgtgattctgtccctgtggcttaggtagagctgatcctttcttttcaagcacttagggtacatgactatttttttttctcccccataattattttattcttagtttcaggttgtttttaattcctataactttaaggacagtaatttagatggaggtcaaataattattattttttctctttgaagaaaagtctttgagacttagataataagaacaacccagataaaaccttagtcactaacaaaggaaccataatccaggtggttttcttatgtataaatatgtggtactaactcctgaggaaagtatggtttcttttctctcttattattatttttgagacagagccttgctctgtcgcccaggctggaatgcagtggcatgatcttggctcactgcaagctctgcctcccgggttcatgtcattctcctgtctcagcctcccgagtagctgggactacaggcgcccaccaccacgcccagctaatttttttttttgcatttttagtagagacggggtttcactgtattagccaggatggtctcgatctcctgaccttgtgatccgcctgcctcggcctcccaaagtgttaggatcacaggcatgagccaccatgcccggcctttttttttttttgagacagagtatcactctgttgcccaggctggagtacagtggcccgatctcagctcactgcaacctctacctcctgggttcaagcagttctcctgcttcagcctcctgagtagctgggactacaggtgcacgccaccacacctgcctaatttttaaatttttagtagagacggggtttcaccatgttggccaggctggtctcgaactcctgacctcaaatgatccacccatctcagactcccaaagtgctgggatttcaggtgtgagccattgcacccagactttctctttattttctataatgacattggctgatatttctataatgtttatttgagatacagtataaaaaagtaagcaaaattttgggggtagattgagatgtaggagggtagtcatataaaaataataatactgcttatgtttaaaatcacatatacaaataatgtaactctagctgcataagcccataatttgttccagagatctttggaacatgtagaatctttggccagctcagttcctgtttaaggaaggcattcaacaaaagaaagttggaagtggacttcctggcgttttaaacatgaatttgatgtgttttgggagagatttgttaacctgtttgtggaccagaatatcttttgaaacactaatgacaaataatttatttaatgctattcacaaagcacattgtggagtatataatggtgccaccagagaaaaagcaatattaattgatattaatggctctgtgcgatagttcaaacttttatcttcctagccatattgagtttcaatgatgaataatcataaccatgtggtaagaatttgaaaatactgaggaaagtagcaatttaatataaatgcacagcaagaaaactgtctgcaagttattcttcaacaacaacaaaagttgaaggatagtttttttatgaggagaaatgcaatctatcctggttatgatattaaaaaggagcaaaatctgatacttcaggaaagttcatgcactttaagaagctttcaagcataagtataaatatcattgttcatgaagccctgtattccagtaataataataaaaacctttaaattgagcctttttatttatttacttattttttagagataggatcttgctttgtcactcaggctagagtgtagtagcacatagcacatagctcactgcagtcttgaactcttgggttcaagcaatattcctgcctcagtcctaagtagttgagactacaggcatgtgtcagataattatttttttattttattttaagaggtgtagtctcgctgaggcgactaggctggtcttgaactcctgaccttaagcgatcctcccacttcagcctcctgagagctttttagtttaaaaagtatatttatacacttactgaatttttgtaatgaccatttgatgtagaccaaactttaataatgccacaatttacgtgaggatcaaggaggccaaatgactcaactaaaccccctgagactgaagggtacataattgaaactagatccagaactcttaactcttaatccattattttcatctcttacgtttctttttctcttctttctatttaacacattacaagaatgagactattccagtctatcgatttatttattttactgatattggaagtaaggaggagagattgtctgaaatttttgttaggggtgatagaatatgaaattaggatgccataatacctcagcgtattaaaagaaacacaattcaccatgtactttagatattttttaaaggataaaatgagatggtaggcagaaagaacttttaaactatgaagaattataaagatacaaggcataatgattctatcagttaggaaccttttagttgaaagtaacagaaaatccaacccaggatggcttggtgaaatttattgactcacgtaactaaacattctgggataggactgtgtatcagacagcgtgttttcagctgcaagtaacagaaaactacttactcaaactggctaaaccaagataacttaacttattattttacataaaagagagctgtgtgtggtggcttgtgcctgtaatcccagcgcttttggaggccaagcaggaggatcgcttaggcccacaagtttgagactagcctgggcaacatggtgagaccatgtctctatgaaaaataaaaaaattagctgtgtttggtagtatgtgcctgtggtcccagctactagggaggctgaggcaggaggatcacttgagcctggggggttgaggctgcagtaaaccatgatcacactactgtgttccaaccttgatgacagagtgagaccctgtctcaaaataaataagaggtagagtgggctccaaattggttaactgagcaactcaccgatgtcaccaaggacttaggtttatttcttctttttgctttgccattcttggcattggtgtctttctcagctggcaggaagatggtggtagaaattcctagaccacacacagataaggcaaaatacagaggaagaaagggactgtctctttctgtgtttctttattaggcgtgaaaaaatattttccagagcttcctggacatcttcctcctatatcttataagctggcattgggccacatgcttacacctaaaccatcacttaggctagttcacttttatgcctggaatagggggatgtgagtcattttcctccaaagtgcttgcaatctgtacacatctgggaattgtgttaggaggggaaaagagtggacaatctccagtgcccacccctgactgtctcgaagtaagactggagccagaggctctgctttcctcatgtcagcgttgttgccaggcccactcttctaatgtttgcagtgataactgcagtcattttagacctcatataatttagaagaagtgagggacacagaaccaccgtttggtagcttctatggaaaagagaagaggattctttccccaaacccccaataagttcattcttggattttcttggcctaaattggtagtcattaagcaatttaaacctgaggatgtggtcactcccacccaagctaccatatggcttaaaatggggaagagaagtttccaaaggaaaattagggggaaagggaatagatactgaagatgttgatgtctagcacaataataacaattcaaggccctccatcttctggccccaaagggcaatagctttctccttcaattagtctgtcttccatatagatgaggcagagtgataagcatgcagtccccaatctttatggcaccagggactggtttcatggaagacagtttttccatgtattgggacaagtgggatggtctctggatgaaactgttccacctcagatcatcaggcattagattatcataaggtgcaggcaatctagatccctcgcatgtgcagctcaccttagggttcatgctcctatgagagtgtaatgccgctgctgatctgacagaaggctgaactcagtcagtaatgcttgcctgcctgctactcacctcctgctgtgtggcctggttcctaacaggccaagggctggtaccagtctgcagcctaggggttggggacccctgcaataagacaaataagtctagtaagataaaatccctacctactaaaaggttttattttaattttattttttttgagatagagtctcgctctgtcacccaggctgaggtgcagtggtgcaatctcggctcactgtaacctctgcctcctgggttcaagcgattctcctgcctcagcctcctgagtagctgggattacaggcacctgccaccatgcctggctattttttttttttatttttagagatgggttttcaccatgttggccaggctagtctcgaactcctgaccttaggtgatctgcctgcctcagcctcccaaagtaatcccaaagcctgggattacaggtgtgagtcactgcgcccagcctaaagacatgagattctaaagctgaactgcccaatgttgtaaccactagccgaatttggatactgagaactttaaatgtagctggttcttccaaattgagacaagatgtaagggtaaatacatgctggatcttaaaaacttaatttaaaaaatgaaaaccatcttaataatttttacattgattataggctgaaatgacaatattttggatatactgggttatatagttttaaattaaattaattcagctatttcttcttacttttgttactgtgactattagaaaatttaaaattatttagcttacattgtatttctattgggcagtgatgctctagaaaatgaaatagtcatgggtactccatcagttatggaaataggcaatgatggcagtaaagcaacaaatacagattaccccagaaggtgttaaggatttcattgtacaatgaaaaacatcattaagattatatctactgaatcagtcattttccttacgttgtgtgataccttgttacgagtttactttccaaatcttttttgatttagtttagtttgtccgtcagagagtgttatattttaaaaaaaagttaaatgctgcctttcactgcctgttgtgtagcgtacttagattctggaagcaaatatttcttagaggagcattgataatatggccacttcactgttagttttattgttttcatatgagtatgagtgagggtatgaaagctcacagtagcttcttaaggttccttctgacttaaatgttcattatcttttgatgagtgaatgagcaggaactttgcattctttagaaactagtgtatcacggccgggcgcggtggctcacgcctgtaatcccagcactttgggaggccgaggcgggcggatcacgaggtcaggagatcgagaccatcccggctaaaacggtgaaaccccgtctctactaaaaatacaaaaaattagccgggcgtagtggcgggcgcctgtagtcccagctacttgggaggctgaggcaggagaatggcgtgaacccgggaggcggagcttgcagtgagccgagatcccgccactgcactccagcctgggcgacagagcgagactccatctcaaaaaaaaaaaaaaaaaaaaaaacctagtgtatcactttcttattttgcagttcaaaatataaaatctttgaggatgcttgaatttctagacctttatcatatacttagaggtatatttgctgatagttgtgcattgatactgtgatagcttcttattctcccgtgaagaactgatctgaagtcatggagctttagttacctgctgctcttattccaccttgcagtggctatcacattcctacaggttttcaacacagcttcccatgaagttccattcactgaaagatatagctggctccattccttacagaaaaaagaaactaatgccctgcttgccaacttttggctgtctagaatggaatgttattctgcacgggaggaagcacgatggaaaagggttcttctacctgcaggaaatctaatgtttgctttgtagtgaagcatgcgaaaagttgaaagaaaggaagcaaaggaagaggcttggtcattagaagttcagtttgtgtgagatttcctttttttcctttttgtttttctctatcctgttataccatcatggtattttaattttttttttcctagctaatgggtaaattgcttttatattggtgtttgggacccactgtgaataccatggacagattcaccggaaaaaaaaaaaaaaaaaacaacaaaccaaggaggagaaaaatgttgtttcttctacttacttcccatcattttgtgaaggagagtcagaaaagctgttttctacacatactcccttctccctcaacccattcacagtgatttttgtcagcaaactaatatgccattgattttacagttaggatcagaaatatgcaccattcttgacttaaccgatttttttccccctgagaacaatatcatttttacactagagaatatgtgcaaaaacttattatctacaaagctgaatgtattttgcccttgccgggaacataaagggttaaattgaaggctcaacaaagactgggatgaaaagaggacaagttggggggccatagttgtttcctgtaggcattcactgttttgtagccagtggcatttttttttgtcctcatcactagctcctttaacacacctctgggatttgctctgagcttggctgaacactcttgacctttgattgtatagcagggacagctttattttatgaagctcttctgattcagacacattttgacatggcctaaaaagccattcagtaagtagtaaatgcaccctatttctgagtgggatgcaggttatggatgtgttaaggctcaatcaaggttctgttaggaattaggactggtgtgaaactccaggatactgggagagggttgagagtgaggcctgaggtaaggatccgggatggaggaagaggcttgcaatgcctgtggtggacattatctgataaatttcatttagtgatttcggcatgaaacagccatattaaaatgccctttctggcttattaaatagaagctactcagtacatgtttgttgaacttagcttcttaaccgatgataccttttcaaccctgcttctcttcttctataatttgggccccacaagttacccagattatggttgacaaacttgagtagcactgcacattttagtcaagtgagtcatatttttgaaggaaaatgaggtcaaataaagacttggtaaacataaaaagcccctttgaaatctccacacaacttttcaccatttggtttcttttttgctctctttttactgtcacatgaattggtacaagttgttttaaaatctccagaccccaattccatggcccccctcccccctttttaaattgggttaatagtctttaaagtccattttagttctaaaacatactgattttaacacctcattcactaaataaattgctttttttcaggcactataatgcaagataaataaaattgtctatatttaaaaatgtatttaccaactttcaaatataggcttgcctatattttaattgtagtgtatgcatgatgcagacctttgggactataacctttgatttcagcattataaaatgtcaggtcccttggcagaaaccactttaaaatgggtgagacctgaactcaaatccttggctctgacaagtactggctgtgtgaccttaggcaaattacttatttttaccaggcttcagtttcctcatttgtaatatggtgataccaatgtcctttataaagttactgtaaagatgaagtgagataatgggatgtaaattgtctagcgtgaagcctggcctacaggaaaccctcaatacatgttacctaatgctactgtctgaaaatgtgtcccagaatctctctagccaacataaaaacacattttatgatgtaactctttacatcataaattgaggagtatttcagtcaataaatgtttataaataaattaacggtcagatgtattccaagtggaaatggacctgacattttatttttctttgcagatcttatattgcactttaaacacacctaaaattgacatggaaagactcttaggaggacaactaggactagaagatttcatatttgcccatgtgaaaggaatcgaaaaagaagtgaatgtgtataaatctgaggattcacttggtctcaccattacagataatggtgttggctatgcttttataaaggtaagttttaaaaaataacagtgtaacctaattgaggataacatttaagaaaatctaccaggccaaagaaagttagaaatgatcttcagagtgagagcccgctcagcaaggatgcatgaattggtaatgtttcactttcattttaaaaatgttcagatgtcagtttgtgtttactattttcttaatttcttccctttagtttaaacttcccctagaatttagaactaactgaaaggaaagtctaaccctggtgcctactcattatccatataagcttttccatgtctgtaggttttaacatctgatgaatttctggcttatttccattgaattagtgttatttccaactgttcctagttttgactgccttatttacttctttaaaaatgcccttcaaaattttaggaagtatataaagttggatctctgtatctgtaggttctgtattagtggattcaaccaaccacagattaaaggtagttgaaaaaatggcatctgtactgaacatgtatggcctttttacttgtcattatttcctaaacaatacagtacaactgcttatgtagcattgccattgtgttaggtattataatctagagatgatttaaagtatatagaaggatgtggataggttatatgcaaatactacaccattttataccagggacttgaacatcagtggaattttagtattgatggtgtgtcctggaaccaatcccccatggatacccagggccaactgtaattcctttattcaaatacaaagagagcgatatagagcttcaaaggcaagataaaagtttgaaatggtgtgaaactaagaactgaggagaaaggtagtctcatctcttaaaaataacaactctattattgtaatagttataatagtaacagacttatattgaatgcatgtactaggcactttgcatacaatttctcacttaattctcacaattctatttggttggtattatgttttttctttgtatttatttttttgttgcagtataagacatttttaatgtacagcttaatgaatgtttacatacttatccctgtttaaccatcacccagatcaggataaattgcatttctgccactcagaaggctcatttgtgccccttcccagtcaataatctttccccgcaaagtagccattattctggcatctattgccatgaacttcatataatcatatattatatactccactattttcggcttcttttgctcaaaaagatgcctatgagatccatggataggtactatttccaaccttattttacagatgtggaaacaggctcaggaaggttaagtagcttgcccaaagttatacagctggacacattcaggatttggatctatgaggtctgacttcagagctggcacttctattcactcgattaagaattaatgatagatttcatgcaacagggaatattttgtgcctttattttgtccaaatcttgatttgctgatgcattgtcaccattaaataatcttagggaagttatcttcttaactgtaaatgggactttcgctacccacttgatagaatggctatttttagctctgcaaaagatatgactgtgctgaaggttgagtgagtgaccaaatggaaaatctgtgactgggaaagtcatatgggattatccaagggaagctcaggacatgaggcacaggcagcagagaagggcttggaagtttcacaaacgtgtgtggatttttaaaatcttagcctctgacattcagagcttgtctttctattttttaaaaaatgctttgtcaaacatgtgcctgactcagagtactagtcactagccctgtggagatatagggcatgttagcaaaggagaaagcaaggcataatctaaactgccaacatatagttcaacttagaagagagatgcacattatactgtatacatggttgatgaaattttttaaaaattgggagaggataatttcaaacttacataaagattgcaataataatacaaagaactcccataaatcatttatccaaatctccaatttttaccatttgccatgtttgagttttttgttctgtctcatacacacatatatatatatatactctttaccccttagtacttcagagtgtaattactaagaacaaggatattctcttacatataactacagtacaattatgaaattcatacagtctaatattgatataatacttttaaactaatctatagttcacattgtagtcttatcagctgtcctaattgtgttcattattttcccctcatacaggtccaatttaggatcctgtatttcatttatgtctttttagtcttctttataatctagaatagttgtcatgtctttttagtcttccttaatctagaatagttcctcagccttttataggatgtccctgaatttgggtttttctgatgtttcctcatgttgataaatagattgtgcatttttggtaggaaaattacataagtgatgctgtgtccttctcagtgcaccacatcagaaggtacatgaaactggtttgtctcattgtttgtgagattaacttttgtcacttgtctgaggtagtgtccactagtctttttcactacaaaattattttcctttgtgatacgtaattgtggagagatgctttgatatcatgaaaataccctgttttcttacttgcatggcacaaatttagtatctgttgatgagtcttacctgaattaatttttcctataatggttgaaaaaatgatgatttttctaattccatcactccttatatgtttctctgaaagcattttatggtagggaaaaagctgcccttatttattgtcaacatgggtacatgacttcgtgttttactgaatggtttatagtctgttactatcaattatattgatgctcaaatttcctgagacttggcctgcaggaacccctgtaagtgggcccccatgtccttttgacatggctcctatcattttattgagtaggttcttactttctagaacacaacaagatattctagacccatcttgtatctccttttcccctgacctagaatcaactatttctctcagaagctctgatttttactagagattgatagtcaagttctggtgttagctgtgctcatacactgaagtcaagttctggtgttagctgtgctcatacactgaagtcaagttctggtgttagctgtgctcatacactgaagtcaagattgatagtcaagttctggtgttagctgtgctcatacattgaagtcaagttctggtgttagctgtgctcatacattgctattggagtgcattatttctagatcctttcagtggtagaattagagaacatgtttattagaagttatgaattgggccaggcatggtggctcacacctgttatcccagcactttgggaggctgaggtaggtggataacttgaggccaggagttcgagaccaacctggccaacatggtgaaactccatctctactaaaaatgcaaaaattagctgggtgtggtgcacacctgtaattccagctacttgggaggccaagacaggagaatcacttgagcctgggaggtggaggttgcaatgagccgagatcatgtcactgcactccagcctgggcgacagagggagactctgtctcaaaaaaaaaaaaaaaaaattacgaactcgtaacgatgcttctaattgtcatcctgccccacagggttatttcttggcttccccatcaaaatttttactttcaaagtcattaaaatatttactcattgtagagatctttcaccttcctggttagctgtattcctaggtattttattctttttgtgacaattgtgaatgagattgtctttctgatttggtgcttggtttggctgttggtgtataggaatgttagttagggatttttgtacattgattttgtatcttgaaactttgctgaagttgtttatcagctgaaggagcttttgggtcaagactattgggttttccagatacagaatcatgtcatctgcaaacagagatagtttgacttcctctttccctatttggatgccctttattgcttttttctgcctgattgctctggctaggacttccaatactatgttaagtaggagtggtgagagagagcatatttgtcttgtgctggttttcaaggggaatgcttctggcttttttccattcagtataatgttggctgtgggtttgtcatagattggtcttattattttgatgtatgtatacctagtttgatgagagtttttaacatgaagggtgttgaattttatcaaaagccttttctgcatctattgagataatcatgttgtttttgtctttagttctgtttatgtgatgaagcacatttattgatatgcttatgttgaaccaatcttgcatcctggggatgaagcctacttgctcatgctggattaggtttttgatgtgctgctggatttgatttgcaagtattttgttgaggatttttgcatcagtgttcagcaaggatattggcctgaagttttcttttttggttgtgtctctgccaggttttggtatcaggatgatgtggcctcatagaatgaattggggaggagtccctcctcctcagtagtttctataggaatggcaccagcttttctttgtatatttgatagaattcagttgtgaatccatcaggttctaggcttttttttttttttggttggtaggttatttattactgcttcaatttcattattggtctgttcaggaaatcagtttcttcctggttcagtcttgggagagtgtatgtgtccaggaatttattcatctcttctagttttctagttagtgtgcatagaggtgtttatagtagtttctgatggttatttttatttctgtggggtcagtggttacattgtcttcatcatttctaattgtgtttatttagatcttctctcttttcttctttattagtctagctagtggcctgtctatctaactaatttttttcataaaaccaactcctggatctattgatcttttgaatgtttttttttttttttgtcttgttcagttcagctctggttttggttatttcttgtcttctgctaactttggggttgatttatttttgcgtctctagttctcttagttgtgatgttaggtagttaaggtttgagatctttctaacttttttaatgtgggcattatagtgctataagtttccctcttaaaactgccttatcagtgtcccagagattctggtatgttgtatctttgttctcattagtttcaaataatttcttgatttctgccttaatttcactatttacccaaaagtcattcaggagcatgttgtttaatttccatgtaattgcatgggttttagcaattttcttgacttctatttttattgcactgtggtccaagagtatgtttggtatgatttcagttcttttgcatttgctgaggagtgttttatgtccagttataatatgtggtcaattttagagtatataccatgtggtgatgacaagaatgtatattctgttgtttttgggtggagagttctatagaggtctttcagatccatttggtccaatgttgagttcaggtcctgaatatctttgttaattttctacctcaatgatctgtctactactgtcagtagagtgttgaagtctcccactattgttctgtgggagtctgtgtctctttgtaggtctttaagaacttgctttatgaatctgggtactcctgtgttgggtgcatatatatttaggatagttaggttgtcttgtcagattgaacccttttaccattatataattcccttctctgtcttttttgatctttgttggtttgaagtctgttttgtctgaaacaaaacagggataggattgcagcccctgcttttttttgttttccatttgcttggtagatttttttctccatccctttattttgaatcttgggtgttattttgtgtgagatgggtctcttgaagacagcataccgttgggtcttggttctttatccagcttgccactctgtgcattttaaatgggacatttagcctgtttacattcaaagttagtattgatatgtgtggatttgatcctatctttgtgttattagctggttattatgttggcttgtttgtgtgattgctttatagtaacactggtctatgtgtaagtatgttttgtattagctggtacagtgctcagagaaattagagaagagacaaacacatggaaaaatatcccatgcttgtggataggaagggtcaatatcattaaaatggctatactacctaaatcaatttgcagattcaatgctattcctatcaaattaccaatgacattcttcacagaactataaaaaattattttaaaattcatatggaacaacagtgacaaaaaagcctgaatagccaagataatcctaagcaaaaagaacaaagctggaggcatcatattacccgacttcaaactgtactacagggctacagtaaccaaacagcatggtacttgtacaaaaacaggcacatagaccaatggaacagaatagagagcccagaaataaggctgcacagctacaaccacctgatatttaacaaagctgacaaaaataagcaatggggaagactccctatttaataaatgatgctgggatagccatatgcagctaagaaatgatgctggctagccatatgcagaagactgaagctggacccctccttacaccatatacaataattaagatgaattaaagacttaaatgtaaaattcaaaactataaaaactctggaagacaatgtaggcaatatcattctgaacattggaatgggcaaagatttcatgacaaagacaccaaagcaatcagaatagaagcaaatattgacaagtgggatctaattaaacttaggagcttctgcacagcaagagaaactatcaacagagtaaacagacaacctacagaataggagaaaaatatttgcaaactatgtatctgataaaggtctaatatccagcatctttaaggaaagttaccagaaaaaaaagacaactccattaaaaagtggacaaaggacatgaacacttttcaaaagcagacacacatgtggccaacaataatattaaaaaaaaagctgaacctcactgatcattagagaaatgcaaatcaaaaccacagtgagataccatctcacaccagtcagaatggctattattaaaaaataaaaaaataagttgctggtgaggttgcagagaaaagggaaccctcatacactgttggtgtgagtgtaaattagttcagccattgtggaaaaccgtatggcaattcgtcagctaaaagcagaactaccatttgactcagcaatcccattactgggtgtatacccagaggattagaaagcattctaccataaagacacatgcatgtatatgtttactgcagcactgttcacaatagtaatgacatggaatcaacctaaatgccaatcagcagcagactggataaagaaatgtggtacatatacaccatggaatactatgcagcattaaaaagaatgagatcatgtcttttgtggcaacatggatgtagctggaggctattatcctcagcaaactaatgcaggaaggaagagaaaaccaagtactgcatgttctcacttataagtgggagctaaatgatgagaacttatgaacacaaaggaggaaacaacagacactggggtctacttgaccccagtcatagtgagactctgtctctacaacaaatagaaaatcccttaaccccaacatagtgagactctgtctctacagcaaatagaaaaaattagctgggtatagtggcatgcacctatagtaccagctactcatgaggctgaggtgggagaattgcttgagcctggggaactcaaggttgcagtgagccatgatcatgccaccactctcagcaagacactgtctcttaaaaaaaaaaaaaaagtcaaactataaaaaatacattcagagatgtgtcactccttctcctaactcttctatcccattacttttccacactccttagagataaccaattttattaatttctgttttatccttcctgtgtttctttttgccaagataagcaaaatggaatgtttcatgagtttgcatatcaccatgtgcagagaccatgctgtgtgattataattttaatgtatgtgctgctgaagtgagcacttggtatgtttttaacttggctggaaataagagtaggttaaagtcacagtaggacagtgtggtaggtgttcaaatgagggtgagcattccacggtgagagaggcattacagtgcggtgcataggggcatggactttagaatcagataggcctgctttcagtcttagccagatcacttatttactggctgtgtaacattggccaaggcattaaacttttctgagccttctctcaagtgggaatgttagcacctactttatagtattatttgggggtataaatataatgacacgcttaaaatgtctgcagtactcacaattaatagctaatattttaataatagttctaacaataaactattacataattaggagagatcaatggcagaaaaatgcattttatagttttgtatggttcacacagatgaaactggtttttttgtttgtttgtttttgtagagacaaggttttgccatgctgctcagttgagcagggctcaagtgatccctctctctaggcctcccaaaatgctgggattacagggatgagccaccatacgtggcccagatgaaactttttaggtgaaaaaacaacctacttaaatgttcatgattttattatctaagtctcaacatttctaagaacaaaaagtatataaataccttaatcagaaaattaagagcatacttataacaaaacctgtatatagttaaggcagcagctggaaaatgttttctgtaaagggcagatggtaaatattttgtgctttgtgggttatatggtctttgctgcaactacttaactaagcccatgtagcacaaaaacagttacagataatacttagatgaatgagcatgcatgtttcccagtgagaacttactcatagacactgtaatttgaatttattataattttcacatcataaatcttcttttgatttttttccgaaccattcaaaaaggtaaaaaccattcataactcatgggccatataaaaacaggtggtggcccatggtggagggtacacatcaccctggagttctgctgtgagccatagtttgatgacacctggtttaagagaatagacttgtactttaattaattaattaatttacttacttacttatttattgagacggagtctcactctgtcgcccaggctgtagtgcagtggtgtggtcttggctcactgcaacctctgcctcctgggttcaagcgattctcctgcctcagcctcccgagtagctggggttataggaatgtgccaccatgcctgggtaatttttgcatttttagtagagacagggtttcaccatgttggccaggctggtcttgaactcctgacttcaggtgatctgcccgcctcaccctcccaaagtgctaggattacaggcatgagccaccgcaccaagctgagacttgtactttcaaatttaaaataaaaataaggatttataacatgcaattaagaaatgaggctaaattgatttttaaaaacccacctgactttgttttaaattgaaatagtttgactaaccacaaaactgtcattctcagaatatctccttcagatctttatgatttgccatacttttgctttagtagaaccacattttagagtgatcatttcgagaaatatgatacttacatatttctaacattttacttgttcatttgcccaaactaagaatcagcaagactggaaatataggaagtcaagggggcagaggattacaggatggaagctaggatctgagcagaggtctgtgaagccagaatagacatgatgatttgtgaaaacaggtactgtttgagatctggagaccatgatgaggtgttgatgagaaacagctttagtagaaataaggaaacggaaaatggaaaaataaggctgtcaaaaaaaaatttcagagttcaaaggtgatagattattttggacatttataacccaaaactttgtactttaggtcagaagaccttgggttctataccttttttaaaaacatttttaattttaaaaattatgtcacctctgtttaagacctaattctgttgtttattagctgtgttatcttgggcaagccatgtaattattgtggcttaaattcctcattcattaaatggaatgataaatatccttttcctaggcttattgtgaagactaaatgagataactatttacaactgtatgactgttagcttattattatgggcgaggtttgaggacagtgttggaaggatcagcaacacaaatctcaaagttgctgatcatggcgactggacatgtagctcagagtctggtgcttaagattttagggagagtggagccgataaggcggccgcaggggcggagccaggggcctttgcctggcttggtggctggctctaccttccctgttttcacctcccgctgcgctaatggctcccaaaggcagctccaaacagccgtccgaggaggacctgctcctgcaggatttcagcggcaacctctcggccaagtccttcgcgatcttcttcgggaatgcgttcgtcgtgtctgccatccccatctggttatactggagaatatggcatatggatcttattcagtctgctgttttctatagtgtgatgaccctagaaagcacatatttggtagcctttgcatacaagaatgttaaatttgttctcaagcacaaagtagcacagaagagggaggatactgtttccaaagaagtgactagaaaactttctgaagctgataatagaaggatgtctcggaaggagaaagatgtaagaatcttgtggaagaagaatgaagttgctgattctgaagctacaacattttccattttctattaacaacactctgttcctgttcttggtcatttttgcttcttcttcgttttgaagaacttcaaccccacagtgaactacattttgtccataagtgcttcatcaggactcatcgccctcctgtctactggctccaagtagaccatgtcagcttcaccccccggctttgtgtctgtgggtggcctgtggtatatggaaaagtagcagggtgttcaggatgggagacacacaagatgtttttatagtctagagcctttaaaaaacccaagggaatgtaattgaaaggggaaaaaaaagattttagggagagtgtatgctgccctagacttctgctgacatctgtgatgagaaggcagaattctctaaatatatgggatgaacataatggaagatattataataatgatctgaaatggttggaaacctctatgtttaataatgtaaatcctatcttccaataaataaataaatcttctctaccttttgcaccatcaagcttcaaagacaggtgaaagttcctgagtgttatagagaatagtataagtaactcagtaaataaagtatagcattaatgcctctcttttttccttcttattcctttgcatctgattagtgcctttggcaatattattaatctctgtcaagttattttatgattatcaaagcacattaggtttcagaaacttgtctccattgctcccgtattgtttattctgcccactttggaggctaaggctcaggtaacccataaaatatataatccatgtctccaactttgcttctttatctggttcatcttctccaagtttcctatattgattttcctgtgtcttcattccagattcttatctgctgcctctgatagtgaaatgtgctgtgacttttctcttgctacctggattctcaccctgctgtctgctctgacttccggtgactgcctttcttccctctgggcactcttctggttgctgaggcatctctaggattactgaagtgactcatgggcctctgcaaccctagatttctgttactctgacctttaattccctggtgagattcaggtgtgtcttcaaagtctttaacttttatataatgcttattttaaataaaattgtaactctaaatcttaagctaaaaatactgtgtggtgagactctgaaatttgtatggtgtagttgaccaaataaaaaaataaattcaagatgtatcaagagataaattagaataaaaactaagaaaaaaaatcaaagtatagattattgaattctttgatgaattatgaattgtgtaaaatatttaatagttttttcttctttagactctagtcttttctttaatcttgtttatttttctatgacagttgagaaactctagttgtactgagtgattcccattgtttctgttagcgatataagtttaatatgggtttctaataaaataatgttggtagattatgaaacttctggtatctttgtttaactatttctaatgacagtgagctctgtttaaattggcattattgtgacatttgcatatagcatgttaacagccactattagaatgaatgaacatagcaatattcttaaaatttgggataaaagagaaatctattttgagttttgatttataataatgcaatttaaacattaaaaatgcttaaccttcctaagttattcttgttcctgatgacaatatgacggagatgctggaggtagttgagatcagttttctcctagctcttggacacaatgatcaatcaccctgctgattcagaagatgttatacttccacctagcaagggtaaagaatacacaacctttattacacaatagcagccactcctgatattgctatcattcctatgaaggatttgggacttctgagacagattatggccttcattttgcctcattcctcatcactgtggaagaacttgtacatcctctgcagggctgttttctgcaattctggaagatttttctggagctcctgcccctaaaatcctttcagaaattcttggtgccatcttgggaatactagataccattttgatactttaccctacagatgtattgtagagaagtaagatagatttaagaaagaccaacttgaagtttctccttggggtcctacattctgttcatctaaaatacataaatgaaaaacaatagcatcaaatcacccttactggctcccaaaatgataaccatacttatcttttattgggtatcaggcgtcttagctaagatggtattattctttgtgtctttgcatctgtaactaaatgcagccaattgaaaaagctcaagctctattcttatgtgatgggcctcaattgaaatgattcagtaatcactaatgaagggactttgcagatattgtgctaggcacagacatgcagtagtgaataagaccatctctgtcctcaaggatattagtttagtaatggagactgagaagtaaatgaacaatcgcactgtggtatgttgaatctggcaaattacttgatcttctgaagctttaatcttcctgacctgtgacatgagaatctcataaaggttgttagaattaaatgaaataacaaatgtaaagtgcttagtttagaattcagcatatacagcaaaacgtactgtagaagcatgagagtggcaccttacccattcttggtggagtgggttgggaatgtcaggaaaagcttcccagaggaggtggtgtatgagtgagctgaattctgaatgataaggaagacgaagaatggttggaggtaagatagtggttcttggttgctcagtcttccatctctaactgagcatcagactgcattgttatgtcaatacattgtatttaatgtctcaaaagcataaaaagtactgttacacagtttttttttaaacctgtagcatctgatattcccaggcagtctcccatccaagtactaaccaggcccaaacctgcttagcttccaagatcagatgagattggtgcattcattacacagttctattttatattatgttatcatcaatttcctttcagagaattaaagatggtggtgttattgactcagttaaaacaatctgtgttggggatcatattgaatccataaatggagaaaatattgttgggtggcgtcactatgatgttgctaagaagttaaaggaattaaaaaaggaggaactctttactatgaagttaatagaacctaagaaggcatttggtaagtcaggggttggtgggcgggtgtgtgaaatgtttgctttccctggtttatctttctaagggaaatgagtactgtgatatggtgctatgtgcttttagtgtcttcttatctaacatatcagttaaaaacatagaaaatggtagcactacttataagaaagacaactattgaaggaagaaaaaagagaaaattattgccttgtaaaaggacattttccaaacatttgaaattacaaagtctaatgtctagtgactgaatttgatgtggctgttcctatctctgagaacagcacattgtattgttttcattttgctgagcagtaagatttttgactgagcttttaaaccataataactgttgctcatggatctcagcagcaaaaattatagttatatacagaatggtatttaaaatagttatctagtccattttaaagacccccttccccaatacctttcctccattggcattttgaatttggcagcatgggatggtatgaaattatttccactttggggtgacatctgtacttgcttggttttagccatgacagctgtattccaactgttgttcaatcacccagggctatctcatctacagaaaaatgtgccagcttctctcttaccacccagaactattttaataagccaaaccaaggcctagcattcatcagcgttaaaatatctgtagcagaatcatctcaggcttgctgttactcatcatgaccccacgcaccctatgttctttcctttgttcacagaacataaatattccatttagtttgtctctaatgccattttctcagggcagttattggaaataatggaagaatgcagtggatctggggaattatgttttctgtgtcttagcaagtaagtgacaggtcctaggcatgtggaattagaattttttctctgcttctacatgcttctgcaccatttaacagaaatacaagtgtaggttatattacctgtgggaggcagttttccagaaggtgtaagaaaaagatgccttataccagtacctcctggagggagcactctaggaactacctctgtagatgctgtgattctgcctggtgccttgcagcatctgagctcacttctcacagaggaaggaaagcagcactcaggtttctatccagtaactcctttcaagatggcttcatttggtaacctaactccccagatagcatggtgaaataaattgacagggtgtagatggtttgagataaatattcttatttgatttagactctttgtaaatcaaagccattctattagcataactcaagaaatctatttttttctgtattgatctccactacataatctgtttccagagtaaatttttctgttttttttttttttcccattgtctgcatctagatcttttggtcctcatgtctttgtagaaagttattgatataccttaacttggatgctaggttggtgatagtcttaaatgttgcaaaggtcgttgtatttagctattattgttccatgattagattttcccttcagtgttgtagacatgagtagagtcagtatacttcactgccttatgtacctaactactattgaaccggctgttgcctcatgaaatcaatggacacatttgcaaagtaccctgagtaggattttcctaatagaggtatattatttgagcatcctgaattctggtagggctgttggttagaacatccagagattgactttggaggaataagtttttattttccaaggtttctatggaagtttaactcaagctgctggtctttatgcattttctgtgctgtggattgattcttgactctgggccctagtgtgaggggtttctttcttaaaagtaagcctggctgctctgcctgtcctccagccctgaatttttctgcttattgttttgcctctgggataaagacaaagctactttgtttttcatcctttggcttcgtcccagtgcttagctctttgccagagaggggagcatatatcagggggtacttggggaatcaggcttcccccaattctcttggttctaatcttatcttttgctatgtttcctttctttttttcctgtattttctggcattattattgactcagggccaagaattcaaatttcatagtccttcatgattgtctgattctctgtcctcttggatttctaccaggagaagggccagtcttagtgaggcagagttttctctgcattcagataggccaccttggctgtagctaagtcacttataggattttaacaaaagctgtcagaaatggctatatacaccaatattttgacattttcctaccaacttccctaaagacttagcctggagaggcatgtggactatatcccaaaacacaagaggaaggagcatagttggctgctttgcaatggcgtaactaggactgcaagcaccacttctttgtagtggttagggaaatcctttctgcctgccttcatttccatattttaggtccaccactagctacactccacttccaggggccattatatgtgttaatattctttgatggagagctacgtaataaacactgtctaatttcaggagaaggcatttattagagactaccatgtaggtcccagaaacagtcaattgagccttgacaaggtcaggaaccaagcctgtttcaggggtgtgtgtaccaggaaccattcatggcactggctgaattgactcttggcaattattttctattttcatatcacttcactcaggattcaaattcctgggagaggtggagcaagtaagtaggtcttgtacccatcttgataatggggaaggcaggctatatgatacacctaccaaaatcacacataacatgaagggataaatttccttataggtaggaaaaaagtagcagatgcccattttgctatttcttctaagctgttatatcttgttctgcagccacagcagtattgattttctcttgattttgaatctgactgtagccatgtatgatatctgtcagtctgggagtattggaatggatttggagggagaagcgtattgtcaattgttgtgggtgtttgaccttaaggattttatttttctgctatgagttgggtgccacatacatagctgtttggcagtggactatctagagatgatgacagcatccaactttctttcagagaaagagtaaagtcacattttccttggtgctggccatcagatttggaggggaccaattttgactatacttaccaattttgactatacttaacaattttgactataattaccaattttgactatacttctaggaagatttttaattatctgtaaattatttttaatttatctatctcacaaattatttttaaattatctatctcacaaattattgagactcttctgtgtttcaggtactctgtgtggcatagaaaatactaaggaggaagactaagttatggctcctgcctttcgaggagctcatggtctaacaggaggctgttatgggctgaattgtgtccttcaaaattcacatgttgaagtcctaatcttcactaccttagaatgcaactggatttgtagataggggctttaaagatgtaactaggttaaaatgacatcatttgggtgggccctaatccaatatgactggtgtacttattagaagaggaaatttagacacagacacagggaggatgccatttgaacatgaagataactatctatctgtaagtcaaggagagaggcctcaaaagaaaccaaccctagagaaaccttgatcctgaacttctggcctctagaactctgagaaaataaatttctattgtttaagccacctagtctatggtactttgttatggcagcactaggaaattatagaggataataggaaaaaaattacagtaccagttctttgactatggaagtagaccttgggcttcctaataatctagaaggtacaggtattttagcattcctctggccttgggaagatagcaagagcatactaatatgtttccattcagacatttgttgagtaattagtatatgcttgtcttagggtattagttgccctagacaataatagttaccatttattgaaagcctactgtataccatcaccataccacctgcttggtacatgcatgaataagatccagatctaggaactcatgtctagtgagaagagatggatatgaaaaaaataaataaatttaataaaggcgattagaggtgctaaaatatactggatgtgtaaaggtgggagacatcaagtgtgcttaagaagttcaggaaaagctttcttttcttttcttttctctttctttttttttttttgagacggagttttgctctgttgcccgggatggagtacagtggcacgatctcagctcactgcaacttccgcctcccaggttcaagcgattctcctgcctcagcctcccgagtagctgggactacaggcacgtgccaccgtgctcggctaattttttgtatttttagtagagacagggtttcattgtgttagccaggatggtctcaatctcctgacctcgtgatctgcccacctcggcctcccaaagtgctaggattacaggcgtgagtcactgcgcccagccaggaaaagctttctaaggaaagagatttgagttgagtctgaaggtatgaatggtgcttacttagtggatgaattggggaaggttgtcctaggaagtgggaacagaataagcaaagttacagaggtacagaatagcatcatgtatttgggaacaccttgtttgccagtgtttttggttagaggttataggtggtggcgtcacaggaaatgaagctcaagagtcagtagagaacaaatatatcaagggccttatatatgaagacaaagactgggcaatgaagaggcagaggggtaacatggtgagtctttaattttacaaagatattttggagactgttagataaagggatataagatagagtttaggagatcataaatgttctattaacaataatagctataatttgttcagtgtgagagacatgaattaaggcagtgcctgtaggcatgaagagaagagaaatggtttggaggaatagatggtggtgtgctggagccatttgtacacatctcttcccaactcctccttcattgacatcaggttaattgttttaaatgagctataatgggatatttataaaagagaaataggtaagccctgtaagtcagggctctttattttaatttttttagtgcagagagctgattgttaaatgtacctgcacaccactgaataataagattgaattggtaacctgttggacatagaagtaaaggaaggagagactgcaaatgatgacctcagatttgtggcttcagggagggagtatgctgtcattctttgagatgaggaaagctggcaaagaaatagatatgggcgaggagataggataggaaagaaattataaatacaattttggactaaatgaatttgaaatctgtggaacgattcagttagacttgtacaaaagggctgggtgcggtggttcactcctataatcccagccctttgggaggttgaggagggagggtcacttgaggtcgggagtttgagaccagcctggccaatgtggtgaaaccctgtctctactaaaaatacaagaattagctggaaatggtggcaagcacctctagtctcagttgctcgggaggctgaggcaggagaatcacttgaatctgggaggtgggggttgcagtgagctgagatcacgccactgcactccagcctgggcaacagagtgagaccctgtcaaaaaaaaaaaaatacacacacacacacacacacacacacacacacacacacacatacacacgaggtagatgagcattgataattggggcctagagaatgagatttatgagtaattttctttgattggtcgcagaagctatggaaatagattcaatcactgagagtgataaaaggaccaaaaacagagcagtgaggggaacatcagcatttaaggggcagaaagagaaggaggagccagcactgaggaatggccagacatggaggacctggccttctgggtagcctttatccaagtactcaagatcaagtcacttgtcccacgagcagatgttccattgcactttcccaagttggctgtggggctctgagggaggaataaaggccattagaaaatgtaccctcagaatcttctgtgctggtcagaatttaaattactgtttttcaaccagtaggtttcaaccagtgtgtttagaacacaaagtagaatagagttgaaaatattgtgctttgtacattgcaaatattgtttcagttacaaataaatatgtgtatttcagttttattatctttgtgtatatttatgggtcatgatataacgtatgtattttttactgtgggtcacagaaaaaaacatttgaaagccactggcttaaatgactcccttgttgaaagtttgtagttgaatgggaaatctttcccatacttaacatggttccccctggtcagctggttactgattcaaattttccttgttctagccatgagctgatggcagcattcccagtccttatcaagtatcggctggaatgtctgtagtggtattttttagggcatggctcacttcctttctccttttgccaatgaaaaggagcatggctttacaatgagctcaaccttgcagagtttgccctgtaaacctagattttcccaaggccatgaaaatccctcttccatttaaatgactctaagaccagacaagaccaactcatttgttttcctataaggtcttttaaatgcagaaaaagaacaaatccataaagctttgatttggttttacttaaatgagtctcgacttcatttatcctgcaaatttccaatttgtgattcttgcgtgccctttatggaaagaggtttgaggaaggaggcctgaaatatttctgtaagagttttcaaaagcaggaagaaaattggaagaagaaacttacctcctaaagcatttatggtctttattttagggttggattttgtaacagatcattgggttatatcttcttttagaagattcatttctgtgcggtgtatccatcagaataggatgttaagtatgtgaagtgcatcttagtcttttgagtcattcacagctggaaaactcggacctcatcttcgtgattcagcttaactgatgtactcacttcaaaggctaagcctatttgatattaagagataaactgtggcttttaagttttatatgactttttggatagacatttcaaacatttaaaaattactttttattattcatgctgtatctagggaaaaaatttcaatcaattaatacttttggtaccttttcatatatactgaattctacaaaatatatttgggaatatgaaaaaagttacaaaagagatgataaatttcagtagttaagtgtgtagtctctgccagggactggcttatgatatgtgacattgggtaagttatttaacctttctgtgccttggtctcctcatacaaaatgtgaagatgtgtctaccacattgagctgttgtgaggattaaatgattaaacatgaaagaatcatagagcagtccctggtatatagtaagtcttcaataagttatctgttattattactattattataaaggtgtatccttttctttaaggaataattttagaaacaagataaacccactgaaacaggaaaagcaatgtggatgaattggtgatcaacaagtatttgttgagaactctggcactgtttggattctggaaagacagatggcaatatcacatctcatatcaactaaggaaatatgtcagtacatcataatagtagctgccattcgcttttcctaggactttctaagtaggaaatcatttagtccttacaaccaacctaaaaggtgaagcagtttgcccaaggttacagctagtgagcgagggaggcacacttctaaaccaagcagtcagcctccagagccagctctctaacagctgttacagtgagtcaacatgcttgctgtcctcagggaacttacagtttacataaagaggcagatacattaagaatcaagtaattctactaacaataatagctaccatttgttgaatgaaatatagtatagcagtgaagagcatagactgtgagctcagttacttaggtttgattcctatctttgctgcttttaaactgtgtgatttggggtgttatttaacccctctataagcctgtttacttacccataaagtattttgaggatgaaatgagttaatgtatgtatgtgcttagaacagtgttatgtaattgcaacccattgtgactaggactactgctattatggcctgacttaataatcctcatgccattcctatgagggtttttcagctaggtaaactgaggcttgggcagttaattcattaagactgcccagtggcaggcgtaagtgtgggcatagcactccagtcctgtttgctctcgaggcttgtgctctgaacattatgtgttactgcttcttcagaacataatgcagaccatgatgcatgctatagtgcagatttaaagagtgaagtttatctgagcgctgacttgtccatgattgggaggggttctaaggcttagagagtgatagggattgagaggtagtaagattggaaagaaactccctcaacaaagaaagctatgagacaggtgatttatggcaggtcccaccagtaacagggatcaatgtcctgttctcatgaaaggcgacaggacatctgatagaatggcataaggatattagagcttttaagtgctgtggctttgcgatctcaggtgaaaggcccttgtacacactgggtgtgggtgtgggggtggcctgtgagtgcacacactgacttggacgtagagcttcatggtctggtctatgatggacagagtgcagcatcagccttttgaagcctgggagatggggagaggccttcaaagcaaaaccaagagtaaatttctcaccaaacctgtgccatgccagtggtgtgtagaggggggagagggggccgggggtggtgctcaaagtcagattcaattaggcatttcttacattcagaattgtggagtaaaatttaaaagccactacagaaatctgtagcaaatcaggctgcaaaagccgctcaggaccctattaataagagctctgaaaactcttatttttcagagctcttattaatagctctgggttctggtggggaacccaggcttgttttacagagtaatagggaatcatttagatgatattagaactgaagaatgacatgatgaagcagatatttgggaattaagcccaggagaccaatgtggctatatatgactagaggataaaccatgtaagaggctgttggaacagttcaggaggaaatgatcaggactgggattaggggcagcagtgggaattcaaaggaaataaaaagtgtgagtaatattgtaagggtaaaaatggggtaggaggtggattgatgacacttagctaaaggggagaagggagaaggttcagaagcaaatgtcactcccaagatttctatcctaggagcctgtgataacaatgatgctataattggaaatgatgcagttgggatgtagaaatggtttgggggacagtcagggataaaagttcagtttcaggtgtattgcattttatctgacagtgatactctctttcatgtattttttggcaaagtaagtgtacacagtgacagattttgaggggcagagcatactgtcgatcatcttattatgtagtagagtttttcctggcctcttcgtatctagctacactttggcttagcatttgtcacaaagatactatgggagaagatgaataaaaaaatccaagttcccttttgtggagtgtcacagatgtgttagacaagtgctgagtgtaattgataaattggttttcaaggtagagacccagctggatacctaaatatagatcctttctactctagttgtaaacttgcattaaaattttttttatcgaatgctcagtttttaatctgagaaaaatgaaattattataatctataatactaaaaactttgtaagctatatttttcaagacatttaccctaaacagtgattgatgtcttgtaactgtaatttttttttttttttttgagatggagtctcactgtgtcaccaggctggagtgcagtggtgcgatctcagctcactgcaacctccgcctcctgggttcaagccattctcctgcctcagcctcctgagtagctgggactacagacacgcaccaccacgtccagctaattttttgtatttttagtagagacggggtttcaccatgttggccaagatggtctcaatcttttgacctcgtgatccgcccacctcggcctcccaaagtgctgggattacaggcatgagccaccttgcccgaccagaaccgtaatgttttttaaggaccatttagagttaataacaaccatgaataggaggtacataatagttttcaactgtttttaagcttattaattaaaacagcaatgtgagatgaaggggtaaaaaatgatgcttaaatgtaagtggcttttctaatctgaatagtatgactataatgttatttattagaaaacagcaattatataaataatacatattctccccaagagtatttttacaacgggaattgtcatttaattataggaaaatggatctaataaattatgttaaaaatcgtagtcagagtatgttttcagataagttaggcagataagcaatttgatttatgtgtggaaaaatgtttgtgaggctgggcgcggtggctcatgcttgtaatcccagcactttggaggctgaggtgggcggatcacctgaggtcaggagtttgagacagcctggctattatggtgaaatcccctctctactaaaaatgcaaaaaattagccgggcatagtggcagtctcctgtaattccagctacttgggaggctgaggcaggagaatcgcttgaacctgggaggcggaggttgcaatgagctgagatcgcgccactgcattccagcctgggtgacagagtaagactctgtctcaaaaaaaaaaaaaaaaagaaaaaaatgtgaaaaggcagattacggcagggtgtggtggctcacgcctgtaatcccagcactttgggaggccgagatgggcggatcacgaggtcaggagattgagaccatcctggcgaacactgttaaacaccatctctactaaaaatacaaaaaaattagccaggcatggtggcaggcgcctgtagtcccagctacttggaaggatgaggcaggagaatggcatgaacccagggggcggggcttgcagtgagcagagatcgcaccactgcactccagcctgggcaacagagcaagactccatctcaaaaacaaaacaaaacaaaacaaaacaaaaacagattacaacacaacgtgctgtaatatcccagttttgcaaaaactttttaagtgtagaagaaaaataccttacagtggatttttaattttatttatttatttatttgagacagagtttcgttcttgttgcccagggtggagtgtgatggtgctatctcggctctctgcaacctctgttgcccaggttcaagtgattctcctgcttcagcctcccaagtagctgggattacaggcatgtaccaccatgactaattttgtatttttagtagaggcagggtttctccatgttggtcaggctggtctcgaactcgcgacctcaggtgatccacctgcctcggcctcccaaggtgctgggattacaggcatgagccactgtgcccggcctaggtggcgagtttatggacggcttttctttctctttccttttaatttcttctccctccctccctcccttcccttccttccttccttactctccctccctctctttctccctccctctttccctccctttctttccctacctttttccttttctttccctccttccctctctcccttgctctcccccttgctccctccctccctccttccagggtctcactctctgagggtggagtgcagtagtgcagtcacagttcactgcagggctcaaaagatcctcccacttcagcctcccaagtagctgagaccacaggtgcaggccaccaacctagcgaatttttcagtgttttgtagagatgggatctcactcctttgcccaggctggtcttgaactcctgggctcaagcagtatgccagccttggcctcccaaagtgttaggattacaggcatgacctaccatgcccggctgactttttttctttaggcttatattttccacattttaaatataaaacaaacacattaactttcataacaagaaaacaattattttaaaaaggaaggctggccaagtgtggtggctcatgcctgtaatttcagcactttgggaggctggggcaagcagataacttgaggtcaggagttcgagaccagcctggctaacagggtgaaaccccatctcttctaaaaatataaaaattagccgaacatggtggcacgcacctgtaattccagctactggggaggctgaggcatgagaatcacttgaacctgggaggtggaggttgcagtgagctgagatggtgccaacgcacttcagcctgggcaacagagtgaaactctgtctcaaaaaaaaaaaaaaaaaaaaaaaaaaaaaaaaagagctagcattctaggaagtagaagaaacttattctacgtattgtagctttacagttttcaactatatgatgctcctcattaaacaattttattataaatagttccatgtgagaaatgtggtagaatatgttatcaactctttacatttgcaggatctgttttggtaactatttttcttaactttgtaaagtctagggggaaggtccaggctgtgtaataaaccagtaataaaggtgaacaataatttttatttcttgaattcccatgataaaatcatattatagggtaaaataagtgaaaggataaaacgaaatattttagctatcattctttgttaaaagaacgaccttttacctttccaaattagagtctagaggtttgtaatctttttttgtaacacagtctcctctggattaaaggtatgaactttttccccagagatgcacattaacttgtgcctgcaatttcagggagttatgaaaacagcgttggggctttcttaaatgacatcttaactaaagaacaagaagatttctggcacagttattgcacttctgatatgcatcacaccctgttctgtcttatcgacggaatggttgagccacctttgtgtgcttgtggggttcattcatatgtgggcagctcttttgatccaatagacaacaactgacaccttcatgcaggtggcatcagtatatgcctccttttccttgcctttggtctgtctcagcaccctactaattgtatttttttaaagcctattctaaagaagcttcagaaatattggagagaggaaggatgcagggagaaagggagtgtcgttaaaatcttaaattctgagacacaagctagattttgtgtcagctatcctgaggagtgtgtacataggttgtgggtgaatgtggggtagggagcatgtgtttatggacaatgctgttggtatgtatctaagcattggaaggtcttttcagatgggttgcctcattacttggacagaattctttatctgtgaggtttctttcatttggagaccatggtaaaccctactaaactggcttaagcagaaacgggaattgtacaaaccagcagtccatgagtgatgctggcattagcaaagctctgtgtggggcccatacaatgtgactaggactcagttccttgccttttctctcttctgatgtcctgtctgatgtacctgattcatcatttaggtatcatcatattaaggttagctccacactgtgtcccaagatggtggtcagcaactgctgggaccatctgctttcttattcatgcagagcagaaaaggagagagactttggctcagaatttctagcaaaagtcctgagatttattctgaccttgcggcctttagtcacatgcttgcctctgaaacaatcactgtgatgaaggggatcagtttggcttagcccattcttgtgtcccatatctgaagctaggagcagtcagcttcccctgatccgcagtgatccttaaatgaccaatgggtgctaaaacaaccaatgagagttatttaccaatggcaactcataacttttaatagaatgcaaaatgaggtagtgtttctagggtggacctgcctggccttttattccagctctgcccacttacctggttgtctgtgatcctggtgaaatcatttcacttttccaagccttggtttcctgaatcatgaaattaggataataatcatacctatctcataatagttttatgagtattaaaaacatgtagataattttatatgctgttacctgggatatagtcaatgcttggttaataaaaaggcattacctttgacttaccccaaataatttaccttgactatccctagatgaatatagtgtgtttttttttcttttgaaataaaattggtcttgaagaataatgctagtttagaaccaactcaaatgtccaacaatgatagactggattaagaaaatgtggcacatatacaccatggaatactatgcagccataaaaaatgatgagttcatgtcctttgtagggacgtggatgaagctagaaaccatcattctcagcaaactgtcgcaaggacaaaacaccaaacactgcatgttctcactcgtaggtgggaattgaacaatgagaacccatggacacaggaaggggaacttcacacacgggggcctgttgtggggtgggggaagggggagggatagcattaggagatatacctaatgtaaatgacgagttaatgggtgcagcacaccaacatggcacatgtatgcatatgtaactaacctgcacgttgtgcacatgtaacctaaaacttaaagtaaaaaaaaaaaaagaaacagcctataatgcttgataggtagccatctgtagagggaacctctataccttgagagatatctgaaaatgggggcagaaagccacaaagcccaggtagagctgttgactctaattattattgctttgtagaaatgtgtcattctccaagagaaaccaaaaatttgaatttttatgagaaatcacccaatatttaaaaggttgcaactaattaaaaaatttgaaaacactgcacatccaacaaatatgtctgtatactatatgtaactgtgaactccctgtttgtagtcttgtcctgagagaattgtccttaatgccaaagtcctttgctctggtgacatgcacactaaacctctcaggtaaccctgtgagtagaaaacttcaaaggaatcatttctggaagggatagagaacgaatgaactgagagttgcctaggtgggagggacttggaaatgtaacctctccattcatcgcttttggaatctttgaacttgctgaactatatagcctggaacactttcctctctctactcctcccctttacccatctagccttgctgtctttacctgtgatggttgagtctctgcttatgaatcactttctccaggaagtctcaggcatgtgagaatgaagcatgggagcccacttgggcctttgataacatctctccctatggattaataaactgatttggtgagatctgttctttgtgaatttggctagtgtgaatcaatcgctaagattcagatcagctctgggaacactgaaaaaaataagcattcctgggtctgcaatactgaggattgctggtgcgcacatcctgccgagtgctgctgagttgccatctggcccaccctttgatatttctcttggtgctctgtaacttcagagatggaaagtacagaaactgttggttgaatttgatgagatagctgagttcaccctgcatgggtggttaggggagggagctgcatgtttacttttctgggatggagtggtgatatggatggtcacttgcccacatggtgtgataaaactgtaataggggatattggggcggcggggggtactggacagagaccacagagtccaaggattttactcttttctctgggcccctcagtgggctcttcttccccttcctcactagaaggagcccattacaaagtgccctgtgaggggctgggcttacactcatccactttagaggacctcagatggagcaatgggaggggccatctgttgtttccaccctcctctaaattttagggagaaatcatactgttttaaagaagaaataaaatagaataaagaagagacctttgcccctggcctttcaagtgacagctttctgaacattttacgaggagcctttgcatgtttcattttttagagagaaaatctatataagttgttttgttaggagacagtggaagggcacatttccctctctccaggttgaaacacaccagcagaagcaaattataaactctagcagcagcgttctattaacgtgagccaggccaatgggcaaagcatctttcatacagtggtcatttgagtacttaaaactatgctgtaaataggtgtaaatattttgtaaataagaacttattcctcaagttcacacaacttgcaaggtgaggaactggggttttaactaaggtgctctgattccaaagtccatgttcttaaccacaacactgtggataacagtacagattgaaccaaaatactaattttcttataagtaatcccagtagatatcagtgatcagaatgcaattgagagcattacttacaagcatcgtgataccacatttgaaaacagagtgatggtagagataatcagacctcagtactaaagtccttgtaagatgttttaagagagccagataatatgcttttgagaagtcaggaaaattttatcagggtctcactttcagcagagatctaatcagaaatattagaacaactttcatttcacagtttggaactgaaagtaattggtttgtttcctttttgtcaccaaaatgccactcattatttttttctcctacctcattttcacacaggccctcagcccactacagtgttccccctttacaactatttccagatgttctcaagggcttcacatgtgctccaaggaagtgtgatcctgttaggcaaccttgttgaccttctctgtgtccatagcatcccattcttccctctgggcatctttgggctatttcttgttcactgagcaacttggatacagcagtgtccatctgtgcccacttcatgttgaaattatggtctctgcccaggccccataggtgctgctccatactccaggccaaccagggctctcatgggaccagaacaaggcctcgttctgtgcggaagtggggagaatatacagcctccccactgcttggtccttccgtcagttgaggatctaagccgtgttgcatgtgctactcctgaaaacagtgcttttgtcttctgtcagcacttctttccctagggccgaggcacaggctgttgggaggaagacagatcctttctgccttttccatttccctttctctctacctgagcttcatcaaatagcaaaaactaggggtttgcttgtttattgaaaatgtcagttaaaataggctcttgtaaagaatgatatatgtatatataaacattttattttaatttaaaacatagatgtgaatagtgaacagcattcgttatttgggtgatgggtacacgaaaagcccagacttcaccactagcagcatatgcatgtaagaaaccggcactcgtactcccgacatgaaaactaaaaatcaatgtttaggttcatagcaaaactgaacagaaagtacagaaagttcccatttctatgttttaaaacatagaagtgtacattcttttatcactcttaatgtaaaaggcctttgagtagaggacacaaattggaattctaagatgtctgtcttatgtaatcacaaccttaatgcatatgtgtgggttctatttcattaaaaaaaaacagatatgtgaaatgatggctgtttaaaaatattttttcttttcaatcatggttcactgcagtctcaaactcccaggcttagatgatcttcacaccatagtctcctgagtagcttggactacaggcatgtcccatcatgcctggctgatgaaatattttgtttttcttttctttttttgagacaaggtcttgttctgtcacccaggctgaagtacagtggcgtgatcacagcttactgcagccttgatgtcctgggctcaagcaatcctcctgcttcagcctcctgagtagctgggactacaggtacatgctaccctgtctggctaatttttgtatttttttgtagagatggagtttcaccatattgcctaggctggtctcgaattcctgggctcaagtgatccgccacccttggcctctcaaaacgctgggattagaggcgtgagccatggcacccagcctaaaatttctaatagagacagggtcttgctctgttgcccaggctggtcctgaacttctgaggtcaagtgatcctcccgccttggcctgctaatgtgttgagattacaggtgtgagccactgaacccagccaaaaatattttttctaatctcctagagtcatcttgcccatacctatttttttttttttttgcaactcattcttatggagtctatccaaggcagtcaaccatcaacctagttttcatagcattaataactccttgttttacactcatttcatcagctcatgtacttttaaatcaaagcacataattagagtaacagatacaattgccacaaaaaggtctgggaacaaacctgattgcttctaggctatgtgcaactccactgtgggagcggttaggcacccacaagccgtgcattcctgtgccctaagtgacgtatgacaggcggacggccagtacactcaactgggagccctggtgcatctagcgagtcagctagctagctgcaggtgcaggctggttaccagtgcctactgtatccactgcatccctgtcatagctcagccccaagagaagccttgtgcagatccgttcatgtgaagtgactgatttagggcttggcctggttggccagacgtgcttagacaggccagcaccccaaaagtaggccaggctataaatatatgtggtctccaaaacatttcaaaaacacaaaacctgttttttcccctgtggatgaacaggaccatcctgcttgtttttgtctataaacagattgatttatgtacctggatcataggctcatagacaaacacggcttctgtttccttagaggtgaaaactgccctctggaggctggtccaagccagaatttaaaatttaacttttgctttggtgccaccaagtggttagctttgagatggcttggcaaatacataatgataaaaaaaaaaaatctgggatgtataggaggagctcagaggatttttagggcagtaacaccattttgtataatgctacaatggtggatatatattataatatacatttattcaaattcatagaatgtgtaacaccaagagtgaactctaaactatggacattgggtgattatgatgtgtcaatgtaggttcatcagttgtagcaaaagtcttactctggtgttggaggttgataatgggagaggctgtgcctgtgtggtggggatagggagcatatggaaaccttctgtactttctgctcagttttgctctgaacctaaaactgctctatcaaaaaagatttattaatgaaaagtcttctatgctacatacattttcccttctggctaccagtgttgcaggtaagagcaagataagatagaaacgtcatgtagagaggccagctgacttcttgggcagggatgatacaacctttatgaagccccacactccagaggctgggtccttagctttgtaagtcccagaaacctttttatttttatttttttttcaatgtatgtagagttgttcagtttttcagggctatatcatgctcaccaaacttacaagagacactttttgaaaagtcagattggcaatatattattttacaattagaaatgtgtaatcaatggtaaaccaaagcacatgtggtagatgagaagttcatttttcaccctgcaggaaatttatatgggcagacaaaccataccaagtaggttgcttggtgaaattgcagtagggtcggggaaggaggttgcatgtcttaaggttactaccattaagacgaagctatcttcaccactttagggatatacatgactctgggctggggatacttacattgctaggcagtacggaatcctggacagtgctgatgataggtcaacttaatctttttctttggatactctttttgaaactctatgctgagtgcatgataattctttcttccctcacacaggacatactataactggcaaggccaatactgtaggcttgctgatacagctctggtctcctgtgaatgttgggtcacctggattagcatttggatgtttcccaaatcatcagccaccatttataggtttttggttaggcggggctagtgtactaattacatgctaatttttaataattgtattctcagaggaagacttatgttttatgttttggtgattctgttcctgaatataggtcaaaattaatatgcaaaattaatatgcaaactccttaatcactttggcatagattcctaatagcaaaacagtacttggctgaagatgggaattatcctggtttattagtctgttctcacactgctataaagacatacctgagactgggtaatttataaagaaaagaggtttaattgattcatagttccacatggctggggaggcctcaggaaacttaaaatcatggcggaagggaaagcaggcatgtcttatatggcaacagacgaaagagagcatgcaagagcagggaaaactgctttacaaaaccatcagatttcatgagaactgattcactatcatgagaacagcatgggagaaaccatccctctgatccaatcacctcccacctggtctctccctccacatgtggggattatggggataaccattcaagatgagatttgggtgggaacacagagccaaaccatatcacctaggttctttttttcaattattattatactttaagttctagggtacatgtgaacaacgtgcaggtttgttacatatgtatacatgtgccatgttggtgtgctgcacccattaactcgtcatttacattaggtatatctcctaatgctatccctcccgcctccccccactccacaacaggccccggtgtgtgatgttccccttcctgtgtccaagtgttctcattgttcaattcccacctatgaatgagaacatgcagtgtttggttttctgtccttacgctagtttgctgagaatgatggtttccagcttcatccatgtccctacaaaggacatgaactcatcagtttttatggctgcatagtattccatggtgtatatgtgccacattttcttaacccagtctatcattgatggacatttgggttggttccaagtctttgctattgtgaatagtgctgcagtaaacatacatgtgcatgtgtctttatagcagcatgatttataatcctttgggtatatacccagtaatgggatggctgggtcaaatggtatttctagttctagatccttgaggaatcgccacactgtcttccacaatggttgaactagtttacagtcccaccaacagtgtaaaagtgttcctatttctccacatcctctccagcacctgtttcctgactttttaatgattgccattctaactggtgtgagatggtatctcatggtgagaaagtttttgcaatctactcatctgacaaagggctaatatgcagaatctacaaataaacaaatttacaagaaaaaaacaacctcatgaaaaagtgggcaaaggatatgaacagacacttctcaaaagaagacatattgcctaggttctaagtaagaatgcaggccacttcatgtctgtgtcatgagagctttgcacagacctcactgcctactggtactcaccagcctgtcctgtgatgcctctctggagtgctcagttgtctccggttctttagtgcaggggtccccaacctttttggcaccaggtactggtttcatggaagacaatttttttccacagatggggcaggcaggagagaatggttttgggataaaactgttccacctcagatcatcaggcattagttagattcataaggaatgtacaacctagatccctcacatgcacaattcacagtagggttcattttctgtgagaatctcatgccactgctgaactgaagggaggcagagctcaggctgtaaggtaatgctgtgtggcccagtttctaacaggccatgggctggtaccagtctgcggccctggaggttggagacctctacttcagtgcagcatcccctccccacctgcctcttcccctgaactgctgccatgtggagtcctcagtcaaggaagcgcacggtatttgcagaggttataaattagtatcctgtggttggaatctgacccatagatctcttttgtttttgccaatatgttgtttttaaaagtttgatttaattgtccaaacttaaaaaatttaaaaatccggagatgcacacaaaactctgagtatcctctttctttccttctttctctctctctcttttcttttcttttctttctttcacagggtctcactgtgttgcaatcatggctcactgcagccttgaccacctgagctcaagctatcctcccatctcaacctcctgagtagctgagactacaggtgcgtgccaccatgcctggttaatttttgtatttttagcagagatggaatttcaccctgttgcccaggctggtcttgaactcttgggctcaagcgatctgcctgctttggtctctcaaagtgctgagattcaggcatgagattactgtaatcgctctggcctgagtctccagtttcattgcaaaaaaaaaaaagtggatgatctggctatgcagggcttatattcccacagcacaataagttattggagtggggcctaccaaaaaaaaaaaaaaaaaaaaaaagtggatgatctggctatgcagggcttatattcccacagcacaataagttattggagtggggcctacatagggcacatttcttccaattatcctctttcttcgcccttccctttcactcatttatgttactgcttggtaacatatttggtggtgacgcttagtttgttgcaaatgcaggataagacacaacagaaaaaacaagcataaggaaagtagtggctccctgtgaactcttgctccctgctcttgtccttgctgtctgcagggaattccttccttggaacctgctttcaggctctttttcttttggaccctatttctgttggtatgtcaactctgattttatcccttgtgctttcaagaggtgtgggctggagcgttgttcaggaaagcatatgaactttgaaatctggtttgtatctgcaagacctcgttttgaatcccagccccatttcttactgccttcagttcccttatcagtaaaatgagggcaatcaccggtctcataggttggtatgagtattaaatgggattttttaatgtaaagcatcacacagagggtagatcctcaaataatagtgctcttgtccctctcttctctcttttttttcctttaaattttttttttgtttcttctttttctattggtccattgggagaagaaacctctcttctttcaagacatgattctttccctttttttgtgactttgatgaaaccacttactcctctttactctttttgtagagcctactgttttttcttccttgtaactttgtctttcccatctgtacatttcacatattcccttttcttggagttagaactctctcataaagactctcttataagaataatggatgacaagtacatttattttgcttcgggaaattctataagaaggcctacgttttatcaaatttctataacaattgtatatagttttgtgatagaaactacattagccttcacagtaatctgttgggatgctttctgtgtatatgtatgtttccctgttcattgtattgtagaaatagagctgaggtcaaaggctggaaagtcatcaggagaaaaaattggttgtggaagggcaacacttcgcctgagatcaaaaggtcctgccaccgtggaagaaatggtatgttatgttcatttacttcctgttctgcttggaaatgttgagttagataaaattccattcattctaaccaaaacttggacttttaattcactgtctatttaaacaatctggaaattactgaaggtatttaaaaaggaaatatagaaattaaggacatgagaagagattgtgatctatagaaattctcagttacctgtaggtgacgtttctagactctatagacagctggactctctcaaaaacttaagtcaaccaaagctctctgagaaccaagaaaatgtttcagagccacctgtaggagtaaacaaaagaagatattgataatgaaagattatattcgtaaactcctcttctcacataaaacacctgtagtcatctttgactcttttcgttcatgtcccatgtcgcttccatcagcagatcctagtggatctacctctataagatactggagtccaatgacttcttaccacccctgcccaccactgtgccccaaggcaccatcatcttatcctggattttgcaatcaccttctgtttagtccacctgtgttcacccttgccttctttccacctgtgctcagcacaaccctcagaatgatccttaaaatatgcaagagaaattatgtcacttttctgttcacaaccctccagtggcttcccatgacactcagaataaaacctaaagtcctcagaatgaccaacatgaccgaactccgtatttcttctctgttctcatttcccatccctttgccgtggcttcctctgcttcagtcatgctgatctccttgctgttcccaaacactccaggtgtatccccatctcaggctctcagtactgctgttgtctctgcctgaatgttttgcccatttatctgcatagcttgctcccttgccatcattaggtttctgcccacacattatctatctcaaaggcctttcccgagcatcctgtataaacagcaactccctccacccctcccactgcccactcttccatgtccttaatttttgtcaaagcaattgtattagtctgttttcacactgctaataaagacatacttgagactgggtaatttataaagaaaaagaggtttaacggactcacagttccacatgtctggggaggcctcacaatcatggtggaaggtgaatgaggagcaaaggcacgtcttacatggcagtaggcaagaaagcatgtacaggggaactgctctttataaaaccgtcagatcttgtgagacttattcactatcatgagaacaacggcatgggaaaaacctgccgccatgattcagttacctcccaccgggtccctcccacaacatgtggggattatgggagctacaattcaagatgagatttgggtggggacacagccaaaccatatcagcactaaacacactaggactctatatctttgattaattttgtctactgtctagctcctttgctcacatgtcttgttcactgctgcatccccagcacctagaataggacctgatataccaaaggaatggaaatctttggtgcattaatgaattagtaaacgattccttttagtttgagaaaagcaaggatttttccctttgaatgactttgtctatatataggtcagtgtttgagtgaaaaacaccagaaggagaagtgacaactagaggcaagaagggtggaggaagaaaactgcaagtttggggtggcgatggtaaggattccaagtggcaagcagcaggcccacaacagcagcaaaggcatgggggtcaaagccctcccgtgggcagatgggatgtcgagcaggtgactgatgcctgtgagctcgggggggcaggggcaaggctctgggcccttctagggtctctctgtatgtgaatgctgtctgggttcctatgtgtttgaagggaaaaacagacagatgaacagttttgaggctgtttcacagagtgggatctcagaacttgttgggtgacaaggtccagggttggtcatgggggtggtttgttgaagtagacacttaaggaacacatgaggccaaggctgtccttaggaatgtcgaggcacccacggtgttgtcagttttggggggatctagaggaagatcctgagtcaaatgcgtgggttctgggagaatgaaaggaccgatcagaggcaaatggcaacgaagagatctgatagagcaaaaagtgttttgaaaaggagatatgatgaggtatgtgaaggaaacccagggcagtgacttctgggcatttggagcctttattttccctctgtggcccagcacactgcctggtatattgctgaaggccagtaagtgtttattgaatgaataagcaaatctcagtggaagaaaggaatttatcagagaagggaagaacagagggaagttgctggctgtgaggagccaggagaatgtcagctctgccttttgctggaggctgtgaggaaaaatgagcagacctttaaacagctcacaaaggaagcaggtcagcaggaaaaatgccacgtcccttcaggaggaggagcatcttctaagggttaaatcattcgtcactctttgttaagcacctgctgtggcaaaggtgcctgaatggaaaaggagcagcttaagatctacctggggaggtaggaaagattcattcaaagataaacatctaaaaatctattcctattttcatagtctgtttagtaaaatagggcaattaaaaatagctcataatgaaaggaaaaagctgtttggtgctaatattaaatttgatacaaatgacataaaatctaatttcaaacactttaagaatttaaaggacttatgggatttaaaacaaatcactcctttaatcacctagcacaaattctgaaaatggtgtaagattctctgtattagtccgttttcacactgctgtaaagaatacctgagactgggtaatttataaagtaaagaggtttaattgactcacatttccgcatggctgggagacctcaagaaacttacagtcatggcagaaggtgaaggggaagcaaggcacgtcttacatggtggcaggagagagtgagtgtgcaggagaaactgtcgcttttgaaaccatgagatcttgtgagaactccctcactatcacgagaacagcctgggggaaaccacctcatgatgcaatcacctcccaccaggtccctcccttgacacgtggggattgcaattcaagatgggatttgggtgggcacacagagccaaaccatatcaattctccacttgcataacctcatactttattcaatatgtgcttgctgagacaggcacagtctaagtgctggtgatacaaagaagaataaaaaccctgtttctcttctaaaaggagagaagcatgaaaagaagctattacaacccagtgggatagggttaatggaagcaggtgcaggatacacagtgtcacaaagaaggggctgatcagccattgacagggattggggaaagaaaggaggtcagaaggctgggtgcagtagctcacgcctgtaatcccagaactttggaagactgatgtgggtgggttacctgaggtcaggagttcgagactagcctggccaatgtgatgaaaccccatctctactaaaaacataaaaattagctgggcatggtgctgggcacctgtaatcccagctacttgggaggctgaggcaggagaatcacttgagcccaggaggcggaggttgcagcgagccgagattatgccattgcactccagcctgggtgacagagtgagactccatctcaaaaaaaaaaaaaaaaaaagggtcaggaagtgtttctctccggaagaaattagtgagtgagttcaaaatggggaagaagagtgttctaggcatggaacaataatgggttttggggacctgtaagctgttcatgagattggagtgtggggtgctggaagtactggttaggtaggggtgatgaggctagaggcataggctggggttaggatatgaagggccttgtggataatgagggagccatttaagaattatgaggggagtaacacaatcagttttgtgttttagaaaaatcccttggttccagggtatgggttgttgagcagcttggatttgagagggtgaagaccaaaggcagggagacaaaataggaaacctctgcaaatcagaaaagatgaggactaaacactggcaaacagaatgtggatggagaagaggtgatagatccagatctgttccgtagcaaataggaaatattagaatggtaaaatattggtggccatttgggtatgaggagtactgacacttgtcaccgtaacttaaaacgtgcctggatagatataaaggttaatacctgttaatttgcatagcctgttgctttatacagacaattcaagatacattgtaatgaaggcaagagcaatatattgtctgttattgtttttaaggtttagttcttgtaaataaaaatgtgagaaagttgtattaatatcttcaaggaaatagatttttatttgctataaaatgcatgattttaataaaatttgagactacaaaacaacatatatttataacagtattgaaagtaacatgaaattcttataatctaaataatgaattctacatttgcatgtatagttgagtagttaacatctttgggcaattccattttcagctatgatgccatttaaagccaagtattgaaataaactgagcagaatttaccaaatattaaaccaaaaatttaaaataatatttttactgaaatgtttagtaatcatttcgggaagaacaaaaatgttttggtaccattaatacataacacaaaaatgatttaaaaagtattattttatcatctcattcttataaaatttccttttttggtgtatttttataatctatacaatatattaatatggtaatacatgtgtaattgataagcaatacatacaataaagttaaaaatacacaataagggtatttgttcagaaaagttttactattgggatgagccatcaaacgtttggagaccctggcctgcaccataaagaccaaagtccttttcatggtacacaggactcctcaagatctagtcatatttgtcactgtgttctccagctacatgggacttctggcatccctctaacatgactctgtgaccttacttagactttgcctatctattgcatcctacttgaagtgtcctctcctgcttatctcctcttcatcattgaaaacacagttcttggctgggcgtgatggctcatgcctgtaattccagcactttaggaggctgaggtgggcggatcacttgagtccaggaattggagaccagcctggccaacatggtgaaaccccgtctctactaaaaaaatacaaaaaattagctgggcatggtggcgcacgcctgtaatcccagctacttgggaggcagaggttgcagtgagctgagatcacaccactgcacttcagcctgggcaacagaatgagactctgtctcaaacaaaacaaaacaaaacaaagcaagacaaaaaaaccccgccacagttcttaagacatccttctttttctctgagacagggtcttgtcctgttgccgggttggagggcagtggcagaattatggctcactacagcctcgtcatcctgggctcaagtgatcttcccactttagcctcctgagtggctgggactaaaggtgcataccaccacacctggttacttttaaattaaattaattaattagtagagatagaatcttgccatgttgcccaggcttgtctagacctctcaggttcaagtgatcctcctgtttcagcctcccaagtgtctgggattacaagcatgtgctaccacacccagctaattattttaattaattaattaattttttttgtagagatggagtctcaccatgttgcctgggctggtcttgaactcctaggctgaagcaactctcccaccgtggccttccaaagtgctgggattacaggtgtgagccactgtgctcagccaagtcaccttctttctaaagtcttccatgactgttagagatataaatttgcttcctcccctgtgatgcttctgtgccttttatatcctttaaaaactgttacatgttatttattttcacatctgtttcctcttctagattgttagctacttggggattgtgttcctggcttttcttttttgaatccgtaacacttagtgctgacactagaaataagtatttactgtattgatttgtatttagttacagagcacattctagatctatttccattaaaattagctgaaatacacaattatgaaccggctccacatcaggctttctcttgtgtatgccctgacaatcaagagattttgttgtataatatcttatttctctcttttttgataaagccttctgaaaccaaagcaaaggcaattgaaaagattgatgatgttcttgagttgtacatgggaattcgagatattgatttaggtaagattatactatttaaaaaagtcttatatctcttaatctgcttaatgtttatgtcttgtttatacatacagccaattatacttttgaagataacaatatttgtggtatgatgaaaagaataacagacataaagataagaataatgaagacctgttccttaccgctttctagctatgaggtcttagtgccaagtaaactttaaaacattttagttagttcttagtcattaaactgtgactactatctcctttagtgttgtttgtttggatttaaaaaatatacataaaatgaattttgtagatgatacatataaaaggcattattatttgatatatcagaagtgcattgattgaattgcaccctttaacagggttactgaagccctatgaacaaggaattagaaatatgaagaaaggggacacacttggcatatgactgagaagggcagttgagcagttgaatttctgcgtatttcttatgtcatcattaggctgtcagggtcttgtttatcagttaagactctaccagttgcaaatgactaaaacaaaaaccaaacaaaaaaccctaattccagctggcttaaggaaaaaaaaaaaggagaaacttattggttcttataattgaaaagtctagcgctagaccttggcttcaagaatggctggatcccaagttctcatgctgtcatcaggatatgatttctcttctctcagtcttggcttcatttcaggcccctgtggtatcccctggcagcttcagtctctccctcatggggccaaaatgactgctattgctccaccctctgcatcctcgtggcatcaagcacaatgagaaagagggaggacctcttccaaatcattcaaacaaaatgcccaatattgtcgctggttggtctgattggctcaagtgagccagtcactgaggccaagaggatggtaggtctgggttgaacgctctggaactgacagtgaccctgaaatacaagggtcaagagtgtgaaaaaggcctgacccttcccatgcagaagcaagataaatgttccactaagtagggcagttgcatgctgggtagagaaaagagagtaaatgtacactccagtgtgggggtttatgtctgcatgcatccacaggtatgcatttgaatcaggtactttctacattttttaaaggtaagaacttgactattttgtttatctgctaccaggtagagtatttgaagctcatttatccttttctacttccactcatattccattttccttatagaattaccaaaagacaaaacaaatttaccttaaaaatctcaactggcttttatttgcaactctagtatcaggcaacacctcaaaatgagtgctctgatgagctgagcagaggaggttgactttagagtcagaaaatggctgaagaaatcagaaacataacaaaaagtgggttcctgttgcaaggttactttcttcgtaaaggtgaaaacagagggaatttccttatcatgccagctaaaactggcccatttggggatttggctattacctgtctttctcctgattttgtggaaggtcagataaacaacttagtttggcttagtgagtggaacttcagcatgagtaactccattttggtttggtctgttaggcctagtataggagctcagtccaaaccaatcacctcctataaattttatttaacaatctattcttattttctttcttgcctgtgtgaacttttatttatcttctaatttttgagacaggatctcactctgtcacccaggctggagtgcagtggcacaatcatagctcactgcagccttgatgtcctggtcccaagcacttcccctacctcagcctcccacgtagctaggaccacaggtgtgtgcctccatacccagctatttattttattttactttaacaaattttttttggtagagatggggtcttgctatgttgctcaggctcaagtgatccccctgtctcgtctgtcaaagtgcagggagagattacaggtgtgagccatcattgccagccctgagaacttttaaaataaaatttctgtactggatatagagatgctgtctgcaacttaaaaacattggtagtttgttccttgctccttggagaaaaatacaaaattttcgtgtggatgcttttatcctctgtgcagacaagaagttaaagctgaaaaccaatgtctgagaacttctctttccaatccttttgcctggctaatttttttaattttaatttttgtagagctggggtctacttgtgttacctaagctggtcctgaactcctgggctcaagccatcctcttgccttggcctcccaaagtgttggaattactggcattgagccgctaagcccagcctcagtctcctgttttgaaattgcagatctcaaggaacaatagaatccatgctgtggtctggagtgaatcacagacacagggcctaggaaaagatctaactaggaataaagacagacatacacataaacatgaatacttttagacatataaggaaatatgtaacatataaatagaggcatcaacgtgtacataaatcaaatttagaatagaaatgtttattcgtacaacagtctagactgtgggccattctttagtggtatttttccatacaggagggaagcaaatgtatatatgtgtacatgaatttttacatatacatacacacatacgcatagatgtatttatgctcacatacagtgaaagagatatgatatagtattgcttacaggcatacatatttggcttgaggccctaaccctaaccctaaccctaaccctaaccctaaaagagaccagcctgggcaacatagtgagatgagaccctgtctctactaaaaaaacaaaaacaaaacaaaacaaaaaaattagccaggcatggtggcatgcacctgaagtcctagccacttgagagtctgaggcaggaggatcgcttgagtccaagagtttgaagctgcagtgagctaggatggcgccactgcactttagactggacaatagagtgagaccctgtctctaaaaataaataaataaataaataaatgaaaaaaaaaagaagaaaatgcagcttaaaaaaaggaaattcagggcactaaacattccttacaaattctttgtaaattaaccagaaatttatttgtaaggtgaattagttatctgtaacaaattcctctaattgacatgaaaagccattatcattacacatgattagcaatgtaatcagttacctagagaggtaaagtgtaaggaaagtaattatttgaagaatgtaagccattgttaaattaggaatttctttcattattcagatctgattagcatgaaatataaatcacaagtgtgatactgatttaacagacaaatatatttacttgtataaatattctcagtatttcttagctttcagaaatgttaattcttaatgcaaattacactgacatcacatttttctgtatttgttaacgtaagtatatatcttaaaaatttaaaaagtaatatggcaacaacgtgacttaaaacactatcctcaaaaaaagattaagaggtgtttattatttgaaaatggaaaataatttaaatgaatttttgtagagagtaatcctgaagatgaaagtgcttcatttgattgtaaagttaagttgtgaacgatgacttttctaccagccagtgtcaacatgggtcaccttgggatgttatccatgaaaaaaattaagcgttctaaaagatgctgagtcctataagacctcacatggtcttgacctaactcagtggaaagttgtgtcatacaagtttcttcttgaatgtttaaagaaactgtgtaagttgtgtatagaactataatgttttctgatgataccaatttaggagatcatccaagcaacttcagaattttagggtttcaaatttattgagatcctgagatgtgtggaaagaagatttgaatgattgtttcaaagtcatttattctataaaatcttttcttttttttttctttttaaaaattttactactttgcttttggagcagatatgaagtctgttatagctcttgaaaaagtatgcagtaatggtgttttaatagtgagaattacatttcttcctttcttcctaggatcactttttttttttttttttcagacagagtcttgctctgtcacccaggctggagtgcagtggcacaatctcgctcactgcaacccccgcctcccgggttcaagcgattctcctgcctcagcctcctgagcagctgggattataggcgcccaccaccatggccagctaattttttgtatttttagtagagatggggtttcaccatgttgaccaggctggtcccgaactcctgaccttgtgatccacctgccttggcctcccaaagtgctaggattacaggcatgagctaccatgccgggccagatcactttctttttatagtgaattcaaaacaatgaacactatagaaagtcatccttttcagataaagccaatgaagttttagaaattttcattaaaaatcattctacattgactgcatttttgatgtttgacttgtgaattgtttgaaaagcattgatatttataaaaagtcttaggaaaagtaaggcctgaagaccttccatagaatgagacgtagttgcatattttatgattaaactaacaataatgatgactaatcttcaaaccctgctatttgccattttatagatttgaaaactgacattcagagaagtttgataacttgcccaaagttacctaagaagttaaaaactaagatttaattctgaaactttgataccaagatttttaaccgtaaagatttttaaccgtaaatatcttatatttaaaagttctgtttaagtgtttaaaaagttaatggaaattatatgttgatctgtatcaccaaaacaagtttgtcattaataataatgtaaatgtagtccagtggcagtaataaaaatggccactagaggtcagcacttagctgctatatgtggtaaaaaaaaattctctttacagttaagaaaattctttttgagatggggtctcactatgttgcccaggctgatctcaaaatcctggactcaagcagtctccctacatcaccctcccaagtagcagggattacaggttaaacatttactattttttaaatctatttttttctttttttctcatgtgtttctaaacattatactgtaagaaaattctacttttttttcttttttctttttctttttgagacagagtcttgctctgtcgcccaggctggagtgcagtgtggcgcgatctcggctcactgcaagctccgcctcctgggttcacgccgttctcctgcctcagcctcccgagtagctgggaccacaggcgcttgccaccacgaccagctaattttttgtatttttagtagagatggggtttcaccgtgttagccaggatggtctcgatctcctgatctcgtgatccacccgcctcggcctcccaaagaaaattctactcttctaatggaatattttttgccagattgcattcaggtttattattgcagtatattgtaattttattataatcaacagatgaaaataatcttagtggctatcttatgttaatatgctgtacctttataaaaagtgttttattttgctaaattttcttttgcttttctcttaaatcagagctataatattttatcaaaaaggatgaattttaccatttacttatcctgtaaagatgtcttaaaagctatgttcaccaaacccagctgaggatgagaaataaaataaaaaagcgatgtttatactttatgtattaggaaaaatatataacatatttagctgcatgctgcatttttgaattcatatagcaaattactggtttttaaaagatgtatagagcactgtattacatgcagtatttccagcacaattatgtagctgtgtaattggcatttttttgttgtttctacaagatcaggtattttttgaaggcagataccatatcttgctcagttttaatcccagctcttaccacagtacctctccaagagtaagtacttgataaatgtctgttgagagtcacaaaagtagtgaattcacagggagcatgagtcctaattttattagtttggagctttggcccttgggcaaattattaaacttagaatcctaattttcacatctataaaagggacataataaaaataatcttatagggttgccaaggaatcaaataatctgtataaagtcctgtcacatcataaataataatgggtgtaggtattatcattcttagtgatgatcactaatgatgattactattagtagttgtaatggcagtggtaatagagggagaacatgtggagctgtataactagactgtatcagcagctctgggcagtactgagtgtgggggtttttcttcacttttctgctgtgccagaatgagtgcatgagcgagattatgcattttggactgtgaggttagactatgggcatcttgaagcagcattttctttcatttttgtgactagaaacccaaagcagacattgcaagtcagtgcaggtgaaatctacaacatggagttcccgggcttagtgcactagacaatgctgctgagcttcctgaggtataaaaaaaaaatcatgtaccaagttgtttctttttccctcttatagccaaggatgtgtgtgtgtgtgtgtgtgtgtgtgtgtgtgtggtgtagagagagaaattgattcagtgtccatcagtgaacatctgcatccttgtcattgtctcccccagcatttaagagtgtcatctatactgttagtttctgtttctgaatggtccgtacattttcttatgtcttttatctgtatgcatcttatttcttcctcagctagctttcttaacatgtgttacccatatgtcattataatctttaggtagttgtcttaataaatgctacctgtaaagcctatgagaaagagttaaaatggtagagtaagcaaaattctgaactggagttctacttcagcagtacttcaccttaacattctggctactcttcttttacatcctggctatgagaccagagttctggacttcactttccccagtgcatgctaactgtgcctgtgcaaaaagtatgtaagtgtaattacacaccctcctcttgcaccacccattcactagcatttattatgcatgagacactgaattagttactacgggcataaaagactgagtaagctactcaagatctgttgggagtttattcttttagtaggagagaaaaaaatacacagaaaaataaatgtcagtgcagagcaatgttgaatttgcagtctaagacctttttattgaaagtgtttcctgaggaccagcatcacctgggagttgaaaatgcagaatctcagggctgcagaactactgaaccaaaatctccattttgccaagatcctaggtgatttgtttgtgcatttaagcatgaaaaacactggcagaagggtttagagaatggggatatctcttccagctgtggacaaaggatttcatggaggagagagccttgaaggagagaaggattttgatggtggtgctggtggctaggaggaggttatcctgggcaaaggcagaaagcagcgaagatagcattttgagtggtcagatttatgagggtacagcattaatgtagtgtagtgtagtgagaaccaagggttctgtagattagactgccactagggtttagttttaaagataaacattggttacacaaggaaaaaaaaattgtgtgtgtgtgtgtgtgtgtgtgtgtgtgtgtgtgtgtatgtatgtattatggattcatggcttcctgttctattcactggagttataatatattaccatcattacttatttggatatttaaattatccctgatttggtcagtgtgaactcttgcactctgacatctatatccttttcacatgttcccatcattttgtgacactttcttactttctggtacaagatagtcttggttcatattgcactttgcctgctctagccctggaatctgccatttttctgaggaagtcttagtctttctaatggagaatggtatttaagaaccaagatttcggtgctttgtgtactcattgtagttgggatgtcatgcttccaggactgaggaatgtgtatacacatgcatgtatgcatttatgtctgtatttttataacacctcaattggagatatatatatatttccagtgatatctacaattctaattccatagggttcattcttattttctccctttccctatttatccttttctggcagtgacaaacttgattcctgttgttctgtatgtatgtgtctgtgtatgtgtgtatgtatgtgtgtgtgtgtgtgtgtatgtatgtgtgtgtgtatgtatgtgatccatctccatatgtgtaactaatctcttatcaccgtggctgctgccctccctccccattcccatgccatcctcaccacatctgtactctcccaccccatgccaggctgcctggccatatagaagccctccttaccttactagaggtttgatccctctactagttcactgcacccccaccctacttctgctctgatcctggtgctcttctgtaggccacatctctcccttttcttcctagcctgccttgtgttaggactgaactgatgggaagaggcatagcttttatctctctagaccttgtggctcgttcagagaagtcatacaaacttggattagttcatccttaacctggaaggaaaggagatgctggagcttttccctggggctttggcgtttccctttcacatggaggtttttcacccaagtcccacatcacatatacaccatctctttctggttgctggtgcttctagggtgctgagtggaaatccactgagcctcttgggctcccagacagctggggcaagtcctaagtactcctgaagatgctggttccaagacatagaatatggaacccaggcaacttagtagaaaaactgaacaaggccgccactttcatgttctatcccaaactggagaggggctcagaaaaggtaccttgattccacaggtagacagatgtcttcctctgcttctccccagcttgactgctccagtgcaagctgtcatcctttgtctttttgtctttgggcagggaggactggactccatctcagttggcagtgggggactggtggaggagggagggagagtagtgactattaggaggttggggaaggggtgttctttaagtttcctgctagggttagtcacagccacagggtttctttcaggggatcttgttctacccatgggaatgccagaggttcccaactgatgggctccaaggttgggtagggggcaagggtggcagctgcaaacctgggttcagtggacacattgttgaaaagtatctttgccaccttgatgtgtgtgtgtgagagagggtatcttactgttttaatttgcatttaattttgcatttaatttgaaatatatttatgcatgttacttttagcaagtaattttcctgttgccatttttctcagtcctttgatgctatttcatttattgttaattttttaatattatttttgatagccaccacaatgtttgaagctggaaaggacaaagtaaatccagatgaatttgctgtggcacttgacgaaactcttggagactttgcgttcccagacgaatttgtctttgatgtttggggagtcattggtgatgccaaacgaagaggattatgatgtgtacactccatctctgaagaaacaacccatcgttcttttttttctcttttttaaaaagtcctataagatctgtttttggacacctttactaactctggtttaatttcatgtgtatggaatatattctttgaaatataattttggtaattttgatttctgggcactttttaacattgctgatgtagtatgcttaagagaaatgacctaaataaggatcaattgtaatattcattcaaaaggtttttaaaagtaagttttaaggagtatttctcgacagatgattttcttctccattaatacccatgctttgtttttcacatataaatagatgatttcaatagctttgtagttttttttcaaaatcttaatgtaaactaggattggagtatgatttacctcatagtatcttcactgtgttatcctagtttgaacaggatatgttcaggaaatgaaaggtgaattatgccccttattggtctagaagcattggtttttttttgatcctctgagtaagggaaggaagattcctgtggcatgttgatttctatggccaactttctctctttgtaaaacaaagattgattgattttcttgtatgcttctttatacatgctcttaaaacttgtggttgaaatctgtgctgtgtgtgtgtgtctctgcatgtgtaaaagaagggtaaaaaagagatgggtagggtagaactacttgcatttgatttttttttcagtccttaaaacattatttctttttttcactcatagccacttttatgttaccttttataagcactccagggaagattttatatttttttgtagagtttttggaaagatatttactcaaaataactatgctttagaacttttttttttttttttttttttggttaaacagcagcactttttagttccctaaactttagaagaaatgctatcagaaatagatttccttccagtggaaagaaaggaggaagggagaattgagaaaatatattagtctattattttagagttctaatacactctaaattatagagaaaattgagagtaaatgactgtcttatcactcttatttgacatttcgtaggtgtaagagaaatggaaatgaatggtttcaacaaagatcatttaatacagcagagcatggcatgaccaagcatctttgtaaagtgttagatggaaaatgctgtgtgctgccatggtaatcagaaataataacctgttagggatgtattctaggaaatcagaagtagttctcttttcttgctggattattgcttagataactcttgttttctggtaaaactttagttgtattgccatccactcctttttcaaatgagtttaatgccataaagctgatattctttgtccgattaatttgaaatctgcacagaagctgttttagtcattaatgtgtaacaaaagtagcttatagaatatggactgccttattgctgttgcttatcatttgaaaataaaatccagctcaggttgtaacttgttggtactcgtttagtgagttcgttttggaggttctgaaatacctattaattcttaatattacctctcttggaaagacacaaaaaaagagctgttatttttaggcataagatgacttaggaggcccatagaaacattctcgtttaaacaacaacaacaaaataaatttatcagcactagatattagatttgaaataagtcattgttcattattgatggttgtcagtttctccttcctttttgggcatgcataaagacacacttggtgctgattccatgtgatttatggaatgtcattttcacaatgatctttctagaatttgtgtgtaaggttgtgatatccatgtacagctgtaactatatatacttgtctgttagcattcagtggaccattatcattactatcatcacattacctgggcttcaactgggcccaagtactctatatactacctgtaataggtttttccttgaaatatccttatctttcacctctacagctaaactgataacaaggtcagtttctttatgtcattttattcccatacctaaaattgcatctatttgtgagctttctgcctttttgtaacgctcagtgcaccaaaagcgtctgtttttagtgcagtcacataatatataagtgtgggatacccttctgcagcttcagtgagacaaatcactttttaaaaaacattccattttattggcatcactagatgtttttaggaccctgtccttttcacttttctgtaggctttttttttttaaatggaagatgattattttgtttgttcttgatttcctgttattgaaaacagcatcttccttcttgcaatggccactaatagcacacaatgcgttttctttgattgtagcagaaaatgcaaatgataattgtatgttgggctcgatgaggccttgaacatagctgagtcctaatcagatgtatatactctgatgattacaaataggtacatgttgggtttctgtgatgtttcaaaaatacaattatataattatgatgtaaactctttaagaattcaattataaaagcaataatcaggtaacctctatttggagctgctacatccaatattgtgactgaaaattaactaaagagagataatttttcaaatgatgtataatttgcaatattttcccttgcaactttagcaaatacacatattccaagtaaaactttatttagtcccatgttatttatttgtttattattgacagggtctcactctgttgcccaagtgggagtgcaggggtacacatattccaagtaaaactttatttagtcccatgttatttatttgtttattattgacagggtctcactctgttgcccaagtgggagtgcaggggtttgatcatggctcactgcagccttgacctacccaggctcatgtgatcctcccacctcagcctctcaagagctgggactatagatgtgcaccaccatgtccagctaatttttgtacttttgtagagatggggttttgccatgttgcccaggctggtttcaaactcttgggctcaagaagtcttcccgccttggcctcccaaagggattacaagcacgagccactgcaccaggccagtcccatgttatttattgctagacctttatcacttctagagactccctggtctccttcaattattgcctgtctaacgtagtagcaaaatggagttttcaacgtaatggttcttctaaaaagagtacagttatcaaccaaagatgtaaaagattgatcatataatggcccttttgctctgtgatatatctaaatatatatggataccaataacattgccattactctggtggagatactaggttagaaggacagttaagtgttttacccaagctattagtgaatagagacacaagagatgctattcaactcacagttccaagtattagtgccctgtataaaatgcacatttattatcttcttgacacagattgaaggagataaagtaattacaagttcttacacatgtcatggtgataaaatatttctaaaattgtgaagtgtacaaaatggtacagcctgtccctaccctattacctgaaaacctagttctaagaaatgactcatggttattatctgctaggagtgtgaaaattgaatgtgacatctttaattcagttggatacagtcttcataagacttaagtataaccatagatatttttcaagcagtaacagaaaggagaaatttgaaaaaacttcttaaaggtaattttgagtcaatatttaatgttttgaactgtttgtgccatgcaatagtattgactatgcagataaaacattctatttttgtgggaaaaaaaggtttttctttttttgatgaaaatcattacttaaactttaaaaacttttgagattgaaatttgagagtctcttaatatatgaaagtgtaaattatattttggaaccattctaaaatgtattgtttactatatttatattaatagatgtacagatttagtcatatgttgatcaaaaagtgaattatttgtaaagctattttatatatatatatatggttttttttttttttttgagacggagtttcactcttgttgcccaggctggagtgcagtggtgccttcttggctcactgcaacctccgcctccagggttcaagcaattctcctgcctcagcctcccgagcagctgggattacaggcacctcccaccatatatttaaaatatgactccttaaaataagtactttttcatgaaaaaactgatgactattttcatcataaatagagttagagttttaataattttagactctttaatattgtttaaataaatgataaggataacacatgtgattgttcaggcctttatggttttaacatatctttggtatattttttcttaacatattttatagaaggtataacctctaagttctatttaaaatccccaaattatttgccgtgattcagtaaagatgcatagataagcactgccataatactgttaatataaaatagtcataagctgtttgtattataagatggaggtttacccagggtgacactttatcctttgttccttcattcaacaagtattgtgggagtagtttccgaacaatagtgtaagtcgataagtagaagaaatgtcaacctatagttgttaggcagtatgcctttgggatttattatcttcattgatacagtttgaaaggcctattagagctgttggaaatccttgcaaatactatgctaattccatatgttaaggggggcccagcaatctgcattttgacatgtcctccaggtgatcctaatggaggtgaatcctagacctttactttgaggtctctgaaggccctgacgtagcactacagtgagaagatagacatgacttcaagaacttatgatctgtcaaggtaagcagagacatgaagagatttctaatacaatcagataagtgctaacatggactataaggtagtatgacaaaacgctgcctatgacagtaggatagctcttaattttacaaagtagccaattttctaaatataacttggtatgctggaataattggttaccttagtgaaatagacttcttgattgacacactatggattaatccatatgatggttttgcctcggtttatatgcagtgtttgatgcttaccaacgatacaaataaatattagctatttacttacccttgtaaggtattttatcctcttatagttttgcagacgaggatcttctgaaacaatggttttcaaagaacatttctgcttttcgtggaatggaattgctatgcacgataagaagactggcctctctcaaagacagcaagtgctatggttttgattatgcaaaagctaagcttataaaaatgctactttaattctccttgtctagattttcttttagccagcatcccttcatgtatgaggtagggtactgaacacaatttatgctttatcttatatgtcatctgaaaaataatgtttctgatttttaaaaattacagattcagtgaattaatttagccttggaaagtggtttccctaaaagttagaatttctacccccttgtggtttagataggttattatatacatagtttgattagttttaattcttaacaactattcagtgaaaagtaaatggaaatatacaaatgaaataaaccaaatactttctttcccataaagcaaaacatgacctcttctgcagtagcactggagaaaaatgcggaaataaaattctgcaaattcggggaatggtggaagaatgctgtgatatttgagagaaggtccatgggcacctcgtagccatcttctggcaacatccctcctttcttactcttttctttgctggctctcttcttctttattcagcctccctccatggaggctcctcaggtgtctgacctgggttcctttcccccaccccaccctcttttcttaggtgactcatttattcccatggcttttaacatctttatgtttatgactccaaagtacatatccacagtccagacctctcctctgagctcggaactcaattccacttcttccttgacatctccacttggtgtcttgaaactttagcatgtccaggataacactttagatttttcttaaaagttttgtttctttcagttttctctgacaggaaatggcatcagaattcccctcactgctccttcacctgctgcaccaaatgcatcagcaagttcttttcattgtatctccaaactacttccccaatatggcccttcttctcggtttcactgtcacatcttcacatctctgggctgctgctccttcttcagctcctgccctcctccattttggactgtgaaaatgctatggcaggacatgagggtgaagctttttttttccctaagtgagaatgtaaatgtctcatttctttcttctctggaagggcttgatattaagcccctctgtctctgagggaagagacacttgtttttggatgattcatcttctgccactgtagggcccacagagtctactgtgagaaagctggaaggacagaggaggcaaaaggaagaactttcacaggtgtagactaaaggctataaagaatgtgtgtgtgtgtgtgtgtgtgtgtgtgtgtgtgtgtgtgtgtgtgtgtgtttaggatggggagagtgatgcctttagacattcaaatagaagaagactgtttcttgttttttcataggcatattgtggccacatggagcgtttagacaggaacaaaagtcttcagaagattcctgatctctcagcatggcacagaacaggaggagtaagacccatagtgaccacagtgaggggtggtatttgaacactgttagggttcttggaaacagaaacaataggatggagatatacatacagctccaaacagaaacagtaggatggagatacacacacacacacacacacacacacacacacacacacacgtatatatatatagatgtacatatagatatacacacacatctccacatatatacctacacaaagacaaatatatagatatgaacattataggaattggttcacatggttatagaggctaagtcctcgaaagtctgttatcgacagccccgagaaccaggaaagctggtggtgtaattcaatgtgagtcctaaagcctgagaacaaaggtgaggattttgcttgtcagcagccttgcctgttactgtccagctggagtgtcaccccatcagcctagacttttttggcttatatctgtggatgccccactcccagcctctttatttgcgatgacatgacctaacacatgtaagacttagaaaaagagaggtggttccctggacacctggtggaatggtggggaagcctttgtgcctgcacttgggaggctgacctaaaactagcatgagaaccctgtctaggatatgagagaatgatcctttctgctacacattaatgggatcacatccctcctcttcaggcttctttagtggcctctacggccctgtccaccccattgccatgctccccctagctctatgccctggtcacattgaacttcctttcactttcaatatcttacctttctcagagcttttttacttgctgttttctctgccgtgaacacccttcctctttttgcatggccaggtccttgtcttcctttggctattagcttaaatgccacttctttggagaaggctttcttggtcttcttccttcccttgttctctgtgttctcgatttcagcccttgtttgtttccatcataacacatcgctgtttgtaattattgtattagtaggctttctatgctattctctacttgaatatcattcaggatgagatcgtttctgtctttctcactgttgtagctgcagcaattagcatggagcctggtgtatattgaaaattaaaaaaaaattgttgatgaggaacttcaaatatttgttgaatgcttactgagtgcccagcacaggaaacggatcacctcacctcatctttaccaatccttgaagtaggtaatgattacccccactttaaaaatgaaaaaacaggcccagagaaattaaattatttgctctagggcacatatttggttagtggcaaagacaggatttgaacctggttttaagtcctggattctctccaaagttgattctgttaatattttaccagaacaatgtaaattgtactagtcacttgactaagaaagttgagtaggggattaaagcctggagaccaaagttatagattcaattaactgctctctacagcctgagtaagggaatagcttcacagcggtcaggccaacacgaagtagatttaaatggttatgtgatggattttaggttggaaatcatatgctcaaggactttagtgattctttaggtttgaaaatattaatattagtaattattgtctggaactttttaaaatcctgtgatcactggcataataaattcttactagtatgacttaaggaaaaagattaagacaagaaaggttctgaccatttcttggagaatgaggatgagggctggccttagaatccttccaagcttcttctggttaaggtgatttcatggtttaattgatttgacttggacagtgggtattttgctttctggagtcattattgtttatgtttcagaaaaggatgatttctgtgttctttaggcttttttatgacagtatgaaagaaaattttaagaagtagcagcttgttatcaaatactttgtgtgccatttaccatttgaaaatggaattagcatttgaggtttcatggaccatggaaagttattaacttcttataaaattctgaggatatttaagttctgagaaatgaattgggaagttatattgcttcagaagcccacttctggactaaaactctaatttgtatgccgaaggagtgagtttgtagagatgattctaaattcccttaatatatttgctactcaatgctttcctatacataaagtcagtcaatttcaacatattaacttgtgcgttaatgaataaggaatactcatgaggcttccctcaatattgaactcagactgtaactgtgttgatttaaaaaatgaaatcaatcatgttcctttccagagaatcaaatattcatttgtaatggggacatccttattgaattccaatttgaatgaggtccagggaaattctgaaataggaagatagactgaaatagagacagtggcattttaaagagggctcattctgaaatcctatggaatgtgtctgtggttctccttttcgacttttttgataaacataatcactttggtttattcttttaaaattaagtagctatattccagaaaggttattgcagatgatctgatgtttatttcactaattagaaggagattttgcactgtgtcacaacaccaaatggcctagtatggctgaagttaattcactaggctatttcttttttctaccttggctgaccagtaggtggcattgcctgccctggctgccacttcaagtcttctgtccgcttgggaacctgaatagccagtcaagcatttgttatcttcttgtatccattctgatttgtccaatctgatttttgaattcatttgtgatcctgctaaggatcgccccttgacaactaaagtgtctttgacacccagatagcttctttttcaaatcttggggattataatcatgtagtcccagagggtattcagagtgaatgactaattctacctaaccaaccaaggttcctctagacctgagaggtgaagaaatgactgagtgctgcagtgcttcagaggtgattatggttaatattctgtgaaagttacagatgacttcataccaagcataaaattaaataggtacattaataactttaaaaccttattcatgactttaaaacttttaaatgagattcaagcaaacagttgtgaattaaattgtcctttgcttgaataaataaagttgaacttctttgcatttagtaatcaatattagatgataaatcatatcacaaaagcctttattttgttgagataaaattatggccagacatcgactcataagatgactattttggcagctctcagttgaactaactttttcttctttctgatgtttttcagattcaagtaaattactaacacttttgagctataacactgtgtatccctttacttattgtatattagctctattatcatctgctcttacttgggagactcattagctatagttaaatgacatttgttagaaacaagaattttaaaagttagaaccataatgttgtctaaaaatcataaaaatataaaacttcttcctaattgaccatatttaccagttcttgatctagggactgtatgaatgacttcgtgctgctgtatgaggtagagttgcctgtaagagaagaaactgaatcactgatcagtaccctcaagttagaatgttttctctgagctttataactggatgtggcatattagaggattacagggaatagcagagacataaaagcaaaggggaagttgaaaggaatcagtggcttctagagcatttcccttcactacacctactgaaaagccctgttgtaaccattgatcttactttaaatgtctgaattcttcatattactttgataataaggatttcataatttccggagcttagtaattggttccaggagtagcacagacaattaggtggtgaatgtcagacactaaatttttgttagatttattaacatagcagatttgtggctcatttttacactactgtttgttttctctgtccacagtgttttattaggtatggcatgttcctcctaattggaaccaaatatcccaaccaaacatcagaaatggattttagtagcctgtgagaaatcatcttctcctaatggacagtcacagggggttatctatgtgcctcattttctatggatctggagaattatgactcatctctttgaagccacaaaaaatctccactttgggcatcagtctcattgccgttgagagagtatgcttcttttgatgatcttgggacctcttattgtttctgggcccgatatatggaattgtataaaaaccatcctattagtcaggattcaatggcagagaacagaatctgccctgttttaagcaggaagggatttagtatagtttatattaaacaaacccccgtaattattagtaggactcaagagaagacgctaagctgagaagacagacactaggatgaattcccaaagccttactccccaggtgggctactgaaggagctgctgctctgatcaggaagcttctcctgctgaagtggtaccaactctgggaccaccaccagttctgccctgtctgcacgagcacaggcaatgcctcatacctgatctttctcacaattaactcacttctgaagtcaagtcttgagtgcgtgtgactgacagaactttaatcctatccagaacacatagctgcaaggaaatctggg

SEQ ID NO: 1475 - DNA, 2643 bp, Homo sapiens
gctgggcgggcgggcggctgctccggtccaggggtggaggtcggggccctgacccgacgcagccaggcggaagcgcggctgccattggaggctgcttttacctgcgcggggcccggggcgcaaagtccgaggcgccggggggaggaggcggcggacggcagcgcaggtgggcccgcgctctcggccctgcaagatgcccctgaagctgcgggggaagaagaaggccaagtccaaggagaccgccgggctggtggagggcgagccgacgggcgcgggcggcgggagcctctcagcgtcccgggctcccgcacgcaggctggtcttccacgcgcagctggcgcacggtagtgccacgggccgagtggagggcttctccagcatccaggagctctacgcccagatcgcgggcgcgtttgaaatctcgccgtcggagatcttatattgcactttaaacacacctaaaattgacatggaaagactcttaggaggacaactaggactagaagatttcatatttgcccatgtgaaaggaatcgaaaaagaagtgaatgtgtataaatctgaggattcacttggtctcaccattacagataatggtgttggctatgcttttataaagagaattaaagatggtggtgttattgactcagttaaaacaatctgtgttggggatcatattgaatccataaatggagaaaatattgttgggtggcgtcactatgatgttgctaagaagttaaaggaattaaaaaaggaggaactctttactatgaagttaatagaacctaagaaggcatttgaaatagagctgaggtcaaaggctggaaagtcatcaggagaaaaaattggttgtggaagggcaacacttcgcctgagatcaaaaggtcctgccaccgtggaagaaatgccttctgaaaccaaagcaaaggcaattgaaaagattgatgatgttcttgagttgtacatgggaattcgagatattgatttagccaccacaatgtttgaagctggaaaggacaaagtaaatccagatgaatttgctgtggcacttgacgaaactcttggagactttgcgttcccagacgaatttgtctttgatgtttggggagtcattggtgatgccaaacgaagaggattatgatgtgtacactccatctctgaagaaacaacccatcgttcttttttttctcttttttaaaaagtcctataagatctgtttttggacacctttactaactctggtttaatttcatgtgtatggaatatattctttgaaatataattttggtaattttgatttctgggcactttttaacattgctgatgtagtatgcttaagagaaatgacctaaataaggatcaattgtaatattcattcaaaaggtttttaaaagtaagttttaaggagtatttctcgacagatgattttcttctccattaatacccatgctttgtttttcacatataaatagatgatttcaatagctttgtagttttttttcaaaatcttaatgtaaactaggattggagtatgatttacctcatagtatcttcactgtgttatcctagtttgaacaggatatgttcaggaaatgaaaggtgaattatgccccttattggtctagaagcattggtttttttttgatcctctgagtaagggaaggaagattcctgtggcatgttgatttctatggccaactttctctctttgtaaaacaaagattgattgattttcttgtatgcttctttatacatgctcttaaaacttgtggttgaaatctgtgctgtgtgtgtgtgtctctgcatgtgtaaaagaagggtaaaaaagagatgggtagggtagaactacttgcatttgatttttttttcagtccttaaaacattatttctttttttcactcatagccacttttatgttaccttttataagcactccagggaagattttatatttttttgtagagtttttggaaagatatttactcaaaataactatgctttagaacttttttttttttttttttttttggttaaacagcagcactttttagttccctaaactttagaagaaatgctatcagaaatagatttccttccagtggaaagaaaggaggaagggagaattgagaaaatatattagtctattattttagagttctaatacactctaaattatagagaaaattgagagtaaatgactgtcttatcactcttatttgacatttcgtaggtgtaagagaaatggaaatgaatggtttcaacaaagatcatttaatacagcagagcatggcatgaccaagcatctttgtaaagtgttagatggaaaatgctgtgtgctgccatggtaatcagaaataataacctgttagggatgtattctaggaaatcagaagtagttctcttttcttgctggattattgcttagataactcttgttttctggtaaaactttagttgtattgccatccactcctttttcaaatgagtttaatgccataaagctgatattctttgtccgattaatttgaaatctgcacagaagctgttttagtcattaatgtgtaacaaaagtagcttatagaatatggactgccttattgctgttgcttatcatttgaaaataaaatccagctcaggttgtaa

SEQ ID NO: 1476 - protein, 313 aa, Homo sapiens
MPLKLRGKKKAKSKETAGLVEGEPTGAGGGSLSASRAPARRLVFHAQLAHGSATGRVEGFSSIQELYAQIAGAFEISPSEILYCTLNTPKIDMERLLGGQLGLEDFIFAHVKGIEKEVNVYKSEDSLGLTITDNGVGYAFIKRIKDGGVIDSVKTICVGDHIESINGENIVGWRHYDVAKKLKELKKEELFTMKLIEPKKAFEIELRSKAGKSSGEKIGCGRATLRLRSKGPATVEEMPSETKAKAIEKIDDVLELYMGIRDIDLATTMFEAGKDKVNPDEFAVDETLGDFAFPDEFVFDVWGVIGDAKRRGL

SEQ ID NO: 1477 - DNA, 199104 bp, Mus musculus
  misc_feature (1)...(199104): n = A, C, G or T/U
gagcagccgggaggtagggaggttggaaacgccagaatccatggtgttggaagaaggctcatggccaggacgactggcgcaaggcaagttatctccctacattttgtctgtgttgtgccgggcttgcctctccctccctacacctgatagtgccaagtgtgcaagcagtggaactataagctaagcaccaccctggtgatcgttttgccgattcgtaaacactaagctttaaagatttagcaatttgctacaccacaagataaaaaagcaactaaggcagatggccagacccagtgccttaatccaaaactgaactagctatcccttccaggacagaatccagaaaccaggttgggcgtggggaggagtgaggggggcacagagttctgtttccatcaaggatggagtaggcaaaactcgattccttcttcccactcatggttttccctcagtgcttctgacccccccacccccccaccccacccccctctgatgctcaggacaaagcttgatctgctctgtcatgtaaagtgcggtgtggtgggcagggtccagaaggttacctctggcaagtgactaagggcttgtcaaggccagggaatgctcactggcaaggggagttacagtgttgctaagtcggatccccagtgaggtgcagtcagccacgggaagggggcggcgagagctagcgtgctgaagcctagaggcgggagagggaggagagtccgcgcagagcagagggaggcgcgcgctcagagcgaacacccacttgcatccgaccctggtggcgcggcgcggggaggcagcagctgagacagcaccaggtcagagcctttgcatcccgcccagtctgcccgccagcgccaggaccgctgaggatggaggattcccgggagacttcgccttcctccaacaactcctcggaagagctcagctctaccctgcaactgtccaagggcatgtccatcttcctcgacgtaagtatagctgaagtagttaggtgggcgcattaggcatcacctctgtgagaggggaggggtcaggagcagcggttggctgctggcattgctatcagacctccactcaaactatctcctatctgctgttccccagaggaccctaggcaaataaatgcaagagaaaggactgccacccaacttgtaaagagctgtcccagacctgcagctttgattataagctttaaggagcccccaaagttcgacttcccagaacctagggcttctgcccggaatggagagtctcccattgagcagtgtaggacttgattccggtctcatccctgctgcccaatttactggcaggcactctctctcccttgtgctgggagcgctgacggaagccttagacattgtgatgcccctccagctactcccagctaccttcaaaaacaatttctttgaacgtattcgttttcttattttacaacagaagccaaggtctcttttatcataatgatttttttttctcttttggtgcccgctgccttccctattattctccccaccaccaccacctgccctgcctaagttgtaattactatcattaaccttctcttctagcttttgatggttttccctatggtcccattccttgcttgggaattgacttccttgcttcgcatctctagcctgaccattctttccgtgctattttgtctccttatgctgtaatctctctccccccccccctctttctctctcagttttagatttaatttgctcctagattccgcttcgctttgtccctaatgtttgtttctcacccggctgccttgttttgtttcctggctttcctgttcctgggttgcttgccttctgggttctggctcttctagctgctgttcacatgtaaaattcactctgttcccccaggtagtgtctggcttgctcagtggggacagttctagccgctccttttttagcatgatggaaaatgggcaaagcatgcaaaggagcctcgtttgtccctgcccctccccttctctaagccatcactccttattaaagtccaagcatgaaggaggtgggccagaggctaaatacacttgagtatgaaaaatgaaaatgtgaggacatcaactatcataatggccagtcagggattttgaagataatgggggaggggcaaggagtctttgatttgtcgtgaaggaattatctagactttttaaaaaattggctgagaaatttatatcaataattaaaacttgtgtaagacttaatcgaagcttcaaccccacctccaggcagccttctccccacatcaccatgcagtgccaacacaggattcaggctttgggggccaaccattttctccccatgaaaacatgatttccactttttactgcaacacattgttgtaggttttttttttttcttttaaatctctgcaatggttcagtctatgctctaattatttcttcatgccctgcctccaggaactaggttgggtcattgtaaagacagggctgcacacatgagtgtgcaatccccaggatcaggagggaatcaggaccttgctcatccagactattatgaggaagaaaaccaatctgccaagaagttagtcctgaggtcaagtgggacctctgtccttttgtgcctaatctgtgctctgccctctgaggacactgagcactacccgtgcttttatcttattgcctctaacaaatcctggagattctctgctgaggaatgtatagagactatgaaagagcaaagaaagccacccgacagacttaccattctaagctcacgtgttcaacagcaggttattaaaagcaaaattttaaatctcatcttattatgtaggtgcagttgttcccaagttcttttaatgtaagttccctgtcctgatggagctttcatctataaacagggctggctcccttaccttcttaagtctagttccagaattggaaaatacaaaaacaaaaaaacccagaaaaacaaaaaccaaaaaacctgattccacaagagaggcgttaacatgcctgtttttctttgaaacatagctttaaaaaaagattaactgcagttgggttcttttttcttggatagaaaatatgttgtttacacattcctgagttattttgtgaaaaaatgtaacactctggtgaattgtgtgacatgaaaaaagggttggttatttagagacctctgaattattcatttctggatcctgtcggttttagcaacaacacaatgtgaaacataaatacatcatttgatttgattagatttagtatattctagtagcactgctaagaatgattgctttttgaaatctactcagatcaacacaaggaacgggtggtatattcttcctcttctagatctgaaatgataagagaccactggggactcctgctcctcacaggctaatttccaatttgggggaagaactgactctcccaataggaataagaatagtctcatttataccgatgtgtcactgagacagtaagtctttagacttcttagggaatctacataaaccccatttgtggatgctgttggggacatgactaggtccagcaagctgcctagaaactagaggtaaatggttgacttaacatgaaaatcagattctgtagaatcattgtctttcatttcattctcttatttatattcggcaggtgccatgttttcattatggggtgacagtctaaatatcaaagaaaaaaaaagacacatgaaatgtacatttgaatctctatggtatgtccatgtccatattcacaaattcataagtaaaatagctgtagctaaattcacaaaggaaccacataagcagagtctatattgtcttctcctgaaaagccacaattatatatcagcttattataactaattatgaatacctactaagggtgaggagaagacctttcccgagtgctggctacccgtgcatgctggcacactactgctgggcatatttatacaaggcacacctgccaggcatgggacagggccagaatggcctccagtacacacagcaacacaaaatgatcagaaggctgacaattggattcccttttcactacccaggttccctcatttcagacgatggagaagaaagtcacatttaaagcatgagtccttggagtagtcaggttctcttctgattaaactagtctgctacttcacagtgtgtgtgtgtcagggggggggggggggagaagatcaattctgctcctgacgtaagagaaattccaaaagaaatgggttgcatctctattcattcagtgacactgtcctcttccaatagatttcctttggctcctcttgtgttcactgctgcacatctgacccaggatcttgtgcatgctaagtggatgttccacctctaaaccacccgtcctacctctcattacttttaatggaaaaggaacaggaccgtctccattttgctgacaagggagggttaaagcaagagtgtcagaaaagaaagtgatgactttacaatttgacatccttttttctctatcgatgtatggaagcccatgcaaagcacttggcctggaaggtcagaacttagtcaaaatgagtaatagcttctccttctaaaaggtgcttggttctgaggcttggcacacattacttgtgtgtgagatggcatggacagagtattgtcagagcacaaagggcttttcgacatcataagtctatgcccaatttctgctattgctatacatctcctgtcttgcccagtcacacagacacactggatcgtttgaatgccattgtatgtttcagaaaatgtcaagtaaaaggctagacaagagtggcttttgccatgtctttccacacagggcttaccctgggcaacaccgagaagaatggaatagaatgcattaattacattttagtcatgtgttttctagtgcctacttccatgcagcctgagggcaacctgtggtgttggatcaaactctttattgtgggctcagggctgtgcactaggactcacagctgtgttcgttccttctgtatataagttcatgctctctatgaactccaaggttctgctgtgcatcccagttgcccaggatcctgtcaagggactgacaacccatcttaccctgagtcctgttctggggtccttgttagtccagtgaattgtgacatttttatgctttcaagataacatttacatttaaagtctgccctcaataacttagtgagaaacaaggaatttcatttatgggtatgaaagtatatctttggagataataaagaagccgtccgtaatccgtaaattatagtgaagtacagtgttcttcatatttaagcttcctccctggacatatttaaatgtatttactatgcctagtgcaggcagctgttaagattagcaggctgtagtaacactacatactgagctccattctcatctgcagtgcttcttttttttttaaattgtgagcttggaggcaaaatttgcaggagtggcaattctatccatatttaattacaggagactaataacatgagctactgtcttaatttcatctctgagagcctgagtgctgcccctggttgttgtttacatgggatgatgatggaaattctgggtccactctagatgtgtggttgcttctgctctactcatttctcacttgtgaggacacagtagaattcaaaactcaaacctgatggttaatcaaagaccagagatgggatgtgcttcacacctccctgacttggctgtagcttttcaattctgggagacaggaagaagctctggtggaagaatggatctttaaagtctccaccagcaaccactccagaatgttgtaccagtctattccaccagtctagtctcttaccactgaaagtcatcctctcgtagtaatgaagtctattctgtgaaatggagggccggtttatgtttgatcgttagagtgggacccatctgttgctgggaaggtttcatggatgagatttgttagaaataatattggtatttataatataaagcattttagtgaagagtatatttatccgtacctcacttgtgtgaagccaaaagaacgaagaagggaaaacacttttcctgtgatagaacaaagaaaaatagccaaagtaatcatgaaaaacagttggctgtgtttttaactgttcactaagaagttccaatgggaaaaaaattggggatttttctagttatttgactataattaaagcttactccagaaaaacaagaacctcgagggctctttccatataattaaagtttgcatttgcaatactgtagatggtcattctctgcaggtgtgtatgcagcacattatgtcatccagttagacttctgccagtgcctacatcacatggggttaattgggttgctcctaacagaaagaaagaaagaaccaaaaactactcaaggtctaaatatataatagcgtattggcctttgtaataagcagctgaggttatctccttagagactatccaggggctcagagagcaacagttgactcttccaagtatctcaacatagctttttggagtgttgtgagtgtccctgtatcgttatccttttagaagaccatcacattagggcccatacctcattattgtctgattacaccaaataaagacccaatttctctctctcttttttccctgggtaaatcatttttatttttgatttattttgactttattggatatcttctttatttacatttcaaatgttatcccctttcctggtttcccctctgaaaatcccccccccccgccggctcaccaacccacccactcctgcttcctatccctggcattcccctacactgggccatagagccttcacaagaccaagggcctcttctcccattgatgtccaacaaggctgttctctgctacatatgcagctagagctatgagtcccaccatgtgtactctttggttgatggtttagtccctgggagctctggaggtactgtttagttcatattgttgttcctcctatggggttgcaaaccccctaaactccttggatcctttctctagctccttcattgggtaccctgtgctcattaccgtgaatggctgtgagcatacacttctgtatttgtcaggcactggcaaagcctctcaggagacagctatatcaggttcctgtcagcaagcacttgttggcatgcacaatagtgtctgggtttggtgattgtatatgggatagatccccaggtgaagcagtctctggatggtcattccttctgtctttgtaacttcttccatgggtgttttgttcccccttctaagaaggatcgaagtatccacactttggtcttccttcttgagtttcttgtggtttgtgaattgtattttgggtattctgagctttggggctaatatccacttttcagtgagtgcatataatgtgtgttgttttatgattggattacctcgctcaggatgatatcctccagatccatccatttgcctaagaatttcataaactcatcatttttaatagctgattagtacttactccattgtgtaaatgtaccacattttctgtatccattcctctgttgaggaacatctgggtctttccagcttctggctattataaataaggctgctatgaacatagtggagcatgtgctcttattacatgttggagcatcttctgggtatatgcccttgagtggtattgcttggaaggacccaatttcaaataaggtcacatgtatagttaactaagaaacttgtgcttcaacacctgttttcaggaaaccaacaacaacacagttcaacccacagcacatatcttctcatgtttaagtaccaagcaagcaaattgtatctttctcctaactgctcaagtatagcctgttattgactggcctaaggtgttcctgacacatcaaacatcattttcagagaggtgtgaaaatctgtcaggcataaatgctccacccagcccttaaacatacaaaccaaaagtagaagaaaggttagtgtcccagaaaaaaaaatagaaagcattgtcacctagtaaggaatattagatagccaaaaaaatcgcagtatatctacacaccataaacagggtccatgttaacaatattactatagtcaagtaagtcacagaattgatgtgtgggctcctatttactgatcatttgttatttttctactcagcttttatttcccattttattgaggtatcacctaatttacattaaagtacatacatttaaaatatgtttgttgcattataacttatgaaatatgatggttcctgcaaatgtcacagctggcaacaaagcaatctgcaaagaggcaaggatgaaaactcagttaagtatggcataattagccaggctaactcaaacttctagagtttgacaataggctagatcattttaaacatatttaagtactgtacaatttggattaaagtattctggtaacaactatcctcttaccatgtgcacaataaatcttaagggttgactacatcaaaactctattgcaaagtcctgtgttctcttacatgaagatgggttctatagcttaagggcctgggatctggtgtggtctctgagatagcacagaggtcatctgacatgtgacatctcccctaaggatgcattcagttgattgagaaacaaagctaagatgaggtctagggaggaagagtctgggataaaccttttgggggatttgtgtaaggcctagctctatggagagcaaaggaccccagggtattaacatttacttactcccagccctctgggtaggaagcaggtgtacacttccttcactgaggagacatcgcttcatgattaacattcctggtttctctggtgctaatctgtgaatactcgtgccctttacaaagaagcaattatacttgagataatttaatatttttattatcctcgacagttttctgatatacatttatactccatagctctcaaccttgacaattgttagacagcattgatctactttctgtcactaaatattaccatgcaattaaaaactgtatacacagggacttatacagaggcatttttgtgtctcggttttctactcagcctaatcatgttgacatacaaccaaatttttatacgtaaaatttttttgagagttgtttctttttaaaatggcccactagttctttactatactgatctcacacttggtttatcaattaacctgttgatggactttcgagctctttccagatgagggaatatttttaaaggaaggtagaaaatgttcacttaacataggagttttatttgtttagcaatatatgaatgatgggtaaatacagcattcattgcaatacttaggaacaaaagatttctttttttttcttttctttttttttctttttctttctttctttcttttttctttttctttcttttttttttttttctgctgccaattctagaaactcagcctagggctgcacatatgctaggcaagtgagttaagccccagcacagcagaaaaaaagaggataacatttttcttcttttctttccagattctgaggagagcagacaaaaatggtaagacccaaattctacaatttctatttattaattcattatatattagactgttttctaaagagcagggaagtagaaagtcctagaaaaggacgtgaaaaatacaattttagcaatagtcataatttttgatgtttatgtctacagatattcatgagaagttggcagatgaattcaaatttgacagcaagatgggatttatgcttttgaagtcccatcatatgtgagctgttacttctccctttaatgcttgaaaaaaatgtatagcaatagcagcttcaatttatcgagtgtactggtgtatgaattttgtttagagttctaagctaccaaggtttttgaacataaatctgcttggtaccaacatccaccaatttcatagtggcctaagaagttcccaaggcattgtggtattgctgcctggaaacattacagcttactcttgcctgaaacatgggaaactctcatccacaggtagagagatgtgaaaggcagcaaaccaaaaataaaaaatttgccctgaaaatttagaggcagctctgctaagtccaattataagctcatgggtaattttttactccttgattccattagagatttcattccacagaatccgagcttattaagtttgttctacttaagtacttcaatataggcatattactgttaaaagtggcttaatggtttcaggatacaaaagcttctttcccatgcttgaaatatcacttcttagattcaaggaaagattgcagtcagatctgaccattacaacatggtatctagtttgtgcttaagaacacagacccataagagctttctcattatacccctttctcgccaacaccaaacatccacccagggaacactgaaatagcatccccagtttcatcatataaaccttggtctgactatcagaatagcttgtttcaaattatgttgcaacaactgtaatgttaccaaatcaatgatgccctttgctcccttgtattattgctcatgaagatggaagtgaggatattttcattttgccctcctatctgattttttagccctttgcttaatatctggtcccagtagcactgatcgacaacacagggacacattggtacttatgccagctgccttgtatttcagcttctgcctggtctaatatacctggtcccctctccactgaagctccatgttctttctggtggtatcttttgtttccttggaccttaagactctgattaaggctagacattatctttatatctatcactcctctttctatcaaagttatcatactccataaccaaagtaaaatccagttatcatactccatattcgtgacaaaaatcatctgtcaaatcaatgcacatgaataaatgtaatggctataatagctctataattcatgctacccagcatagtcacatgttctatcagctatgtatcctttatttccaacatctcctcccctgaacgtgattcctgttttctactcactttcatagtgtttgattctaacacatgatcaaaaccaccttctcccagctcctaactctcagtctttgcttgcatttaccctacaatcttctgaaccacacaattgcctgagaatttctccactagtccaattccatgatacttgcatgccttaacaactgtttattatacattcctctctagtggtttgtgaatatccacatattacatatggcaaaagtctaggaagtcatccatatgctgcagggcccctgcccattgtctgagtccctaactcttccacatatatagatcagtacagtagagggctgaagttgatcctaagagattctagttctcttagccaagcttgcttctctagggcataaatctgtcttctgtgtcaacattatgcccagcaagtattttatacttgtagacagttgtttaataagttagtaatgaagatactctagccacaatacatcactttgatctgctcattcccctctaccttctccctaccttattcttcattctgactctcagtgtaaagacgagagatgcttagcctccagcaggtctgggcataagtcacagctattccaccctgtagctctgcagatgccaggaatcattgtaaataataaatgagatgatgtacgtaaaaccaccgggggagtgtctgacacacagtagtaacttaatttccaagttatgagtcctttctgtgtcatgatgccttgactatatgaagcaactggtgacatttcaataatgtcttctgtagtgggatttggtagagagaaaacataaagctatttaccaggcatgctgaagtgaaaaagaaaattggtgagggtaagatggagtgtaagtatgaagatacagaagcagccacctttccgggccacgtgtttattgtaatctgtgtttgcaagtaaacagcaattacgtgcatttgctctcttgggaacggactctcacatgacacagacccttgtggacagcttaattgttgctgtaataatgagaggaaggagaagcagtaagcagaatgggaatcagcctgccagaggacagaattagcatttggactccatgtgacataaaagcaaagctacaggataaataaatgggagaaactacatgattagggattagctataataacgatgtcttggtgagatactttttggtctggttgttgttttgaaatcacaggctaggattctaagcaggaagacagacttggaaagagtattgcttcggggagatgttagtgctttgatctgagaagccccaaattaaacacagaaatgcttcctcacacctgggcataatgacaacaaaaacagtgcatggatatttattaaatatttggaaaatatttataatttgtatttaaggaaatttaattagcaattaaatttgctaatttattaatgttttattaattgcatgtattaatggtatgtgatatgatgttgggttgtacgtattcattgtgcaaaggttagcagcaaattgattaacacattcatcaccacacgtagcacacagcagatccccagaacctgctcattttatgactggaaagtctgtatctttctaacaacatcaccccatttctcctacgcccagctctcagcaactgccactctactctgtttctatggacttgacatttttcagattctacatatatacggtgtttattgctctgtgtctgggccaaaagtctttctttagcttaggaaaatgcaaagtaaaaaggtccctagcagtgaatagtgacatccagttcttcttgttgatatgcacttgctcagacccactgctgttcatgtcagcaaatagttagggtagataaatggtggtgttgacctctgtgtgatggctgatttctggctgaattgctctgtggtgtagttctctggcttttagttgctctaagtctgtgagggcagagctgtctgaggctcataagactgagcaaactgcctaccatgacataggttctaagtaaatagttatgactatttgtaagaggggcatcatcaacaatttgaccttgaaacctgatgattatatgaattatttaatgaagctgcactgtgctatttagctatttctacaaattattaataatgactaaaattaatggtggattattatggtaaatgctaagttcttaatatatattgcctggaaacattctgagaagcccaccaagtagattgaagctatcggaaaaacagaagatgagaaaaacgaatcccagtatcttggctcttactctgtctaggttcatgatactgaacaagtctctaaccttttctgtttctccttatctgtgaagtgggttaatgataactccttcaaagctgtcttgagaatcaactcagattatatttttgaagcattttgctttttattactatatacttcctatacacaataacatttcactatgatatttcataatgaacaacatatacacacacatacacatgcatatacacacatatacacacatacacacacatacacgtacatacacacatacacacacacacacactatctctcctgccttactaatcctttctctatttctttccaatttgctcctattcttctttcatgccttttcttctttttacttttcgtgacctaacgagtttcatttagtttgatcacatgaccacatgtgaagaaaacttctttccctcatgaatcaataacttcttattcattctcaaagaagggtggagcctaccgttcccagttccactacagggtgaaaacaggtccaatcttgtgcagaccttgtgtatattttcatacctgctgtgaattcaggagtacagtagatacatagctatcaaaagtcagaggttcacactgttgttcccatcttcctctgatgcttcagttctttttttctctccacatcttctgcaatggtccctgaacactggggggaacatgaggtgggggaggaacatgataatacaggtgtctcacttatgagtgggcttctaaaattattattctcagtgcttgttaagagtcactactgacaaaaaaaaatgcttctttgaccaaaggtgatggcaacacttttctatgtgtatagcattattatttgaaatgtaatttgataggcacatcatggtcatttggccaaacaacagtcatagctttgtcagtaaagcctatgactccctaccccagctatggcttactgatcacgtttacaatactatatgtgaaaccccttgtgtagagcacataccgaatccagtcagaaggtggtaggttacctccgtgatagacttgccactgtttttccagtgagctcatgttgcctgccttgatgctcttgcacaaatggtctgcagcttagtaaagctattgacaattcaatcctcgcagtgaagcgttaatttaaatctaggtactgatagctcatatttgtagctattgtttctaacgttttataatggaccaaatcaaactaaaagggttaactaactgcctttgagttgcttcttaagctaacaacatagttaatcgagatccttcttactccgaattaacttattcatttgtgtgtgtgtgtgtgtgtgtgtgtgtgtgtgtgtgtgttgtaacataacaagtctacaaaggtctgatgttctggttttgtaatacacaataattacatttaatttatgtgttaggtccttcattgggaagctgaaaaaaagtcctgaatgactagcaaatctccagaaaatagcattagcaagaaacgtcctggaaaacaagcagttcatgttccgtttctatattttgaagactgcattggttctggtcagcaagtcctggctgattctatgagaagcaataaaaagcctttcaagttcattacccaattcttggcttattctgtgctcttatgaagataagattagaagaggctaaaacaaaagttcagcacatagggctccgggttttcaccccagagccttagggcagtatataatcttctaaaacgatggtaacaaatctgtgctttaatgggagccacgcagagagttatctctcaaccctaaggagctcccaagctcttccttcatgtagtcagggatgtagctccagataaaatggaaagattgagatgtgtgcccagaaattaatagtattaatgcaaagttgaatttttctttcataatttctctctcatttcttaaaatgtatgtgaaacttagaataagatcatttatcagaaggcttctcaaataactctgtgcccatgatttttctcaggcataatggaaagtcaaccagacacccaccaccctggaagccaaagccatgtgtatcagcaatgagtcacttaatctatgccctattaggagcggctcacagcactgagtatgggaggaacattgcagatcctgactacaatgacatttttataacagaataagagaaaacaaaatttctgtttccatagtatttttttctgaagtgaaaagcagtttcacatacaaaaatgtgttattttcctcccataagtagaaaatcatgaagttactgatctttacatatcaggacctatcagatatcacataaggaaatacaaaatctagattcagacttgggaacccaataaatggccactaaatgctcagaagtcagacccagctatgacagcagagtctgacgtatacagagaataccatttaaagcctagatccaaccttatacacgaatgcaatttaacttagccattgtctttattccttctagatcccagacggatgtggcatagtggttaagcttatgacctgtagtcagattaactggattcaaactttgttctacttttttatgtgaccccaatagattccttagcctcttactccataaaatagaaacaaagatggtgaccctggtacatgcatgtgaaagagagagatgatgcacacaagcttatcaggataatgtccaaccctcaggaagtctttaataaatgttagaaacttttagtcttcttgtggtccttattcttgttactgactgtccatctcaatgctttacccatgatggagggcagttaccaccactagccacagagcttctgtccaagatgaccttattatcatccaaaacctgttgtgatgaattgacctgcctttgccctagctgttaagtctctcctgttgtttgcaaaccaataatcttagcttaagttgtgcatacttagggtacatataagggataccttatatgtaaaaatctcttgagatttttgttgttccatattaaaaactaaagaagctaaactgaatttgatttgtagcttttaaaaaaattcaaggaattaagtgatatatgtaagactttgctttcaaattttatgccatgtagtttcttaatgatgccaatatagcatgtgatcaatatatatctttaaatataagaatattttttataatattgttctacatatttcatataaagatattttaaaatggttattaaagctgaggagaagtgtgcatagctagggtttggattgaaaaattcttaagtgctagttttaatcttccatctcttttttctttttttcattcattcattcaactgctactatgcattggtcctgtgtgctaccctatggaagcaataaatttaacagcaacaccacacacacacacacacacacacacacacacacacacacacagagagagagagagagagagagagagagagagagagagaacagagaacagagaacagagaacagagaacagagtttagttaaaattgtggggttttttggtttgtttgtttgtttgctattaaaggaagttttttttactagggtaaggaaacacacacatacagcagacacatgcagaaaagcctctctacaaatcaggggcaggaggctgggcttgggaaacaggttaacttctccttgagatctgggtggtttaaagtctctgaagggtcatccttccctaatttagggttggtcagtttaaagaaagacaagatggccgattcgctctcagctgttgtagaatcatgccgggattcagccttgaacttgataaatcagttctcaagcaagggtcctactggcagaagatagtccacagacctttgttttaagctgtcagactcttgtcttagtttagaaggctgagggagaagccagccattttgtaggttcaccatctttattacctagatgtcctctccccctatctgcctacctatgggaaaatctaccctacttctagtccctcacctcacattgctcagaggtcatactaactcctgttagggggttggtgcacagactgctctaactgctttcaagctggcaaaggagtgatgtagaatgggtgaccagaagagggtctacataagagaccatgatgacacttaacagataacaaaggtctgggacattaagctggccatttggtgacagtgtgcatcgtcagagcatgccattccagtgagataaccagttgtcaaactcacaggtttggagaaattattcactgaatagtgtccctgagacattgctagacaatcctataaaaaagacctgatcggattatatttatcctgtacattgttagttagatccttctgtctgatccagacctcagcagatggaatctggatttcacacaggtttggatcataatgttttctcccactggacattatgtctgatctatgggcagaggcttctgttgctgagaaggcacaggaccgacaactacttcaactgatttctcttacagtttccagacatttgatccttagacaggactctaaagtgatagacagctcattatacagtttaagttcatatttttgagagggaaatacatttgagttagacacaaattatacattataatgagtgttatgatagaagtcttcactagggtctataatggagtgatctctctatttgtgtattcaaattcatttgcttctcattgtccacaggataaagtctggactcttcagcaggatattaccaaacttcctatctgcctgcacttgttatagcttaaggacactaaactccagatcagccatccctctgtgtgcatccatgcatagctctgtctgcttgaaacaactttcaagccattggattcgaatcatgttcatctttcacattcatccgtctctgaattctgttcagcatagtttgtgggctagctttgcgtcaactggacagaggctagagttagatgaaaggaagaaatctcagttgagaaaaatgcctccataagatccagctataaggcattttattaattagtggttgatggacaaaggcccagcctacggtgagtggtgccatcctaggctgatggtcctgagttgtataagaaagcatcctgagcatgtcacgagaagtagtcagtaaacatcaccctttcatggcctctgcattcgctctgcctccaggttccagccctgcatgagttcctgactgatttcctctaataatagaccacgatctggaagtacaaggcaaataatccatttcctccccaacttgcctttgttcatggtgttttctcacagcaatagtaaccctagctttgacagcacacgaattatttacaaataagggtcaatgacacctgcaaacatagggtcattatacccagatgcctacgttgtgggactgttgaaactgaaacaacataaagatgtcacaagtgagaaatataaacttaataaatactaatgctttacccagttctttcattctcccatctatagcatcacgtatctcatattcttaccacattgaacagctagtctgtggacgcattcccttggtctctatgaacttataaagggaatatacatatatcttctttttgagcacagggacagtatatgtcattatgcttggtagtatgtgcaacacttgacctattgtaaatatgtcattaaacactataaaacagttgtgatgctatgaatggaaatcatttggcctgggatgttgaggaaaaattaggttcattcgactgaagatttagggggccaatagattccacagaagggaagaagcaagagctgagtcataaagctgatagaaagcaagaaacttgctcaagttgtagaagtatatatggaacagttaccaacagttatgttgttgatatctgtactgcagttaacatctaatcttaacacctggttcctcagcagcctctactgtgagagagaacagagacaccaatcagcagtgactccacctaaaggcttaaaccacttccattttccctcatatctagtaactctgcatgcaattcattagcaggccagtcaggtccactgtcaatatccaatgacatatgtcccaccctcacccagactctgaaatagcacttagaacactgtaaagcccaccatagtagagccattgaaggcatcaatagatcagtggttaaagaacagtaatggcaaggtgaacgtgacattttttgacttataattagcaaagaattgttagttaattgaagggttagtaagaaagatgaaggaattcaacagcacataccttgtgcttggtatttggaatgtgaagcacatttctgatttctgacttgagtatctacttagatagtgagactgcttaacaagagcctcatattaagagcttaattcattgagatacttgtatcacttttatttatgagagttccgatgaatatctgtgatgtttctatgattcccatgacactctaaatcacacataaatggtttcataaaactctggaacttaatagtctgtatgttaccaagttttgtataatctggagaatattagctcatgcatcaaatgaaattgttctactaataatagtcaataacttagtaaaacatttttttcataccaaacactaaacaattttcatgagattccacagggaggatgctatcattattccagctttatccatgagtaatctgagacaaaattcaaggacagaggggttgtaaataaagtctgtgtctagagtcccttccaacctcagcatcttagcactaactagtgcagttcacttgctatggatcatttctgcagcagtgttgctttgttcacagcagaaatgttgaccttccataatagacaaataagaatgagtaattcatgggaacaaaacacccatggaaggagttacagagacggagtttggagctgagatgaaaggatggaccatgtagagactgccatatccagggatccaccccataatcagcatccaaacgctgacaccattgcatacactagcaagattttattgaaaggacccagatgtagctgtctcttgtgagactatgccggggcctagcaaacacagaagtggatgctcacagtcagctaatggatggatcacagggctcccaatggaggagctagagaaagtagccaaggagctaaagggatctgcaaccctataggtggaacaacattatgaattaaccagtaccccagagctcttgactctagctgcatatgtatcaaaagatggcctagttggccatcactggaaagagaggcccattggacacgcaaactttatatgccccagtacaggggaacgccagggccaaaaagggggagtgggtgggtaggggagtgggggtaggtgggtatgggggacttttggtatagcattgggaatgtaaatgagctaaatacctaataaaaatagaaataaaaaaagaatgagtaattcaaagtaatctaagaagagagaaagcatggaattatcctgactactaccatgtttggagatgcatgatatgacagagatatagaaccacagaaaacaaatgtaaaccttgacttttctgtttcctcatttaaatgtgcaccagatattttaatccatgccctctgtgtgacagacagtatcctagttgttgagactagaaagagaaaaggatatataagcttaggatacagttaataagctgtgatcttggacaattaacctctttgagattatttccttgctttttaggtggggaaatcataagacttgatttcttgtgtaattgggaagaataagaaaagtaaatccccatggatgatatttaatattgtgaataatcaaaacatgtcagattcctttactaattctctgtaggccctaaagatgttattcttcataagccaattaacaacccacagacatactcacaggctaatctgatggaggcaatcccccaattaatacttccttctcaggggactctagccaagtctctctctctctactctctctctctctctctctcctttccctctgtctctccctctgtctctccctctgtctctccctctnnnnnnnnnnnnnnnnnnnnnnnnnnnnnnnnnnnnnnnnnnnnnnnnnnnnnnnnnnnnnnnnnnnnnnnnnnnnnnnnnnnnnnnnnnnnnnnnnnnnnnnnnnnnnnnnnnnnnnnnnnnnnnnnnnnnnnnnnnnnnnnnnnnnnnnnnnnnnnnnnnnnnnnnnnnnnnnnnnnnnnnnnnnnnnnnnnnnnnnnnnnnnnnnnnnnnnnnnnnnnnnnnnnnnnnnnnnnnnnnnnnnnnnnnnnnnnnnnnnnnnnnagagagagaaagagagccagccagagagccagagagccagagccaaagggccaaacccaggcagaaacatgcacatacagagccagagagacagagaatggactggaatgggtaggatacataaggcgacccactttagtgaatgtggactagtgatctctcatgcatcatcgtttctaccaaaaaaaaaaaaaaaaaaaaaaaaaaaaaaaaaaggaaaggaaaggcttctgaagaagcagaagtgacaccttcttccttgaaggaaaacccaaggtggttatctggggctaacggtggggtggagcataaaaggagcaagtcaactgtgaggtgtacttctttctcttagatctgtataaaaataatttctttgcattaaagtgaaagttttctataaatggggtgtactttaagctgtttattttgaatctacatcctttgcaagtaattaaatgttcctgtaacaaatgcttcatttgtcattacagcaagcttcagtaactgggagtgtgtttgatttacttctaatctcacatgaaatgttgtaagttctcaatagaaatggcattaaatgtcttcttttttcttataatatacacttgttatctcagtttactttttcaatattcccagcaaagctacaaaatattctttttttaagtattttcttcatttacatttccagtgctatcccaaaagtcccccataccctccctgccccactcctctacccacccactcccacttcttggccctgacatttccctgtactgaggcatataaagtttgcacgaccaatgggcctctctttccactgatggcctgatggccgactaggacatcttctgatacatatgcagctagagacacaagctccagggggtactggttagttcatattgttgttccacctatagggttgcagacccctttagctccttgggtactttctctagctcctccattggggaccctgtgatccatccaatagctgactgtgagcatctacttctgtgtttgctaggccccagcatagcctcacaagagacagctatatcagggtcctttcagcaaaatcttgctagtatatgcaatggtgtcagtgtttggaggctgattatgggatggatccccagatattgcagtctctagatggttcatccttttgtctcagctccaaactttgtctctgtaactccttccatgggtgttttgttcccaattctaagaaggggcaaagtttccacactttggtctttgttcttcttgagtttcatgtgtttcacaaattgtatcttatatcttgggtattctaagtttctgggctaaaatccttatataataaatacatttccaggtaaagtgtctaaatgtttggtagctttttaaatttgttttcctgttgctgtaataaaaaccaaaagcaatttgggaggaaagagtgtctttttatcacttgtccaagttatagtctatctttgagaaaagtcagctagggattaaagcaggaacagaggcaagaaccatgaagaaatatggcttattgtcttgcctcctctcttggtctctgctagctttctatatagtccaggcctacctgcgtagggatgaagccacccagaatgggcttgtccctcccatatcaatcatcaatcaagacaattgcccctcagacatgtgcacagactattttgttggagtcagtttctcagttgaggttttctctgctcagatggtacacaagcagatgacaaaaccagtcaggatattggctgttcagtgaagaagcaggagctgtctgcatgggcacttgggccctccatagatctgacagcagctttaaagattggcttccaggaatgtgtcccaggaaatgtgctgtgacttcatgttagccattttaccttcttatgttttctaagatttttctctacctgaaaagaataagaagaaaaaattattatatgaagtttttaataatgaatattcaataaaatatggagcaaaaagttcttgagggctaggagatagctctgttgatagagtgcttgccttgtatcctaatttcttttatattgctgtgaaacactcttgactaaaagcagcttaggggaagaaagggctatctgtattctatttccaggacacagtccaactttgagagaagtctgggtgggaattcaaggtgagaatatgaagcagaaaccatcaacatgctgtttactgcatagttctttgcctcagtcccatgctcatgcacacctaactttcctatacagcccaggaccatcttcctagggaatggtgctgcccacaaccctcataagccaattaaaacccaccggcatgatcacaggctaatctgaagtaggcaatctctcagttaatacttccttctcatgtgactctagccaagttctatctctcttctcttctctctctctctctctctctctctctctctctctctctctctctctctctccctctctctctctctctttctccctctctctggatgtgcttatgcttttaagtaatagattatccttcaaataacactatactcccatgttgataataacagtcatcttttaactaatatgcttaatttttcatggtgtttctcatgaaactgatacaatccacttcacctaccaatctgcagtgctcatggacgtgcttttggtattattgtttcatgcaattatctctcagactcattgagagggagaagcataagacattgtattttatgatgctgttttacatggctctacatttattgccaacctctccttctccctaaagaacattttctaacacttcttgcaggacatgtccagtgacaatcagttcttttaattttgatttcctataaaaatcaggatttcacattcactgaagaataacttactgcatatacaatcctatgtcatgatattgtctttaaacatgttaagtatttccatatacattcttttaccacttgcatggttttgataagcccattattctataattttcacccatactcttccatcagtgtttatcttgttgctatcctccttcataaattttctctttgtccttaccattgttcaacttaaactttctacgctttcatgtgaattatatatgagctggagagtccctgttcttctcagatcccctgaaaagcatcgtcagtccttttggcctgacgcagccagtccttctcatatgttccctttgtaccagagtccactgctattgttgacagtgatcatgatttgttaaattttgataaactaaaatatttagcctttaaaaatgttaaagtaacacataaatacaagtacataaaaatttatgtttactattttcaatgaccataaaaactagatttaaatttccacaggggtgctccatcggacgctgaggtcagggctctatttgttggtgagggtgtggttgtgacctgaaggatagacattgaacaactttttaaatagatagcttgctttccttttttctttcgttatccttttctccccaacccttagctttcttttttatttttgaaaaagaagtgtcagttttgattagttaagaaaataagctaaggggccgggcatggtggcacatgcctttaatcccagcactcgggaggcagaggcaggtggatttctgagttcaaggccagcctggtctacagagtgagttccaggacagccagggctatgcaaagaaaccctgtttcgaaaaataaaaaaaaaaaaaagaaagaaagaaagaaagaaagaaagaaagaaagaaagaaagaaagaaggaaggaaggaaggaaaagaaaagaaaaaagaagagaagagaagagaagaaaagaaaagaaaagaaaagaaaagaaaagaaaannnnnnnnnnnnnnnnnnnnnnnnnnnnnnnnnnnnnnnnnnnnnnnnnnnnnnnnnnnnnnnnnnnnnnnnnnnnnnnnnnnnnnnnnnnnnnnnnnnnnnnnnnnnnnnnnnnnnnnnnnnnnnnnnnnnnnnnnnnnnnnnnnnnnnaataagctaagctctttaaacaaccgtttgcaattgtttgcatctctgtcaggtgagaaaagactaatcatatggaatgccccctgactcatgacccatccctgtccactacccttccccttccatcacaccacccctcccatccccctccaacctactcccaccaccacctttttgtctttacatagtaagtgctttttgaggaaaaatagaaaataagaattaaaaaggacctgaatagtctttgtttacaaagctttcccattacttaaaactgtgtgctaggtcttatatgaagaattctctcagtcaatcctcattatgttcaagaatttactaaatttggaacttaacttttccctttctgaagtctgttctgggccctttgcttttccactactgccattctccctgggaagaatgactcattcctgggacccctaatcactttgtgttgaaaactcctaaatacatatctcaggcttccatgccccttggtctttctagaactatatgagcccttcactgactagatgcttctattccatccacatgttcctttgacttcatgagcttttgaccacaactattattttagttcagtgtctatctgtttctctctttccatgaatagcaatatgacacccacctcttcctctgtcctgaaaattacatatactgttgagttatttctttcctcacctactgccttaagtgatcttccttttgtattctatcacattcctaaacagatttaaaccctctatttcactgtcaccaccaaagtcttgtccccttgaattttgcctggaattgttaaatatcccaacaagcctcctctcctgtggtacacctctaagttccattctgtttactgcaaccatatctagctttcaaatgtttggcagcagttctctacaactctttgcatgattttttttataactctcatactgttaattctgtgtacctaactatgattttccttccctacagatagatatactctttgagtggccaggttttataggttctagtccatatcctttcagccttctagctatggtgttttcatttcctctgcctagaggaacctatgtagagagttttttctatccgttagctttcatctgtgtctaaacagacatgtcctttgaaagccttccttggcccttccagcagagtagttttcttttctatatgcccttttccatctgcctccctgggattgctcttgtcatattgtgactgctattcatttgttagacccctgtcataggatccataagggtttgtcaatggtcttagcacaaaacactgtgtttagcacatagttggattttgataaatattggaccaatgaatggataaaagggctctgctagtaaatagcaattcaagtttaaaacccaagatttcttttaggactgttccctctcaattcagtaatttatctgggcaagcatagtattaactgttagattaaaagtcatggtaaaaagttaacgtgcccaatgttaaaaccttgcaaatgcacataatatataaggtaacctgtaatatccctttcaattttctctgtatttttttaaaaaatcttcaaaataaaaaacaatggacatctggccaccttccctgtcagaggagaggtgtccgcccagcccgggaaggagttgctggagcatctgctggagacatcttggttcctggattctaccaagactagtctgcacaggtgagagtgtggactacagaagctaacagcttctgacacaggtcctgtttcgggccgtcatcttctgccaggaggccagtctgaacgccagatatctatgtgccttccctgaaaaagtagaacctgcctgcagagagtgctctgacctctgaaagtcaggagacagccagtatcacaggtctgctggtagagaataacagaatcacgagaggaacaagtgctaaccagacacaactataacaactgactccagagattaccagatggcgaaaggcagatataagaatcttactaacagaaagaaagaccactcactatcatcagaacccagcactccaacctcagccagtcctgagtccccaacacacctgaaaacctagacctggatttaaaggcatatctgatgatgatggtataagacatcaaaaaggacttaaataactcacttaaagaaatacaggagaacactgctaaagagttgaaactctttaaagaaaaacaggaaaacacatccaaacaggtgatggaaatgaacaaaaccatattagacctaaaaagggaagtagaaacaataaagaaaacccaaagtgaggcaaagctggagatagaaaatctaggaaagaaatccggaatcatagatgcaagtatcagcaacagaatacaagagatggaagagagaatctcaggtgcagaagattccataaagaacatcggcacaacaatcacagaaaatgcaaaatgcaaaaagatcctaactcaaaacatccaggaaatccaggacacaatgagaagaccaaacctacatacagataataggagtagaggagactgaagattttcaactcaaagggccagcaaatatcttcaacaaaattatagaagaaaacttcctaaacctaaagaaagagatgcccatgaacatacaagaagcctacagaactccaaatacactggactataaaagaaattcctcctgacacataataatcagaacagcaaatgcactaaataaagatagaatattaaaagcagtaagggaaaagggtcaagtaacatataaaggcaggcctatcagaattacaccagacttttcaccagagactataaaagccagaagatcttggacagatgttatacagacactaagagaacagaaatgccagcccaggctactatacccagccaaactttcaattaccatagatggagaaaacaaagtattccacgacaaaaccaaattcacacattatctttccacgaatccagcccttcaaaggataataacagaaaaaaaacaaaccaaacaaaaaaacaaaaacaaaaaaacattacaaggatggaaaccacgtcctagaaaaagcaagaaagtaatccttcaacaaaaataatggaacaacaattacttttccttaatatctcttaatatcaatggacttaattccccaataaaaagacatagactaacagactggctacacaaacaggacccaacattttgcagcttacaggaaacccatctctgggaaaaagatagacactacctcagaatgaaaggctggaaaacaggtttccaaggaaatggtctgatgaaacaagctggagtagccattctaatatctaataaaatcgacttccaacccaaagtcatcaaaaaagacaaggaggggcacttcatactcgttaaaggtaaaatcatccaagaggaactctcaattctgaatatgtatgctccaaaaacaagggcagccacattcattaaagaaactttagtaagctcaaagtacacattgtacctcagacaataatagtgggagacttcaacacaccactttcatcaatggacagatcatggaaacagaaactaaacagggacatagtgaaactaacagaagtgatgaaacaaatgaacttaacagatatctacagaacattttatcctaaaacaaaaggatataccttcttcttagcacctcatggtaccttctccaaaactgaccatataattggtcacaaaacaagcctcaacagatacaagaaggttgaaattgtcccatgcatcctatcagatcaccatggactaaggctgatcttcaataacaacttaaataatagaaagccaacattcacatggaaactgaacaatactcttctcaatgataccttggttaaggaaggaataaaggaagaaattaaggactttttagagtttaatgaaaatgaagccacaacatacccaaacttatgggacacaatgaaagcattgctgagaggaaaactcatagctctgagtacttccaaaaagaaactagagagagcacacactagcagcttgacaacacacctaaaagctctagaacaaaaggaagcaaattcacccaagaggagtagacagcaggaaataataaaactcaggggcgaaatcaaccaagtggaaacaagaagaactattcaaagaaccaaccaaactaggagctggttctttgagaaaatcaacaagatagataaacccttagccagacacactagagggcactgggacagtgtcttaattaacaaaatcagaaatgaaaagggagacataacaacagatcctgaagaaatccgaaacaccatcagatccttctacaaaaggctatactcaacaaaactggagaacctggatgaaatgaaaagtttctagacagatacaaggtaccaaagttaaatcaggatcagggtaatgatctaaacagtcctatatcccctaaagaaatagaagcagtcattaacagtctcccaaccaaaaaaagcccaggaccaggttgatttagtgcagagttctatcagacattcaaagaagatctaattccagttcttcacaaactattccacaaaatagaagcagaagctactctacccaactcattctatgaagccacaattactctcatacctaaaccacagaaagacccaacaaagatagagaacttcagaccaatttcccttatgaatatcgatgcaaaaatacttaataaaattctcctaaccgaatccaaaaacacatcaaaacaatcatccatcatgaccaagtaggtttcattccagggatgctgggatggtttaatatatggaaatccatcaacataatccagtatataaacaaactcaaagacaaaaaccacatgaacatctcgttagatgtggagaaagcatttgacaaaatccaacacccattcatgataaaagtcttggaaacatcaggaattcaaggcccatacttaacatgataaaagcaatctacagcaaaccagtagccaatatcaaagtaaatggtgagaagcttgaagcaatcccactaaaatcagggactagacaagggtgcccactttccccctacctattcaacattgtacttgaagtcctaggcagagcaattcgacaacaaaaggagatcaaggggatacaaattggcaaggaagaagtcaaaatatcactttttgcagacaatatgatagtatatataagtgaccctaaaaattctaccagagaactcctaaaccttataaacagcttcaatgaagtagctggatataaaattaactcaaacaagtcaatggcctttctgtgcacaaaggataaacagactgagaaagaaatcagggaaacaacacccttctcaatagtcacaaataatataaaataccttggcgtgactctaactaaggaagtaaaagatctgtatggtaagaaattcaagtctctgaagaaagaaattaaagaagatctcagaagttggaaagatctcccatgttcatggattggcaggatcaatatagcaaaaatggctatcttgccaaaagcaatctacagattcaatgcaatccccatcaaaattccaactcaattcttcaatgaattaaaaagggtaatatgcaaattcatctggaataacaaaaaacctaggatagcaaaaactcttctcaaggataaaagaacctctggtggaatcaccatgcctgacctaaagctgtactacagagcaattgtgattaaaaactgcatggtactagtatagcgacagacaagtagatcaatggaataattttgaagacccagaaatgaacccacacaccgataatcacttgatctttgacaagggagctaaaaccatccagtggaaaaaagagaggattttcaacaaatggtgctggcacaactggtagttatcatgtagaagaatgtgaattgatccattcctatctccttgtactaaggtcaaatctaagtggattaaggaactccacataaaaccagagacactaaaactcatagaggagaaagtagggaaaagcctcgaagaaatgggcacagggggaaaattcctgaatagaacagcaatggcttgtgctgtaagatggagaattgacaaatgggacctcatgaaactgcaaagtttctgcaaggcaaaagacatcgtcaacaagacaaaaaggccaccaacagattgggaaaggatctttacctatctcaaatcggataggtgactaatatccaatatatataaagaactcaagaaggtggactccagaaaatcaaataaccccattaaaaatggggtacagagctaaacaaagaattcttacctgaggaataccgaatggctgagaagcacttgaaaaaatgttcaacaaccttaatcatcaggggaaatgcaaatcaaaacaccnnnnnnnnnnnnnnnnnnnnnnnnnnnnnnnnnnnnnnnnnnnnnnnnnnnnnnnnnnttcaaccactctggaaatcagtctggtagttcctcagaaaattggacatagtactactggaggatctcgcaattcctctccttggcatatatccagaagatgttccaaccggtaagaaggacacatgctccactatgttcataacagccttatttataatagccagaagttggaaagaacccagatgcccctcaacagaggaatggatacagaaaatgtggtacatttacacaatggagtactactcagctattaaaaagaatgaatttatgaaattccttggcaaatggatggacctggagggcatcatcctgagtgaggtaacccaatcacaaaagaactcaaatgatatgtactcattgataagtggatattagcccagaaacttagactactcaagatataagatacaatttgtgaaacatgaaactcaagaagaacgaagacgaaagtgtggacaagttgtcccttctcagaattgggaacaaaacacccatggaaggagttacagggacaaagtttggaggtgagacaaaaggatggaccagctagagactggcatatccggggatccatcccataatcagcttccaatgctgactagcattccattgtatacactagcaagattttgctgaaagaacccagatatagctgtctcttgtgagactatgctggggcctagcaaacacagaagtggatgctcagagtcagctattggatggattacagggaccccaatagaggagctagagaaagtacccaaggagctggggggatctgcaaccttatttgtggaacaacaatatgaactaaacagtaacctcccccccccccccagctcgtgtctctagctgcatatgtatcagaagatggcctagtcggtcatcagtggaaagagaggctcatggtcgtgcaaactttatatgcctcagtacaggggaacgccagggccaagacgtgggagtggttgggtggggaagtgggtaggggagcgtgtgggggacttttgggatagcattggaaatgtaaatgaaataaatacctaacaaaaaacaaaaaactcaacaatgactattcaaataacatagcgtttgctttaaagcaaatagaatgtgtctttggcgtgtgactttcataatatgaacgaagagaaataagagtatttatagttccctaaagaaatcataaacacaaaactttcaaaataaaaaaatattttaaaaaggaagaaaagacataactggagcttcatcgtgtaaacattttatactgttttgcttttaggtatttgaatataatatctgcttaataacacaaaaatatgttcaaatgcaataatatataaaagtaggaacattccttttgtggtcttttgttttgatcatttatcttttacttgttttttattttcatttctctggggttgagagagagagagttgtatgggtttgagtaaggagattgagagaggagaaagaatgatcaaaatatattgtattggaaaaacccttaataaataagaaacgcctatatgttagaagttcacagactttgagagggaaattactactgattagctaaatagaccaaatgtcaatgtgccttctaaatatctgtttatattcttagacaaagctactcccatactaatctttgtaaggccccaataacagtgtagaagatgggatttttaaataatgtaaaaactaaaagatagggagagaacagaaaatgtcatactttagacacagtgctatatatatatatatatatataatatggccatagctccaagctgatgagattacctgaatttggcttacatgactgtttcaactgtcagtcatggagcggggaggggcttaacgagctgtaccccttactgctgaattgtgggccactgataactactgtccagagcatactcaccagactccaatggatagttccaatgccaaagtcacacggatagcccaggccatacccagagggacacacacaaaaataaaaagacatgaatgtgggaaagagattacccatgaagagggagtttggcaggcaagatggtagcagggagaacaatcagaaactatatatatgtatcattatatatatatgtagttgacaaaagcaaatttagtgaaaaaaataaaataaataaagctgagaaggtcaaatgctcaggacaaactgagatgatgcacataattctaaaagaaatgttaaaaagcctgtgtgcattgtcagttaaaattaagctttgtccctggcagaaagcagtctcagaaggcataccctttttgtgagccaattttaagccaagttttcgttgttttgtttcatttcaaaggaaggtttcagcaggaataatgaagttgaaataaaatatattaataaaaatacaactgccttattaatactgaattacacagggggatttgttcccccttcccattaagcctttgtttaacattttagtactggtctagaactactcaaaaggaattctttgcagttgcttgttttacaatgtggcaacctgtcatgtagactttcaagaatcctgcatgtgataaaaacagctttcaacacatactttccacccttcgagccaggactgcagtttaatgcttactttctcctattatatattattttttaccaataggagtttttgtgtgtgtgagttattttttaatcggggcacttgctagccaaagcctttattttatggcatgtgcattgctacttgaactcttttcccctaattataaagcagcagacagagcctgccccacccacaggaagcacagacaaccacggttctaaggtggctcaactcaccgaagaactatgaaagggtcactgttggacacatcatatagtcaacaagtaaggttatagttattgcacaacacagcagcggtgaagaaaacagtgtgttcatttctagttttttctctttaattagttagtttgtgtataggcaaggccttactttgtagccttggaatctagatttttttctgccttagcctctggcgtgatggcattgccggcgtgtaccactacacttgactctagacctaatctatgggcagttttcttctcctgctggttcattcatttccttatcacacagtaagaagatgcacatgcagctgtacaataggctgcatggggttaatcattcgtagctcacctgaaaacaagcaaggactagacaacaggaaagctggagaattgatgttctcgctgcagtgagctactccgggttgcacggcagtgagccactggtccagggcattactcaggtcaggaacacattgtatggttgatctagatctctagttttatcatctgctctggtaactgttagcaagaattaagttgaagcttggtgtattgtgcctatggggtccgatgccctcttccggtgtgtctgaaaagagaaacagtgtattcatatacataaaataaataaataaatcttttttaaaaagtcattttagacatgacattatcattgttaatccagttgtcagttattatcaggtctttggaaaatgagttttgtgagagaaatacattttataatgggacccgatgaactgtaccgttgacttttgacttggagttatagctgtttccaatctgtggcagcagcactaggaaggcagaggcatgcagataacaagctttaggccagtctggactacatagtgagagcctgtttcaaaaaaggaacaacaatatgaactaaccccaattacccacccccccccaccacccccccccccccctgagctcgtgtctctagctgcatatgaatcagaagatggcctagtcggccatcagtggaaagagaggcccgttggtcatgcaaactttatatgcctcagtacaggggaatgccagggccaagaagtaggagtgggaggacgggggagtgggtgggggagcgtgtgggggacttttgggatagcattggaaatgtaaatgaaataaatacccaatttaaaaaaaaaaacaaaaacaaaaacaattgaaggcagggttggaacttttgcctagcaagtgcaaaccttaggcttgcctcagtactgcaaaagcaaaaacaaccagcttgtagaaggcagtcacaggacgcaacgagcagccttctgagtagattctgtcagggttgaagaacctcaaaagaacaacttaaagtaagaattgaggccagcctggtctacaaagtgagttccaggatagccagagctatacagagaaacgctgtctggaaaagcaaaaaaaaaaaaaaaaagatagcatagccaggcaccgtgctcctcatttgattgttgctgtttgcattcctttgctgagcccacgttttcataggcttgtttgctattcacttctgcttctcggagaagacagacccagaggccatcctgataggcagctgacttgtctgttttcttctcctttttccatgattgtgtctactgccttgacttggtttataagcaaaacctacagaaataaatgttttgtggtttatctaaaaaaaaagaaatgaaatgaaaattaacatctctcctcttaaggatctgtatttcacaaaccaggatctttaaaataccccagcacaacgagtcgtcccacccccacccccggcacatatgtagcagacaggcagctcagtcttcatggacgccctgtctggcctcagtgggagaggttgtgcctaatctggcaaagacttcatgcaaggatacccaggggggtcctaccctcttagagaagatggggaggggcgagagagggagggattccgtgaaggggtgacagggaggaggagtagcatttgggatgtaaacaaaaaaattaattatttaagaaataattaaaacataccccagcccttaagtctttacctgaagaattaagtaattcatgtctgctgttttctttatagtaaaacctcctggattaagtgcaagtagaagctgtccaaattattaaaaaccagccatcttgccgatccactctgagatctttgtgccattctgatgcttgggcagcgctctggagtcagtgtttaaacagtccttggggcagtctagggacatctgttgaaagcattctaaataatcttgatggtctacccctatcacatcatactttttattcagcgataggattctattttgtttattgtggtattgttgagaggacaactactttctgagctctgagctcccatattataaatgcaaaggcttattctatcacttagagtcatttggcagcctctctgaaaaacctgacaaatgactgtgcatagaaaatgatgcctgctgttccttaggggtgcttcgttccttcggatttgttgcttctgtgccctgaacagatatttaacatgtttataatgtgcagtttttttccatcgctgcttatccagagcttttcttcaaagtgaggtgtaaatgatactaaccctgtcccttattcttctaaatgaaaataatccattaccctaattctcatatatataaagtgcatctgtctcttattgaatttactgatcccagctgtgcaaaaatacttatgcttatgtctctacatctttcctttattatactccaattgtgtatcactattgtgtctcaaataagaaacttatttgactataaaagcagtcactagttgaaggaacacaacaaggaacatagtttgttgaattataataatcatatacttgtgtaaatatccaatcaaagcacacttgctaggcatcttgtatttatcttgcggtctgctacattctctgtaggcttggtatcatgaaagcaaaatgtctgcttggccctttgtgttgctgtgtggatttcattttctatagctaggtaaaaatttcccttcagtgttacgtttgtcatggcaaaaaaacaagaaaaacaaaaacaaaacaaaaatactcaaaaccaggaaggccatacaccagtgcatgtttcggtgtgctgtatacaatgaagagatagtaagttggatttttattgacattgcaaaggtttccttcttgctttcttttttaatgtatgtgtgtcatgcacagctaacaagcacagatgctaggactaagttttaaaaatgaaagtagaccagtgcacaaggttggagtgatttgcttctcttctgtccttatttcagatgatggaaaattgtcctttgaggaatttaaagcatattttgcagatggagttctcagtggagaagaactacatgagctcttccacaccattgacacacacaataccaagtaagcagcatttcttatcagtggactctggaaatgaggtggggagaatgtgaatgagtcattcaagaagtgggcgggggaatggatattctttcctaaaaattttagtctgtcattactatataagtaaaatgttactgttcatatttggtataatctaaacttcctttgtataaaaaaatcctctgggtattattgtattggtatgttaaaatgaaattactgcagttataaactgaaaatttctgctacctggaaactacaagtaaggggaggtacagaacagagttgaagagttgacacatggtgatcttcatttacttggcatgtggataccttttttgatgtaggagaatatttgtgaagagtctgtttatatcccctgccccatggtgaaaatataagataatgaggactttaggatatatatcaacagagatgcactgcttgtttagggttactgaaccaaatcacattattttccacagtctcaattatagaattctaatatgaaagagtgtgggctcacacacgcctggagatcctccactatgcctactgtctagacaatcgcattctgctttaggcaaagcagtgatgtggttccaggcaataggcctgctaagacagtgctctggggctctacttacgaaaagaaaagacgttttcttgaggctatttacaaacttacaagattaagttcactttcctcaagtggctgaatatttcaagcaatcagtaaggttctaaagttcaacaagattttcagttgccttgccgatgccttctcctttgttatcagaaatagcattagactcagtaactgataatttcagtctactatcaaaaatactatgatttatatattcataggacacttgaaatcacaaagaatgacattttaggtcagtgcaactcagaaactgttcataggcaccgagatacaataagaaagtagaaactgcttaggtaaaatgtgcaggagagtggagagagcattccagtcaagaaaaggcatgaagaaagttctagatgcgtgagaaaaataggcgtcacttctgtttacaaaaatgtcaactgtccagatcaaagtggaggggaattcacagagagtaaagaatgctctctatgagagatcacttacagtctaagttttaaaagtacttcaactttatgtaaggcaaagggaatctagtcaagagctctagcaacatcttgtaagtcattgttgctctgtgagggagcagctaaaatggtaaagatggaggaagactgcagatattaactaagctaaatggatactgaggaaaaacatttatgcacagaaggaaaacattgggagaaaggatacagaggaggtagagggtctctgggtgtcttgggtatcctgttagaagctggcatgcaattctgtcaagcatgctgttcatgtcgtccttactatgttaagcgtttaaaacatctagatttgggatatttattgagatttctagttttagaatttggtgtcctgaatattttccaatgaatatttactaaagttaaggagaaaattttcacttgtcattactggtttgatttgccattttatttacattttcatagtttgttttactttggatacatttaagattacttagtactcaaaacagggatgtgcagtgattgattggagtctaaagagtatattactattggtcactaacatatgtgttagcaacaatagtgcattttctggagtaagtatactcaatttaaaattaagaatattagttggagacctctgaattatattcatgaaattcctccttaaaacaggttgtcagtgtcaagctttgatcttttacaaagattaattcaagctttgacatagaaattccagagctttattttaagctaagaaaaaaaaaaacaaaaaaccctttatcttgcatgatccaagtttgtactgtgtacaccaattattttttctttcctactcactttctcagggcacatgctattgccccaaatactaatactgcccagcaccccaagccactccaattacttcaggagcacagcttggcccacgagaagctgattatattggtggggcaaaacctagcaaattgactatatctccattcatagcagcttcctggttcttgtccctcccaatgtctgatggttgaatatttactttgtcatatgaagtagtcatttgggctggagagatggctcagtggttaagagcactaactgcccttccagaggtcctgagttcaattcccagcaaccacatggtggctcacaaccatctgtagtgggatctgacgccctcttctggtgtgcctgaagacagctacagtgtactcataaataaaataaatctttaaaaaagaaaaagaagtagtcatttatagaattttaattatagcttgtttctataatacagtataattaaggaatatgaatcatcaaattagataaaattcttataaaaggaataccctacttgatttatttcaagccaacctgtgaatcactggcccttgtttgtaaggaaagtatcttatattcactggccagctatgcagcctaagcttgagctcaatactcagaaaaatgtcaatctaagatgagccctaggcagcattctgtttctgtaatgctgtgttaggccagagtatgctgaataatttccacgctctataaccttataaaattaatatcttacatttataacttttttcattatgtttgaacactcagaatgtttttctttctggattcttgttacatgaagtgattcgtgaagtatggaaaatgtacttgaattatatggtctgacagaaaagaagacggtgagcttaaaaagccatgttaacaaagaaggacattattggcggctttaatgtcttaaaaggaactgtgaacaaattaatattttaaaacaaattaaaattttcttctttgtcttactaaaactttcataatttcaaacttcatgttaactatctacattcaaggcagatatacctaacctttcttctttaagaaaagaaaaaaaatattaatcaccccagtgatttcagtaagctttatatattgcaaacctccgagtctcgggaaatattttctagacatacgtttggtttctcaacttgtaagacaagaagacatattcagaaaaaaattctaatggtgttaataatatttaaatatagggaaaaataaaaactaaatctgtagttaggtgctcttaaatgagggccaccatacctgtaggggaaaagaaaattatagaggtaagattgttcagtcagaaagaaaccttcatagctcatagaaagtattttcactcacgagaaaaccagcatagctgcactttgcaactaattaaacagaaccaagaaaatctagcataaatccttgaggtattagtcatagcagaagcatgggagaaaggttccctggagccttaaagcagttctggcagttaactgcacttaggagctccagattgtcagggtagaccacaaggtagaccagatggaagttttgctcgtgatgcagaacatgaacatacagaaaagtaacccaaggattttagggatgggctcatgatgagaaactcacagaaaagattctttgttccaaactaaaatagtttttttttttttttttttttttttttttggatgctgagcactgatatttcaatcctgtgcttgttaattcaatgacactcaccacagtgacagaaatatcaccaactactaaaatgaggtagctccagaattgaaaacattctttcctgtactaaagtgaatttttttctaatattcacatagtctgctccttaggaccattcagacgataaatattttataacacgtcttttcaaaatttgaaaggagcttccatgtaaccgtgatgagattaaagatcccacaataattagagagtaattatatcaaaagtatttgtttcagatggcagagttatgctcatcctgaaatagaagttgcttatcttatatttattcatgacagttttcctgaaagtatgatgagttggttgataatgctattgtcttccttgagttatttgtcatgctgcttaaggaaacatacagtgtgtagagaaaaaaaaaataaaggtaaggtcaatgtcatgcagtagcgttaggacagaccaaagggtccatgcaacacagctatgcatgacattctgattagaatgttcagagctgttctagccatgagaaaaatagatctccttgtgagcactgcttataccacttcaattggaacagtggatgtagaaagtaaaaccgcaaacttcaatagttaagtttcaatagttaagactttggctttaggcaccatggcagagtgacattcatgacctaaagtggccaagagacacaagcatcaaaaacagtcttaagagcatctgtttctatgcatggcctgtagaaactagtcaaataattgatcccttgtccaaacccaaagtattctgttttgaaacagcagcatatgtaagctgcctttaagagacacggtatttccacctatagggttgcatatccctttagctccttgggtactttctctagctcctccattgggagccctgtgatccatccaatagctgactgtgatcatccacttctgtgtttgctaggccccggcatagtctcacaagagacagctatatctgggtcctttcagcaaaatcttgctagtgtatgcaatggtgtcagtgtttggaagctgattatgggatggatccctgcatgtggcaatcactagatggtccatcctttcatcacagctccaaattttgtctctgtaactccttccatgggtgttttgttcccatttctaagaaggggcaaagtgtccacactttggtcttcgttcttcttgaatttcatgtgtttagcaaattgtatcttatatcttgggtatcctaagtttctgggctaatatccacttatcagtgagtacatattgtgcgagttcctttgtgattgggttacctcactcaggatgatgccctccaggtccatccatttgcctaggaatttcataaattcatttttttaaatagctgagtgctctcgtctctagctgcatatgtatcaaaagatggcctagtcggccatcactgcaaagagaggcccattggacttgcaaactttatatgccccagtacaggggaaccccagggccaaaaagggggagtgggtgggtaggggattggaggggtgggtatgggagacttttgggatagcattgaaaatgtaaacgaggaaaatacctaataaaaaataaattaaaaaaaaagagacatggcgtttgggatgttttgtgtgaagggtgtacttagaggattatgaaagctgcagaacaagggaaaattagcttttgaacagatattcctcaatatcccccttgctcaaattggaaatgaaatcacagtaaggaaaatgatactataaaaagaactttgttggtcgtgagtgacagaaccataagttaagataacttaagaaaattataaccttgctcatgtgtcagatgaacccagaggtaactaagtgtgtgggagccaggtatttgcttggtggtgctacgattcctcacagtgtcattattttgtcttcctttctctctatcagcacttctatcaggaggatggctagaagccagcctggaaaactatcagagagactgattttctttaccaacagctatagcaacatcctggttttggatcattatcctactttgaaatcatgggcatttttgaacagtttgccactgtttcaggggaaagaatattaactgaaacctaggtgctgcatcagaatagaggagcatagattttgagcaggtatagcttgagtttcctacaaatcaaagaaatgcttatgtggcctcaaaaatctgtattacctcataatcagagaaatataactacccatcttgaagactaaaagaggttcagagaagtataaattctagaaaattctgagtggggtcagcagaaaatcagaagttacttatagtagaaaagcgtaaagtcaggaaaatcttcgtgatctaacaagcattctgatctcactgaagtattcatggcattttcctcctcactagcctctgtacccctaaatttctcatcagtttgacagtccagtatcccagcctccctatgctcttctcaaaccatgcctatcactccactcctttgagtattggggtctgtcttaacctttgtgtatttagaatgattgccaaaatttagatataacaacatctagtgtttattcactttattattccacctattgtagaggtaaaggtaactttcattgccggatataagtgtcttttcagaggcttgctgctaaatccattcgccctttctaggtctttctgaactctggttggctggttctagctcaaactcctcttcaagctgagtgattcaaactggcttctctaggcttctgactgaattactctgcttggaaagcttgactctgaactctatgaactccactacattgcctgaactcaacataactgcacccactgatctgccctttctctgacttagtgctcttaagtaagctctctttcctgtctgttcttatgagagttgggtgtatcctatctctaactcattctgtcaaatctttctctgactcgtcactttgtctgcccctcaattagatggcactttcaaatatatctgcttcctcctataaattagttttaccttcattgtttgggattaaaggtatgtactaaggaattaaatatgtgtcattccagcaggatcacatatacctagaaaatgttcgaatgtgatcctttgccagagcaaccgtgttgctgggttaaaattcttctacagtagatatcaaaatgttcttgaatttgatatcagtttaattacctgagcatttagagtagagagacttgtatgcatggctgagagaaacactacttcattacatatttacaaatatacttttgcctacagtcttagaagctgaaaggcctgagtcactttaattttctatcaaatctccagttatttgttctgtttgttttagatctaacccatagcaacatatttctttattattcatctgtttttatttatttttattaatttttattagaaattttcttcatttatgtttcaaatgttatcccctttcctggtttcccctctgaaaaccgtctatcccacccacctctgctcaccaacccacacactcccacctcactgtcctggctttgccctacactggggcattgagccttctcaggaccaagggcctcttcttccattgatgtccaacaaggccatcatctgttatatatgcagctggagccatgggtccctccatgtgtactctggttgcttgtttagtccctgggagctctggggatactggttgctttatattgttctttctatggggttgcaagctccttcagctcatttggtcctttctctaggtcttccactggggaccttgtgctcagtccaatggttggctgagagcatccacctctgaatatgtcaggcactggcagagtctctcaggagacagctatatcaggctcctgtcagcaagcacttgttggcatgcacaatagtgtctggtgactgtatatgggatggattcccaggtggggcagtctctaaatggcctttcctccagtctctgccccatactttgtctctgtaactcctgccatgggcattttgttcctccttctaagaagaatcgaagtattcatactttggtcttccctcttcatgagctttatttggtctgtgaactgtatcttgggtattttgagcttctgagctaatatccacttatcagtgactgtataccatgtgtgttcttttgtgatttgtttgcctaacttaggatgataatttctagttcaatccatttgcctaagaacttcaggaattcattgtttttaatggctgagtagtattctattgtgtaaatgtaccacattttctgtatacattcctctgttgaggggcatctgggttcttcccagcttctggctattataaatacggttattatgaacatagtggagcatgtgttcttattacatgttggagcatcttctgggtatatgcccaggagtggtatagctgggtcctcaggtagtactatgtccaattttctgaggaaccgccaaactgatttccagagtggttgtaccagcttgcaatcccaccagcaatagaggagtgttcctctttctccacatccttgccagcatcttctgccacctgaattttttatcttagccattctgactggtagaatctcagggttgttttggtttgcatttctctgatgactacggatgttgagcatctgtttttaagatgtgttttcacttccgtaattatttgagcctatttgtgtactagtagcatcatttttctacttttactaacccagaatgttaaagatatgcatttttgacaattggttcgaaattttgttctttcttgtggagatattttaccaccagtatcattttttttttcctaaatgaagtctcttaacaacctgaaatatggatagcaactgaggtatctgcaatctaatggaagaatatgaaattatcagccaaattctactttacaataaaaagattatcataccttgtgagatttaaatgcagataattttaaggaaattttatgtgaaaatgatttatcattagttatagttgaagaaataaattggctcccattttctctgataaagatgttagtaaagttaaattttgtttcaaggcagcacacgtatttctaaaaaaattataatggatatgtgtgattaataacaaatagctggagatgcagtcattagagagcaacattctacacaattatttgtatcatcttgtttaaatttccacagatacattgtaaaaatgtgttgcaattcacagcctgcagttactcactgacagagagttaattcattttccaaagttccttgaaaagcctgcacaaaggcatgggacttcccaaagtctacttaaaaccacagtgtaaccctttccattgtcatgccatctcaagaacattttgtattttttagctgtcttgtatatatcagaaatcaaaatatttcaaggtctttcttaaaagtcactttgaagtgttttattctgatgaaaggatggctggttccccacccatagaatatatttggatgtacagtatagaggcaattactttaattgctgcctttatctcttctctttttatgtctattgtgttgggtttttacagtgtgggagttgctacattgtcaaagagttattctttctttccctgtggacattaattccattcttctcacattttccctccttcatacctggaagtcagcttctacttttagcctcctcaccgccctcctttgctcactctgccttacttcatttcctcattgttctgtggaatactcagagttccgctgttttcttaaatcatctgcactagaggctgcaatttcaaaggtttttagtatcttgatattaccttctagttctcatccattcctccccatgaaaaacttgaactttctgttagccttaagtgaactccctctttgagaaggcacagtgcagttgctagtggtttaatgaagtcaattactactcagaagaaagttttctatggtaaattatttattcatatgaatgagcctttttctaacattactattatccgccaaatgcatgaaatgaattcagtaaaagtggaacaacaatctctttaacgtacatcatactcagctcttgtactgtttcttcttacatcccaatgcaccaacgaaatttgctcttaagaaaatctttaccactacaatcatctcagcacaaagcatctatctttatagatatatcattctcacaaattcttatttaggcaggaattattttttaaaaaaaaacccaaatcatcatttttgaagaggaaagtcttcaaaacaacatcttttgaaaacattgttcccagctgccagtctccctacatgcaaatatccaaggtaatgtaatgagccagtgagcgctttgggcggtgactcagtcatgagtccgtttgaataggatgagggcctttataagaaattcctgagggagcttgttaccccttccaatccgctggtgtattgatcttagacttcaaagtcttgagaactaggataataaatttctgtcatttactaattacttagcccaagatattcctttagatcacagcaaaggaacaagtcatccatgattaaaagactataaatagcatgattgttgtcaaatgaactgaagcaataacagaaaatttcaggacagagcatagaacacctgggacgctgtcactttgacattatcatagtggtgtagggttaacatggcttctagttacatattcaagttcgatcatggaaaactttcatctttctgtccttctactattgaaccatattgtaccccataaccagtttttttaaccgcctaaaatatggctttatgtatactacccatgtcatatacctgtgtatatttcatgaaactttatcccaattttccctgttagattacattttcggttctgcattctcactggaatataaagttttctctatagcagctgaatcatttgcaattttagatctattgtattcagtggttaatgctctcctgtccaagtctgagcctcattaaggcagacactatgactagtggcctttcattgactttattctaacataatattttaatataacatcataatactgtaagctcaataaatatttgagatgagaagggaaatgaattcctggtctcatatctcctgctctaccctctgctggggtaccctccattctcctctgcacggtatagttgccaatgataaaggttcaccaaactcactgtggtcactactgcagtgtgtaaaggatgcataaaaactccagcctcaagcttaaatccctccatcgtctagtgttgaaacattgagattattctcttcattgaatcttaatttcattgccaaaagaaagaagccagtataagagtctattttgcaaaacttactgacaggatataaatagctgcccaaactaacagtaaaatgaagataatcaagatgtattcattaaccttttagctttcctggatctttctttaaagttttataattgtaatttataccttcttaaaacaccacctaattacataatattttttaaacagttgtttcattaacttgttaatcttggctccaaatctaattataatttctgaaatgagaaccattgttttctatttcttataattactatactaaatttaatagttaattgattgattgacatataaacataatatatttattacatgtaagaaatttttgcagaggtatatttgtgacaacttaagcatatatagcatgtagattatgtaaaaggagtaaagcagaatctatcatataaattctttaataggctcttttgtttggggttcagtaaatgattaatttggcttcagactgaattaaaattcctttcaaaggttagttctaataaaaataatactccattgttatggattaaaacctgtgaaatataatttaaagtataaatgtgaactaattgtacattttaacagacacagatatgtacaaatgaataatttattttttcacaatattaatggttcttcatttatatgtaaaaatagtttctattgcttgggaagcagtgcttactacatagaatattgcactctcatctggccttaaaaggtgtctcggtaagaaaacgctagactacgtaacaaaagctttcagcacttatcacagaatctaataggttggaagctgggcaccagcctcgggtgaacattattgttcttgtctcgttcactaatggctttaagggtttaatttcatttttatgatttttcagggattctatttttaatcaactttaggttaagcataaagcaatccagcatgattagaaatctacctctatgggaccatagggtttgatgagctgcacacctaattttcttgatcttctcatcctaattgccatggggttgaaaagcataaagacttacttgagaccacaatgaagaatttcttttattttttttaatttatttttttattttttattttttgctgagacttttttcctttttattgtgacaatccagaatgtcaaatttgatagcaattattctggttgagtttgcagattccatgaaattaatcatttatccctacttatttgtttagttattcaatacatgcagaaggtaccacatgccatgttatatataagtgaataaacatttctccatatttaaaggatgctgatatccactcaagagtgggaaattttttttcatataattcacaaaactgactcttgttccatcctagctcttggcttctgctctccatgacagcaaagtatgggaagaaaccctcacctcttgatatctccatgcatgtatgactttaacccataatttttacagtgtttaattttaattatggaatatcatttagcatgactaggtataactttcttacaaagaattcttatgatgaaacaacattttttaaaaattatactgtctggaagttatttatgagcaactaacttttaaggaatatttgcagactgccaaaagtgatggtagagttcactgatctctgggaggtcacctgctttactctgtcaagatcagttgtttaaggaaagactaaagaattccattacttgaaaaatgatcaaacctttttctgtggtctaggaaataaatggagacaattactatttattatcattttgtatttgtttaacactataaataatagtactaaaactgtgtctagtatgtttaattccctcctataacacaatcttttttaacttcatggtaagaaattgtatatttcctggatttgtttaaatgagaaaagctgaaaagtagtgttcaaaatcagatttgttgtttgttattaaatctaattcctttgaattcctacctgtattctgatttctcaatcttggatttgaggtcaccacattgtattatttcgatttttttctattgtacctttaatgatttatgaaaatgcattgaaattatgtattttaaaaaggtatctccagagatatctattccagtaaaagcactagagcatgcttcccccgcctttccacacaaacacaccaagtccactcatcactgcccatgttggtatagatgtaggatcatttcctggagcatgggtatcccctcagacagcatcaccttgaagaaaatgaagtcaccctctcctagcagccaacagttgccagtagctcatcagataaggttagaactttccctcccctcctctggcaatttgtctggcttggtcttgtgttggtcttgtgcttgctattacagccaccatgatatgtgtaaaaatcctgttgtgtctgagaactttatttcatcatagtcatctatcctctgtggcccttaacgtatttctgcaccctcttctatgatagatctgagcctccagagaggaggcttatgaatcagatatcttgttatgcttttaattcatcttatgtggaatttatctccattgcattatattgtactttttccccgtgaactgaaaaaggtaatctgaattttaaagcctgtgacaggaatatcttctcatggtaacagacttcataggaaatgtttacctggtttattatttacagccattcaaacaaagtttcttaacacaagcaacatcaattctggacatctattataaaatatcataaatattacagttttcatttgggtgagaagtgagaaagaatggttaaatcaaagtatgaaacttttaatgttttgtgtgaaaacatcgaagaatcattgcctatcttctctctagcttacaaatcatcagtggttttcaaatcactttagtcttgcagtaggaaaactagttcgatatcgtataagagtaccctaaaggttcagtaaaaaatctagaagatcccaaaggagatgactcaggagattaatgagagaagaaacatttaatgtgaactcaaggttctcctatgtaactcaatcatgaaatcagttctgtcttgcccacacaaacagagcttagcatctttcagcaatgagttactgagtgcttattaagtgctggctactttgtttgatcatagggatgcattgatgaattagaattttgtccttttgtagattatgcaaaacacaagtaaaccaataaacaaaccgtgctttctccaaacaacatgccagtattgagaaggagacatgggcacaaacccctaacctagaaggtactgccagttggtaccttcagggagaaagaaaatcagttttctccaatgcagggacactgggtatgtcaaccatatttcaggacaagtccaatgctcagtaggagttgggtacagaaaatggattccatggtttttgtgcacgtttttgggatttatttggtttaattttgtttgtttgtgttgttttttcatttgtcttatttttattgtttgagaaagagagacagggagagagaaagtgaagctgagtgtgtagaaagttgggtgaggggttctggaaggaaagaatacaaccaaagtacagtctatgattgtttatattaaaacataacagaaactgatttcttataacagggaaatgcagtgtttttgagggagttgtctcactgacttagtcaaaagagatccccaaaatctaagcttcatggctgagttatcatggtgcattaacaaacagaggcaaagaaatgagcatggcaagacatgagagtagagttcaatcaaaaaaagtgcatgtgtgtgtgcccttagatgggacagtgtagaatgttgaagaccaaacatgcaacacgtctgaaggctcaagttcaagatgatgagggagtcacttttttttaaaatattttttattattatgtattttcctcatttacatttagaatgctatcccaaaagtcccccatactccccccccccacttccctacccacccattcccattttttggccctggcattcccctgtactgggcatataaagtttgcacgaccaatgggcctctctttccagtgatggccgactaggccatcttttgatacatatgcagctagagacaagagctccggggtactggttagttcataatgttgttccacctatagggttgcagatccctttagctccttgggtactttctctagctcctccattgggggccctgtaatccatccagtagctgactgtgagcatccacttctgtgtttgctaggccccggcctagtctcacaagagacagctatatcagggtcctttcagccaacacttgctagtatatgcaatggtgtcatcgtttggaggctaattatgggatggatccctggatatggcagtctctagatggtccatgacgagggagtcacttacaggcaaatcttggctgggaaaaagcttcagaaccagcaagcaggacattcagatttctaccctttgttcaatggagatccaggcatgagtcttaaacctgaagctgtctcaaatgaacagcagacatctccaaactgaagagaattgaggaaaggtgacaagtctagaggcaacactctagttaagagggtcctgcagctgtgtatgaccaagtaccctctgtgggaccctctttttaattggatattttatttatttacatttcaaatgttatcccctttcctgatttccccccagaagccccatccctattccatcacccctctgcctgcatctatgagagtgtacccccaaccagacacccactcctgcctccctgtcctcaaattcccctacaccggagcatcgagcctccacaggaccaagagcctcttctcccattgatgcccaaaaaggccatcctctgctacatatatggctggaaccatgggttcctccatgtatactccttggtccatgatttagaccctgggagctctgggtgctctggtttgttgatattgttgtccttcctatgaggttgcaaacccctccagctccttcagtcctttctctaactcctcctttggggaccccatgcacagttcattggctggctgtgagcatccacctctgtatatgtcaggcattggcagagcctctcaggagaaagctatatcaggctcctgtcagcatgcgctccacaatagagtctcaatttggtgactgtatatgggatggatcccccagatggggcagtctctgaatggcctttccttcagtctctgctccacactttgtctccatatttgctcccatgagtattttgttcccccttctaagaagaactgaaggacccacacttctcatcttcctgagacagtttaaacatttctgatctagaaatagcacaatgaggattgtcctgccttatagaaaaggtattaatggtcagtatttatgaatgtcttactatgttctggtctaaacagcttttattcattaatttgtttaatcttgaaggccaggcatggtggtgcccacctttaatctcagcacctgagaagcagatgtaaaagatctctgtgagttcaaggccatcctgatctatgtatgaagttttaggccagccagagatacacagtgagaagctgtatttaaaaaaaaaaaaaaatctcaaaagcacgatcctgatggagccattttgcacaggaggaaactgtgacattgagacccatcctaaagtacaccagaccctccacaactgctcatcaaatctgcttttgtacactgccttgtaatctggcagagcagcagtcttcattctgtttctggccaagaaaactttccaaggctttactctctttgaatattaagtggaactaataatatgttctggaaggagaattgtgaaagcttcggaacaaatgttaagcagtttagtctaccagccaaggaaggtgctacataaatagatgaggtttgtttaactagtgtcagtagtacttgtgaatacagaaccaacagcacatgtatacttgcttagtgctgcctcctgggttcacaaccctccagaaaatatggcacttgtgaagtcaagtcaatggcttagttctctgaacagtaactcccctcttacaaatatgggtgatatttggaagctcacagctatgcccaatcaacagaaatctaacgtttcaagaggtaaagggcaataatgtgataagctatagaaaaatgaccaatgacctatcttaggtagattaatctcttcatatgtaaagagctttacaaatgagaggcagttgatagaaattctatccatcctgtcttctggatgcaacaataccttgcaaaatgggctttctcttagaacatagatttgcataatagaaaggtagttatgggttagaataatattgcagaacaattaaactgttcctaaaggggagtccagagctggcatttctgtttgagactccgcctctctgcctgtactgtctaggtaagcaataatgacaataacttgagacttaccttcaaggacaccaaggagcgaaagcagcttagcaggctgactttcaggcttgacagaaagttcctttctttctccgtagaaatgtggagggcccagatctgagaattgagaacagccattctgaatcttggtggtggtcagctggcctgaacaagaagctggaggacttcacagtccctagctccctagagttagacaggggatacaagtggatacagaactctttaaaacgtctgtttacctccgattttagagggcaaccgctggggcttaaagtagtatctaacatgaaatctatatgtgtaacaagtaaacaagatgtttctttttgaacatttccttgcttctcgtccctaagagacagtataggagagaagggcagattggtttagctacactttaacatcttggaaaacagaagaaagctctcagcagctctcaagcgacagtgtgggagggctgattggtggctgttccctgtttgttttatgggggctggaacagcttgtctccagagctctttgctcctcaagtaagtccccggctgtactgnnnnnnnnnnnnnnnnnnnnttgagacttaccttcaaggacaccaaggagcgaaagcagcttagcaggctgactttcaggcttgacagaaagttcctttctttctccgtagaaatgtggagggcccagatctgagaattgagaacagccattctgaatcttggtggtggtcagctggcctgaacaagaagctggaggacttcacagtccctagctccctagagttagacaggggatacaagtggatacagaactctttaaaacgtctgtttacctccgattttagagggcaaccgctggggcttaaagtagtatctaacatgaaatctatatgtgtaacaagtaaacaagatgtttctttttgaacatttccttgcttctcgtccctaagagacagtataggagagaagggcagattggtttagctacactttaacatcttggaaaacagaagaaagctctcagcagctctcaagcgacagtgtgggagggctgattggtggctgttccctgtttgttttatgggggctggaacagcttgtctccagagctctttgctcctcaagtaagtccccggctgtactggctagttttgtgtcaacttgacacagctggggttatcacagagaaaggagcttcagttgaggaaatgcctctatgatatccaactgtaaggcattttctcaattagtgatcaagggggaaaggccccttgtgggtgggaccatctctgggctggtagtcttgggttctataagagagcaggctgagcaagccaggtgaagcaagccagtaaagaacatccctccatggcctctgcatcagctcctgctccctgacctgcttgagttccagtcctgacttcctttggtgatgaacagcagtatggaagtgtaagccgaataaaccctttcctccccaacttgcttcttggtcatgatgtttgtgcaggaatagaaaccctgactaagacaaattggtaccagtggagtggggtattcctgtgacaacctgaccatgttttggggaggannnnnnnnnnnnnnnnnnnntcagcaataatgcacaataacttgagacttaccttcaaggacaccaaggagcgaaagcagcttagcaggctgactttcaggcttgacagaaagttcctttctttctccgtagaaatgtggagggcccagatctgagaattgagaacagccattctgaatcttggtggtggtcagctggcctgaacaagaagctggaggacttcacagtccctagctccctagagttagacaggggatacaagtggatacagaactctttaaaatgtctgtttacctccgattttagagggcaaccgctggggcttaaagtagtatctaacatgaaatctatatgtgtaacaagtaaacaagatgtttctttttgaacatttccttgcttctcgtccctaagagacagtataggagagaagggcagattggtttagctacactttaacatcttggaaaacagaagaaagctctcagcagctctcaagcgacagtgtgggagggctgattggtggctgttccctgtttgttttatgggggctggaacagcttgtctccagagctctttgctcctcaagtaagtccccggctttctcttctcccagaactgttgtactttttaagcatacctggaggctttctgacacagggaatttccataacaccaaacagttaggttgccaaaggatttttgatagatcttaggaaattactttttttttttatgagttgtatgttgtgtgagttttactaaagttgatacaggtagcagaagtgccttgagtagtgattgtaggtgcttgaaaagagccttggctgcagggaagaggcaacagcagacacctgggaagtttgccctgctattcagtgcccttcgttgatgaatgtgcttactcatcctgtccccttgatatcaaagaaggttgtgggcaaacaccttccttagcaaagagggatctcttttcacaccttctccttctggttttttttttctttaagtttcaaaacagccctgattaacaagatcacaaacagaagattttcaatattgcttagtgtgtagcatgaaaatgtttttaatgaattttcataagcccagctgtataccatttaaaaaaacctggctattacatgcttcaacactatgctgaggcatagggagatgaccaaaccacagggacaatgtccacactgaactctgaaattttcctcatttcacttaagcaaatatctgttcaaccttcacagtaaaaccctaagacagttcatatttttgaataaagattgttaacatgtgcttagatagatagatagatagatagatagatagatagatagataggtatgtagatagatgtcagatgcaactttctcttctttcacccatgaaggtccaagagattgaactctgataatcaatcagcctcaattttaaattcctttacccactgacctacctcaatagctccggttcatactcttaggctacttcctatatatagtagtgtgtgtgtgtgtgtgtgtgtgtgtgtgtgtgtgtgtgtgtgtcttcttaaaagtgttgcttcatttttcacagggtacattgttttgtacacttagactacacattctattaattgaaaagattaatgtttagcaccatatatctcgatcaaaaccatataacttgaaaggagtatctgacagttttcattcctgtttctgtaataaagtgccctgaacagtaacttcggaatagaaagggtttattttagctcacaattgcaggttttagtccattggagaaaggaaggcacaggagcaggaacatgggagaactgcccacagtatatctactgtcaagagcagagtggtggattagtacatgcatgcattatacaattaggattctctacccagcaaatgatgccacccaagggggtcttcccacttcaattagtgtggtcaagagcatccccaacagacaagcccatgggtcaatctgatttgacagtcacacattgagactcttcacagtaagtctagattgcttctagttggcaattgaagctaaccattacagttgccaagaaaacactggtcacctagtaaacacaatagctctattaatagaacttgatttaaaaaatatttctttaacttattcaagtgtaaaataattacatcatttccctcttgtgcttactcccgcccagcctttcaatatttccctcctagctctttcaaattcatgccctgtctttttattaattacggttacaaacataaagacatttttcctgaaatttatctatttctttgtctataaatctatggtctatagactggtgaaaagtttcgtaaatgagcaacgggtatttctctgaacagctggatattttgttttgttattgagtatcatccgttttcttaatttttgaagtgggttttccttcaagtggtttttgaaagcaagccgagcaacacttgcatcttcctttgagttgctgtgataccacagggctttccagaatggaatgccacctggtatatcctaaattctgtgaagcagagagcaggccgagctaagtgaataaaaatggcatagccttaattaccacagaatggtacctaattgccttcatgccagctttaacgcaccacagagcggcagagatggagtgtgattttcaagtgagttacataagcccacctttcagtactggaatgactcccccagtgttgtcaacttgcattttgacagaggtctttctggctaatgtttttccagagtagctgtttgtatttttcccactggcatgcagtgtcttccctggcccgctgttccaacacagctgctattaatattgacatggcaggaacaactgtttctcagtgactgtccttcaggagacaaaacttgatccttcaggaggagacaaaaaataagagacagggcattgtcaaccaaaatggaaagtgcagtaattatgtcataataggattaatctgtgaacttaacttgatctcctttgttaaaattcagtagttctaccaacgccaaaactgctgcaagagggattttgaaatttactctgttagcaaaattatcagcaaatgaaatttagttttcagtgattcagaaataaaactgtaccacttagggaggaccaagtagtgggtttggctttgttttattgcttagacttttaatgtttttattcatttttctctagttcttattgagtgttgactgtatgccaaactgagaagacaacataccaagaatttgaagttatagtattgtttgaattatttttctaaattagcatggctataatatatttcaaaatacatatatttttatctttaaaactccagaattactttttcttgccaattttttattaggtatttactacatttacattttaaatgctatcccaaaagtcccttataccctccccaccccctgctccccatccactcactcccacttcttggccctggtgtttcccctgtactggggcatataaagtttgaaataccaagggtcttccgaatgatggcccactaggccatcttctgctacatatgcagctagagacacgagctctggggggtactggttagttcatattgttgttccacctatagggttgcagacccctttagctccttaggtactttctctagctcctccattgaggcactgtgttccatcctatagctgactgtaagcatccacttctctgtttgccaggcactggcatagcctctcaagccacagctatatcagggtcatgtcagcaaaatcttgctggtgtatgccaaattgtctgcattttgtggctgattatgggatggaccccgagtggggcagtctctggatgatcgatgcttttgtctcagctgcaaacttcatctctgtaactccttccatgggtgttttgttcccaattctaagaagaggcaaagtgtccacactttggtcttcattcttcttgagtttcatgtgttttgtaaattgtatcttgggtattctaaatttctgggctaatatccacttatcagtgagtgcatataatgtgagttcttttgtgattgggttacctcactcaggatgataccctccagatccatccattttcctaggaatttcataaattcattctttttaattgctgagtggtactccattgagtaaatgtaccacattttctgtatccattcctctgttgagggacatctgggttctttccagcttctggttattataaataaggctgctatgaacgtagtggagcatgtgttcttattaccagttggaacatcttctggatatatgcccaggagagttattgcaggatcctcttgtagtactatgtccaattttctgaggaaccgccaggctgatttccaaagtggttgcaaagcatgcaatcccaccatcaatggaggagtgttcctctttctccacatcctcaccagcatctgctgtcacctgaatttctgatcttagccattctgactggtgtgagatagaatctcagggttattttgatttgcatttccctgaggattaaggatgttgaacatttttcagatgcttctcagccattcgatattcctcagttgagaattctttgtttggctctctgccccatttttaatggggttatttggttttctggagtccattttcttgagttctttatacatattgaatattagtcccctatctgatttaggattggtaaagatccttgcccaatctgtggtgaccatttgtcttattgacagtgtcttttgccttacagaagctttgcaattttatgaggtcccatttgtcaattctcaatcttacagcacaagccattgcagttctattcaggaatttttcccctgtgcccatatctttgaggctttaccccactttctcctctataagtttcagtgtctctggttttatgtggagttccttgatccacttagacttgaccttagtacaaggagataggaatggatcaattcacattattctacatgataacagccagttgtgccagcaccatttattgaaaatgctgtctttttttttccactggatggttttatatcccttgtcaaagataagtgaccataggtgtgtgggttcatttctgggtctttaattctattccattggtctacttgtctgtcgctataccagtactatgcagttttcataacaattgttctgtagtacagctttaggtctggcatggtgattccaccagagattcttttaccattgagaagaatttttgctatcctaggtttttttgttattccagtgagtctggctaagtgttgatctatcttgttgattttctcaaagaaccagctcctagtttggttgattctttgaatagttctttttgtttccacttggtttatttcccccctgagttttattatttcctgcagtctactcctcttgggtgaattttcttccttttgttctagagcttttaggtgtgctgtcaagctgctagtgtatgctctctctagtttctttttggaagcactcagagctaagagttttcctctcagcaatgctttcattgtgtcccataagtttgggtatgttgtggcttcatttacattaaactctaaaaagtcttcaatttctttctgtgttccttccttgaccaaggtatcattgaggaaagtggtgttcagtttccaagtgaatgttggctttgtattatttatgttgttattgaagatcagccttagtccatagtgatctgataggatgcatgggacaaatttcaatatttttgtatctgttgaggcctgttttgtgacccattatatggtcaattttggagaaggtaccatgaggtgctgaggagaaggtatatccttttgttttaggataaaatgttttgtagatatctgttaaatccatttgtttcataacttctgttagtttcactgtgtctctgtttaatttctgtttccatgatctgtccattgatgaaagtggggtgttgaagtctcccactattattgtgtgaggtgaaatgtgtgctttgagctttaataaagtttaatgaatgtggctgcccttgtatttggagcatagatattcagaattgagagttcatcttggaagattttacctttgataagtatgaagtgaccctcttgtcttttttgataactttgggttgaaagtcgattttattagatattagaatggctactccagcttgtttcttcagaccattttttgggaaattgttttccagcctttcactctgaggaagtgtctgtctttttctctgagatgtgtttcctgtaagcagcaaaatgttgggtcctgtttgtgtagccagtctgttagtctatgtctttttattggggaattaagtccattgatattcagagatattaaggaaaagtaattgttgcttcgtgttatttttgttgttagagttgagattctgttcttgtggctgtcttcttttaggcttgttgaaggattactttcttgctttttctagggcgtagtttctgtccttgtattggcgttttcccattattatctttgaagggctggatttgtggaaatatattgtgtgaattcggtttagtcatggaatactttggtttctccatctagggtaattgagagtcttgctgggtatagtagcctaggctggcatttgtgttctcttagtgtctgtatgatatctgtcaaggatcttctggctttcatagcctctggtgagaagtctggagtaattcttaaaggtctccctttatatgttacttgactttttcccttactgcttttaatattctgtctttatttagtgcatttgttgttctgattattatgtgtcaggaggaatttcttttctggtccagtctatttggagttctgtaggcttcttgtatgttcattggcatctctttctttaggtttgggaagttttcttctataattttgttgaagatatttgctggccctttaagttgaaaatcttcattctcatattctcctattatctgtaggtttggtcttctcattgtgttctggatttcctggatgttttgagttaggatctttttgtatttttcattttctttgattgttgtgtccatgttccctatggaatcttctgcacctgagattctcttttccacctcttgtattctgttcctgatgctcgcatctatgtttcctgatttctttcctagggtttctatctccagagttgtctccctttaggttttctttattgtttctacatctatttttagttcctggatatttttgttcaattctatcacctgtttggtagtattttcctataactctctaagggatttttgtgtttcctctttaaaggcttctagctgtatacctgtgttttcctgtatttccttcttaaagtcctccatcatcatcacgagaagtgactttagatctatatcttgcttttctggtatgatggtatatccaggacttgctacagtgggagagtttggttctgatgatgccaagtaaacttggtttctgttgcttctattcttacacttgcctcctgccatctgattatctcaagtgcttgcctcctatatctgattagagcctgttcttcctataatcccagttgattcaggactcctcaaagtccagctttctctgtgatcctttgattgtgggctcacatgaacctgagattctggatgtgtcagagtttttggcagtcaagcgtcctctgagaccctgaaatactggtgtgacccagttcctgttatcctgggatccagttgtcctaagatcctgggtgtgttacagtgcctggaagtggtacttcctttgaggattgtggagctgtctggtctgttcaaaaccaaggtaaaccagaactaatcaaaaggaacccgaacctcagtttaggaagggctctggtgtccttattcctgctgtcacaggcctgtcacacttggattggaacagatgttgtgttccactcaccagtaatcctaagatctcgtggaaattcctctagggaccatgagggtgtccgatgactccacgccctaggtgacctggtgctggattgactggaaaagccaggattacttttatctaacagaactgttaatgaaatcactatggttggtggttctgttcatattgtttctgtgtttatattatatcgatttgcttttaaaactggactctccaagctagaaagaggactatgagacaacattaatttaatgtgccaaaactcgcagaggcaagaataactatatataatgtcaaaacagttgtcaagtaactagaaagcacttgaacttctagttgtccttatgaaatggaaggaagaaaattttaaaaaaatgtaaagaaatgaaattggatactgtgtggacaagaaaagacaatggctctcagggaacatgttttgttcttttcatgtagcccactttagcttcaaactcactatatagccagaatggcattaaatgctttatgacctaaatgtctgccagcactcctcagctgcagggagtatagacaagcatcattacaggtggcttccttgtaactttttttctcttcactgaacaccaagggtagatttttttttcttcctttccagtctctaatagttaatgcattgcttttataagcttgtaaggtgaaacattggtattcttataagatgccaatggtcagtctaatggcatttcttcagattcctttagtttggtttcaggtcaattacatgttagttacattttacctctactgtcatcctagatttttgtgatataaagtcttaatcagagtggtttctgtgtctcaaaaaagtcagaattattgccataaagaagcctagctagtcttgggagagaaaacatggcaatgttgctgttctggaacacttcataagcagaaactcctggccctttaggtaaccaacattgatgagccgagtgatattttactccatctcttccttgtctacttgagctctttggaaagggaaagagtggaaaacttttgtgaggtgagataagatacaaagactataatcacctcatacatttatcctctcttcctgtcatatgtataaattatcagttagaaatagaatggtgtaggcctgctataccagcccccctctcctcctgatgacaggtaactgtttcataaggttaagagtaaaggcaaggctgtcacatgacaactgataagaactttcaccttctatgattgctaaggcataattttctttgtatcctttggggagagagctaccacttagaatagagaaggtggggggaagcaacctttctacagaaggtgacttcactccatgagaatcatacaacgcacgtgcactttctgtctatcagacaggtactgcttgaggacaaaatggagataccaatggcaaagggaatagaaatttgaagtattagtcttaggaatattactgacatatgacattttgaaggcaacccaaaaacctcaaggttctctgttaaagaaacatattgttcagcataggcaaacctattcacttctaatttctttgagaaagagctgtgtaatatacaattaaaatctaaaggtatcttaagcatataaattaattgttaaatttctatttagcattagaaataaagatggatgcaaagtctgtaatgtggggctctttttcagctctcttcctccagcctacaaacaaaattcaagctatctccaaatttgctaattagaccttgagaaatctgaaacaaatatgatgcatcttggttccgggcaataacttccatcctgtccatttataattaacattttgtgctttttagttttgtgtttcaattgtgttactttgaccttacctaatatcatcatattgaaaaatcaattctccttggatctataccaaaatcttgaactaatttttatagaaatataatactaattttaagaaagactgaaaaggaaaattcatttcttactccttattctatctttctctatatactgaacaatgtcttttggaacacttctatttaatttctttgtttagtttgcctgatgacaaagactgaatactcaaaaggaaactggtattttgcaataaacccagaagtttagattttttggaaatattaagagaactaaagatcaacgattttatgaagtatgccaggctcagaattatgtttgacaatttttgtcacataaggaggtatttaaatgctcccacacataattttcctactcaccaaagcaacttttttatttctctgaattctttttatttttttgaaaagatttgaacattcctagtcacagcaaattaggacaattttctcaggcttttgtgtatgctcacaaaactgtgtatttgagttttctgacatttaattcttagactccctcattttcttgcacattcttattagttaaccctttttaaaataccaacacacatgatgttatgcaatattttataaaatggtgaaaagatagaagaatagaaatataataggtgctttcgtgatattatttctttagcctttaagacctagggtttttctttctttctttctttttgttaaaattggacttcttaaatatagatcaggaactatttgaacagtggatactcaaattattcatgacagtctcagaaacaggaacaggtttttattccacagagttcttatacaaaccaatttattggacatagtttatagcaggagtattaaaacccaaatgaattgctgcagctaccaatgtgggtgtcacccaaggcaagggccattggctaatgccaatacacaaactgatatttgtccacatgaaatcaagtagagagcctaatagctccatagaaatcttgtagcattttgtcactcccatgacattcaagtaaatgctgttgtcatttatttttatagttttccacaaaggtatcatttccactgatatctttgtagaaaatgaaaatgtaagcaactccatcccattcttcacctgagagcattaatggcttttttctggagctctgtgaggcttctaaggagatccaggtagaggggcaggacactaatgtgctcatggagggagaaaggaagaagcaaaaggtagcagacagaacgtaaacactaagcagcagataaagctaaacaaaagaaggaccccaaactaacattcctaggaaacattaatttatctgttggacgttcccagtggttaagaatgttctgtttttgtccgtctgctttcagatacagatgatagaagctcaactcaaaatagcctggatatgagagagaagtatgagtagatggtggtgggtggtggtggtaaatgatttcctggcctcacactttaaatgtgaagattgtcaccaagatccccatgtcaccattcttgtgtatccactcatactgtgccacttctttctttgctctctcatggtctcaggattgctctagtcaaccacaaagagcgctgtgccatgaggagcagctggagactgagctttttatggaatggagttcatatcccacctaagccactttaatcttcctctgatcaccatgcataaaatcctaaaggaatagccaatgggctagtactatgaaatgttctcaacttgggaggatttattccaatcaaaaaaacagaagacactggtgcctatgcctaggactaggctgaagtggaaacttaagggttctttggaaaaatctgctgtgttggatgttactttgctaaggcaaacatgggaaggaacttttcattgaagcagacacaggagaaaggatggtctgctaaagcaaacatgtgaaagtacacgtgacacacatgtattgatccaccttacattgggtagttgagctccatttgtagggactccatagagagaaatgcaccaaaaaggttttggtggcacactgcagtttcttgctgattccttggactcgggactcaggttgattggcagggtgatgtcagctgagacagatacacatgttaagacaagaccatggaggatatatgatgtttggaaggagtataaatatgcccaatggactgtgatggggcgggggggggggattgagtttggcttgctggtagagctaactgtacaatgcatgttggtctcctgtctttgctgatcctcacttgctgagagaggcacagttgagaacttctcctgacattcctgctggtcacacctgctgacttgtgcagaggctgaggccttgttcttcctgctaggtcatgccactgctgctgctatcccaacattgccaaattagactgctggtatatccacgaagtgttttcgagtgaattgagttgttgctactggcctgtgaactgaaatgccaatttccagacaatgcagatgagagttgctctaaagaaccatatataaacaggtccacttcccctgtatcctttcttttctactatctctggttacttatatcagatattctgtcacaatagcaagaaaattaaataagtcagagttgtgatcagtacccccttcaggaacatgtagttgagtgcaagttccccaaagataaggaaattagaatagatgaggcaagaagaagtagtaagagatgtttgctgcatcatacggatgagtctgtccagttagaaaccatgatggatgggaagcaggagaaggtagaagagataatatagaaggcaatcagaaaaataaaaagggaaaatgggttccccagagattttggaagctgatacagattggatgtgggaagtgttgagcagcatagaaaacacagtgaagcaaaacagaaaagagaagtagagagtgggtggaaagccatttattacgtgtcctctgaggacatcagtcatgggacagctttgtcagtctggaaggcaataactgtcaatcagccagttagacaaaatccaagcaggtctgagtccagtgttaaaacttagcgtgttagttattgtaagctttcgcacttggacaacacattttaattaaaataatacctggcattttattattattattattattattattattattattattattgtctctttctctttgcttcctctctgtcattaccttattgtatatttgggaattcgagctgtttcctgtttagtttttctgaatgtgaactaaaaatacagaagaaatctctaattgcaggacccattttattggccccgtctacagctttcaaatgacacaattttcaacattgtgcctaaaaaggtattcagaagtcatagttttaaagaaaatgtcttgaattttgggttgaatcttttaaaggtaaggtctaaagtcagtctttgaataactgaataagttaagaaaaactcgttgatatgctaagagagcgttagaacaagtgagacaggaatgtgcagtcaaatggttggtgcttgtgggtcaaagtacctggcttttgagagcatctaacttggatcaaggaaaactgaggctgagctcaacagcacttggttacatcaaccactgctgcttaaattgtgaccctggaatcagcagcacaattgtagaaagcttgagataaactgcttggtggggaggttctgggcatgggaccctggagacttacattttaaccagctcttcaaggaactctagtgtcagaaaatatttgaacagcattgggatatatagtagtagaatattcaagtgaagaagccccagaaggtggatatacaaactaaacaagagtctgagtgagaagacagaatccaagcccaaggaagtaggaattacagcaagcaacaatacctgaggaatagaagagaataagccctaagcaaaaagatgcagagagaccttaacagcagtcctctgtcctctggagagcattcacaaaatccaagtttcttattaaccaaagaggtcactgttagagagagcaaggccaaatgttctactgaaactcagcaagcgaccttttaaataatcaggtctcacccctgctggatgtaattaagttctctatggagctgaacaaaggagtaacagtatattgctgtgtatatagttatcaggcttaggttaacagagtatataattataataaatgtaagccctgtttacagaaaacagaatattctttattgtccaatggttgtgaagtgcttctttgctcggtgagagtattgagaggtggagactggtaataatgaccaccttggcaagttgctaaaggagaaattcctgagcccaccttgagcacaccctgaggatttggcctgcaactctgtatatctgaaaattccccagagagttgttaggttcctccagattgagaaacatctaaactaaaaggcaggcgggagcataaacccattagatttctaccctaaattcagaaagaaaatgcttcccactcttctaaactgtatctctgtctctgctcctccttttctttgatcttccaattctaataccaactcttctcttttttacattttatttcatctttttttttcacactccagatttcatccccctcccagtccacnnnnnnnnnnnnnnnnnnnnnnnnnnnnnnnnnnnnnnnnnnnnnnnnnnnnnnnnnnnnnnnnnnnnnnnnnnnnnnnnnnctccccaccccttcccacctttaaattccctggagcctccagtcccttgagggttatctgcatcttctctgactgaacccacacccagaagtcctcagctgtatatgagttgggagcctcatgtcagctggtgtacgatgcctggttggtggtccagtgtctgagagacctctgggattcaagttaattgagattactggccctcctacatggttgcccttctcagcttcttccagcttttccctatttcaaccacaggggtcagcagcttctgtccatttggttgggtacaaatatctacatctgactcttttagctgcttgttggatcttttggaggacagtcctgataggtctttttttaattttcatttttatagaacatgattttaatattttcaactgttgatattcaacaagcagaatagttattttaagagatacttcgtttttctgtctcccttttcaattctgattttaatttggatactatctctgtaccctctggttagtctggctaagattttatctatcttgttgatttttctcaaagaaccaattcctggttttggtgatttctgtatagttctttttgtttctatttggtttgattacttcctgcagtctactcctcttgggtgtatttgcttctttttgttctagagctttctggtgtgctgtcaagctgctagtataaaccctgttcagtttctttttggaggcattttgagctatgagttttcctcctaccactgctttcattgtgccccataagttttggcatggtgtgtcttcattttcattacatcctaaaaagcctttaatttatttctttatttctttcttgaccaagttatcattgagtagagcattgttcaacttccatgtgtatgtggactttctgttgtttctgttggtattgaagatcagccttagtctgtggtgatcttatagggtgagatatatatatatatcagatataccaaactcctaatttatatggaaagtgacacaacatgagtaagggtgggaggagagccaagtgggttctgggatatgacggttgttgacttggcaacgcaggtcatgggtcacattgttagtgcctgcgtttggaatgtcctggtactaagggggattatttcaatcttcttgtactgttgaggcttgttttgtgaccatttatatggtcaattttggagaaggtaccctgagatgctgagaagaggtatattattttgctttaggatgaaatattctataaatatctgttagatctatttggctcataacttctgttacttcgactctgtttagtttctatttccatgatctgcccattactgagagtgggatgttgaagtctcccactattattgtgtgggttgaaatgtgtgttttaagctttagtaaagtttcttttatgaatgtgggtgcccttgcatttggagcatagatgttcagaattgtgagttcatcttggtagatttttcctttgatcagtatgaagtgtccttccttatcttttttgataacttctggttaatagttaattttatttgatattagaatgctactccagcttgtatcttggaaccatttacttgggaaaattgttttccaacattttactctgagatagtgtctgcctttgtcattgaggtgtgtttccagtatgtagcaaaattctggatcctgtttacatatccagtctgttagtctatgtctttttttagggaattgagttcatcaacgttaagagatattaaggaaaggtgattgctgcttcctgttatttttgttgttagcagtggaattatgtttgtgtgcctaccttcttttaggtttgttgaaagattactttcttgctttttatagggtgtagtttccctccttgtgttggtgtttaccacctcttatcctttgtagtgctgaatttatgaaaagatattgtataaattttgttttgtcatggaatatcttggtttctccacctatggtaattgagacctttggcggttatagtaattgagagctttgcctgggctggcatttcttttctcttagactctgtataacatctgcccaggatcttctagctctcatagtctctggtgagaagtctggtgtaattctaataggtctgcctttataagttacttgacctttttcccttactgcttttaatattttatctttgtttaatgcatttggtgttttgattattatgtgacaggaggaatttcttttctggatcagtctctttggagttctgtaggcttcttgtatgttcatgggcatctgtttctttaggttagggaagttttcttctataattttgttgaagatatttactggccctttaagttgggagtcttcactcttttctataccattatccttaggtttggtcttctcgttttgtcctggatttcctggatgttttgggttaggatctttttgcattttgcattttctttgactgttgtgtcaattttttctatggtatcttctgcccctgagattctctcttctatctcttgtattctgttggtgatgtttgcattatgactcctgatctctttcctaggttttctaactccagggttgtctccctttgtgattttttttattgtttctatttccatttttagatcttggttttgttcatttccttcacctgtttgattgtgttttcctgtaattctttaagggagttttgtgtttcctctttaaggacttctagctgtttacctgtgttgtcctgtatttatttaagggagttatttatgtccttcttaaagtcctctatcatcatcatgagaagtgattttagatctgagtatttcttttccggtgtgatggtgtatccaattgttgctatgggataactgggttctaatgatgccaagtaaccttggtttctgttgcttatgttctttcacttgcctcctgccatctgattttctctggtcctacatgccttccctatatccgactggaacctatccttcctgtgatcttggttgtatcagatctcctcagaattcagctgtttctgggatcctgtgatcctgagatcctggttgtgtcagagctcctgggagtcaagctgcctcttggacactgagatcctggtgtaaccaagctcctgggatcctgggatcctggcatgttagagcacctggaagtggagctttttctgggtgttgtcagactggctaaagagttagcacccaaggtctgctcagggcacctctgatcttatggccctggcatgttagcatgccttggagtggatcttcctctgggtgttgtgggactggctgcaaagttcatgcccaaggtcttctcagggtaccatcccagactggaaggcaattgcaatctcttgcaagtataatggctatcctctctctatgacctcctctctgtctctttaatcactttttatttcttgttttttgatagctttagaaaggcaagcactttttagggcaaactgtaaagtccctatgactgtatgtttaataggaaatatttttattattaatttatttatttactttacaactcgacttcatttcccctccttcttctcccagtacccactaccacccactcctctttttctcttcataaaagaggaggcctctcatgaatatcaaccagctttcactatcaagttgtaagactaggcacatctcttattgagtatagactagacagccccgtagggagaaagagtctcaaagacaggctacagagtcagagacagcccctgctcctactattaggatttccatatgaagactaacagttacatgtgtgcagagggcactagatcagtcacatgtatgctcaggttggcagttctcttagagctcctatggacccaggttagttgattatgtatgttttcttgtggtgtccttgactgctctgggttctataatccttactcccactgttcagcaaggttcttcaagctctgtgtaatgtttagctgtggctctctgcatttgtatccatcagttgctgggttaagcttcctgatatcagttatgctaggcttctgtcagcaagtatagcagtatatcactaacagtgtcagggtagagcttcctctcatggtgtctttctctttatttcaatacggccagagacatgcctatccagtatttggatctctgagaatgcattccacgactttaacccatgtgagccccaaagtgtgtctactatgtctgattttatttttaaaaaattattttatttatttttaatttttttattcatatgagtacactatagctgtcctcagacacaatagaagagggcatcagatcccattacagatggttttgagccaccatgtggttgctgggaattgaactcagaactgcttgaagagcagtcagtgctcttaattgctgagccatctctccagccctatatctgatttcttaaactatgactttaagctgagcaatctcagtccctttgtgagtgagtatagactccctgaacatgatcctcatggttcctgtgtttggagataagcctgggtaatgaatctttcttcactccaatggcttgggtttcctgtatacatgttcagaatctgtgctcatctaaatgcaaagacactgtgtccattggttattctttcatgcctcatttctcagcattgtgattctatttactggtatttccaaggctccagatttcagataaggattcaaaattttgtgctgaccattgccaaaagctctaagtgtgaactgtaaactggccctctccagaccctactgtaccttttctttttttttttttttgccattttttattaggtatttccaatgctataccaaaaagtcccccatacccacccacccccactcccctacccacccactccccctttttggccctggcgttaccctgtactggggcatataaagtttgcgtgtccaatgggcctctctttccagtgatggctgactaggccatcttttgatacatatgcagctagagtcaagagctccggggtactggttagttcattatgttgttccgcctatagggttgcagatccctttagctccttgggtactttctctagctcctccattgggagccctgtgatccatccattagctgactgtgagcatccacttctgtgtttgctaggccccggcatagtctcacaagagacagctacatctgggtcctttcgataaaatcttgctagtgtatgcaatggtgtcagcgtttggatgctgattatggggtggatccctggatatggcagtctctacatggaccatcctttcatctcagctccctgtaccttttctttaatgtctgagtttaatggctctctactcattattatctgaagccctggttccttgtggctgttctgaccatcatgttcattacagtcccccctccttccatttgtatctgaattgatggattcagtccaaataccatcatttggatctctgtagcattcagaaaaggaattagggagtctttgaatggtggaagttactctggaaacactcaaatactcagtatttaaatattcagtgagcgatgcctagatctcactggtaagttggaaaactggtacttttgcatcaacagtcccagtgaatattcttttttttttccattttttattaggtatttaactcatttacatttccaatgctataccaaaagtcccccatatccacccacccccactcccctgcccacccactccccctttttggccctggtgttcccctgtactggggcatataaagtttgcaagtccaatgggcctctctttccagtgatggccgactaggccatcttttgatatatatgcagctagagtcaagagctccggggtactggttagttcataatgttgttccacctatagggttgcagatccctttagctccttggctactttctctagctcctccattgggagccctatgatccatccattagctgactgtgagcatccacttctgtgtttgctaggctccggcatagtctcacaagagacagctacatctgggtcctttcaataaaatcttgctagtgtatgcaatggtgtcagcgtttggatgctgattatggggtggatccctggatatggcagtctctacatggtctatcctttcatctcagctccaaactttgtctctgtaactccttccatgggtgttttgttcccaaatctaaggaggggcatagtgtccacacttcagtcttcattcttcttgagtttcatgtgtttagcaaattatatcttatatcttgggtatcctaggtttgggactaatatccacttatcagtgagtacatattgtgtgagtttctttgtgaatgtgttacctcactcaggatgatgccctccaggtccatccatttggctaggaatttcataaattcattctttttaatagctgagtagtactccattgtgtagatgtaccacattttctgtatccattcctctgttgaggggcatctaggttctttccagcttctggctattataaataaggctgctatgaacatagtggagcatgtgtccttcttaccagttggggcatcttctggatatatgcccaggagaggtattgctggatcctccggtagtactatgtccagttttctgaggaaccgccagactgatttccagagtggttgtacaaacctgcactcccaccaacaatggaggagtgttcctctttctccacatcctcgccagcatctgctgtcacctgaatttttgatcttagccattctgactggtgtgaggtggaatctcagggttgttttgatttgcatttccctgatgattaaggatgttgaacattttttcaagtgcttctctgccattcggtattcctcaggtgagaattctttgttcagttctgagccccattttttaatggggttatttgattttctgaagtccaccttcttgagttctttatatatgttggatattagtcccctatctgatttaggataggtaaagatcctttcccaatctgttggtggtctctttgtcttattgacggtgtcttttgccttgcagaaactttggagtttcattaggtcccatttgtcaattctcgatcttacagcacaagccattgctgttctgttcaggaatttttcccctgtgcccatatcttcaaggcttttccccactttctcctctataagtttcagtgtctctggttttatgtgaagttccttgatccacttagatttgaccttagtacaaggagataagtatggatcgattcgcattcttctacacgataacaaccagttgtgccagcaccaattgttgaaaatgctgtctttcttccactggatggttttagctcccttgtcagctgctctaatcctcaccttctttccctgccagagctgactgttctataagaagttgactccagatgtctaaccacgagtccagattcccatttgagaggatgagagctctcaagttagatgtgcctgggactgaatctgggcatgattgacacatgggatgggatgggtatttccaacaagagactaagcatcacttgtacaataagcaagtggcacataagtcaccaggtcctgctgtggaggatgaagtgccctggaaggtgctcaatgagaatagaactcatgctcactgcaccatgcatattagcagctctggttacatttctcaccataatgcaacatgataactcttaacttttaaagtagctcttgagttcatggagtgttcaaagacaatgaagtgatacagagaccaaaccatgctgctatttgatgtgcatggctacttgaagcccacataggagattcaggcaggcataacagtttcctagggctgctaggaaaaatgccataaactgagtggcttaaagcaacaggaatttattctttctctcactattctgaaggctggatgttcagtgtaatataagctcagcaaaaccttgctttatttgacgtgcatggctacttgaagcccacataggagattcaggcaggcataacagtttcctagggctgctaggaaaaatgccataaactgagtggcttaaagcaacaggaatttattctttctctcactgttctgaaggctggatgttcagtgtaatataagttcagcaaaaccttgctctctccagtattaaggagcttttcctcatttcttccatctgtaaaatcttgacattttgtggcatatggcacaacaattctacactcttaacagcacctgactcttagcaagttctctctgtgtctatatccaattttttcttcattttcttatgtaaagacggaatcacttagcatacacactaatgcatcattacctccatcttcatttgattgaatctgcacattcaatgattgattcaatgtgtgattgatacacatctgaggtttttttttttaaatctataaagactactgagtgcaagaggtaagtaagtatcttgaggatacaaacctgctcactacaatgcacagaggaaataattagtatgtcatggctgaataaatcaataacttgtagcttgagaaatatctgcttttcttactctggctaatcttccatatatcagacatatttatgcattaaaaaccgtctgtgtttaattggcttcaccattaggtgagttcattttcttgtatgaacctggaatttaatgattgcaacaaagatacataggatgtgaaaactgaggttttgaaagggaggctactataaagaaatgagcataatcataaacagcaaaggagaaatttagaattctaatgagacagtcacaatcctttgttcatagttttggtctaaaatgcaggcaaatttgtaagaaaatacctagaagagatagtaagaggagaagaatgttaatctgaatataaaattttttctggagcgtaacctaaattgagaactggggatcttaagttactagactgcagagccctggtgagtgtcaaaagtacttcttaagacagaaagctggtttcctcagagtttagagtgcccagaataacacagtagagtgcaacttccagtaccttcagggttgtacatgattgccatgaaatattgccttgtatgccactgtttattctacacagaatgttaaatgtcagtttgttaaatcaaggacaaagccaaatggacagactggatgccatctctactaagtaggctcatcggcaagcacatagtatttacagagaaactatgaatatgagcttacttgttacccttaataccttacttttcctgacttctttcagtcaaatcacaaaatgcattatttacattcaaggggaaaggtaatggtaatagacaacaatattttagaaaggtacaaaggaagaaacaagcctctatgaagttctgacatacaggaacagtgtgggctcactgttaccatattcattcacttctttcaagccattaaaaaaaataaattttgaccaatacatacggatatggtcaatttacttctggtttatgtttatacaatttttaatataaatattttccatgatattaagaattcttcagttacattcagtggttctatgatagcacacagtttacaaagctattcatctgatgcacacttggtttctttgtctttatttcaacatggccgatcaagtgtttatgaagatctgtgtgtttgatttttactgctctggtagcacaatgagaagcattcttgtcttcatgcccttcttgttgggtgtctatagcaatgggcactgctttaccagccagcattcattctttcgattgggctttctccccactcccctgagcctttctctccctcaatttaatctcatgttattgctaaaataccactgggacttttgctataaacatagaaagaaggagaaaaatgctatcaggtacattctagactggtctgtaacttatgggtcctttaaaattccatattacaatccaggcagtggtgttgcacacctttaatcccagcacttgggaggcagagacaggtgagtttctgagttcgaggccagcctggtctacagagtgagttccaggacagccaaggctatacagaaaaaccctgttattcggagccacaaacacaactgcacttgataagcattgttttgtaatacagacaaaacaggacttctgtgtttattatttctagcagttccactttatgctatattcccagcaatctaattttcaataatagattggagctatttattgttttgaacattcaaaacaaatctctggaacaacaatatgaactaaccagtaccccggagctcttgtctctagctgcatatgtatcaaaagatggcctagtcggccatcactgcaaagagaggcccactggacttgcaaactttatatgccccagtgcaggggaaccccagggccaaaaagggggagtgggtgggtagggggttgggggggtgggtatgggggacttttgggcgtagcattgaaaatgtaaacgaggaaaatacctaataaaaaataaattaaaaaaaataaaataaaataaaaaaaacaaaaacaaaacaaatctcattaccaccctgtgcaccattctgaagaaaacaaatacaaaactagtaccctttaatatccctttcaagtctgaagttctataaaaacaggaagacttgggggaaaaaaatcacatattctacagcaatactacaaaatgtctgagataacacaccctgaatcctaaatgctttaaaacattctgttggtttctcctcaaaacctttcaggagtatcagttcttcctgcccatctcctcctctatccctatcaccagtggacagaattgctactgaccacactcccttattagttaatatatggaaaggggagcactggaaagatgtattgagaaatgtatcataaagaatactgtgtaattagtctataatgcagatatagatttacagacatatttgtctagatgttctataagtaaaagaagtaacataacacaaaagaagtaaaggttagggttaaatgtgaatacaaagatatgctcttgcctcgctgcataaatgaggctgtgtaccctctgggttatgtgctccaccgagatgagccagccctggccacctcagtaacttgcaaacagagctctgcagtttgctttctttttcccactagctaattgcaacaaatttgtcagtataatctagtcaagctactcacctttagattgttctttgatttcaaactaataagaaggcaaggaggaacttcataaattgttgtttaggcctttttattttttcagccccatttccttactgattacttacatttcagtcaaaagaactgctgagttctctgaaattaaaagaatttctattcacacttttaacttttactgcaaaaaaaaaatatttttaatcagcaaaacttgtaggcttacatttttcaaaacctactttaataagggttcctaattgctctaacctttctcatagcccactgactaaaggtaggggaggaaaatggctgataggacaaggggggcatggacctgtttagaagtagttccttggggccattctaatctttgttgtcagaagtctagtccactagcaaaacaccaaacacaaatcagcagtagtggctcaatctagaagaatcgttgaggctctgccaattggcacgagtccgccaaagtggcaaaaagcagcccgaagttctttggtgcatttctctctacaaagtcatgacaaacgaagatcagagaagaaagcaaagaaatccaatgcaagagtgttgccagcaaagacaagcaaggcgaaccaatcaatgcctcagggtcattcactgtcttttgagttatacttctactctttccaaacagcatgtgttctctcaagcgtccactccagcaaaatatcacctttttcaccatgcagctttcagaacaacaccatgtctctgttctcagaaaacatcctttcataagacagtttccaggagaacatcacatgatactcctccaacgaaaccagaaatttccacttcacataagacttgttcatctactttttctactcatctttaacctttgaacttcagcttaattgtagtaccctcagtcaacttcttctgttcttcatcatcaactgattaattgtattctttgtgtgtgtttaagacaagatctcactatgtagctttggctgtcttggaattccctatgtatgccagctttggcttgaatgtacagggatctgattgcctctgtcttctgagtgctgggattgaagttatgtgccatcatgtctaaactataagactactattgaattgagcaccaagagtctagaaatctcatatatattcattttgaaatctattgcagtttcaggtaccaatggcagtaagaataatgtctaacgtgtagcaatacatgtttctagaataaacacatgaataacgaggagcccacaacaaaaccagtacaagaacccctaaatactctttctggtagcaaatctaatttacaaaaacatgcattgaaatatcaaaatatccaaataaaataaagaaaaaaaataaagaaaatcccatcaaaaataagatagaatatgtagaatcatgtaataaaatttgagtttaggtacataacaaggaataatagggctggtaatgaaatgctgtgacagtttgtcacagtgtctggcatcctattacttaaaggaagacttgcctatgaaggtgtacattgaactttgacatgtgacaagtgcctagtctaagacctttcaaactcatgttcttagttgatcctcatatgttttaggtctttaagaggtatgtttctagtcctcttattttaatttttaaaaataagaattataattaagttcttgttaaattctcatttattattgctaatatttatatacttctcctttctctcaaaatctgattagttataatgatctactgactaataagtatccaagatcacaaagccagcaaattatagagtctggatttgaaaatcaagcactcagtccccagggcttatgttctttgctactctgtgttatcatctagtatgttgaaagaaaaagcacaaatacagaattatttgtccaagacagactctgatataatcgttattaataatatgaacctatttaacaatgtagaatggagactagaactagccacatacattcattaagcaatcatgtggattggagagtaactgtatttaaatgtttagtgagttcaatgaaggacttgcatagcttgtgtaaggtgattgactaactaaagtatcttttcatatcttactatggggtccttggtccatggctatggtgttattcttctgacagtaatgtattatatttactaacattttatccaagtatttgaatttattagttctcagcactgggaaaaaaagacaaatgaaaaaattttatcaaagatataatatctttctttctcttttttcagcaatctcgacacagaagaactatgcggtaagtatctgtaaggccaatcaaagtattgttaatttgatttagaaaagtgtgagatgtgatgtgatatttctcgcaacctggagttaaaagtccgggagtaaggagtttaaagcatgagtctgaatcacgggggacttttctgtatccttgaatttacttaaacagtttacttaaacatccttgcatgttacttaaacagttgagcctagctaatttgcttgtgaaaagaaaattgggattgttcaatggttttatagaaactaactcttcaatttaatgcgacttctccatttgctttataatcatcgtgcagtctttccaaagttgaacccttgagttaaaaaaacagaaaacaaacaaacaagaaaaaactttgtttcatatctgtacaatcattttagagactgaaatgcacttttgaaaaagaaaagcacaagtgcagaaagaaagtattttcaaatgcctagtctaccagccttttcatttatctctgttatgtttgtggctgggaacagaaatcagagatttaaaatgtgggaaagtaaatgatctggactttatgcttaagtatgagaatggagtattatgaaactactaaacatagaatatgtatgtctctgaatatggaaagttttatattttgcattttaagacaaatgtgttaaataaaacctttgtgctatatgatgtattgtgcaggtggcctaaaacatttatatagtttaaagaaaagattttctaagagttcttattgaaatcacaaatgttttctagctactatagaaattatacaattttacagctcaccacagtcatacaaatagacatttttatgtcacttaagattggtaaccttctgtttcatcaacctggcagatcatcaatgaaagattttgtcagaataaagtgtcatactgtggtttcaagacagtaagtaaacagaacaagtaataatcacagatcaggagttttcaaaggtttctatggccattaaacattatttttcctaaataatacctgcataatgtccctttcagttcagggacaagaatccaactgaagaaacaagatctggtgcataaaccaggcatttggcatcccagaaggttacacttttatgacttatagggaaaccctaccatgccttcacacatagtcccaggtggctcccactctgcatggcagttattgggctaatcagacaaaggggtctccatagaccataacatcaaaatgtgtggtaaacagcaaagcccttgaaggtcaagctgtagtcctcctgtgtatacaacccctgctcaagctatagtccatcctcctgggtagacaggcccctgccagtcaagggtgagataatggggagagctaagacaaccacattgatcattttgtgaagctagagacctatctctttcagatgtttaggtatgatgctgccaaagtaacaattccctccaattgttcagctatctcattttatattcaactaactttgcctgagtaagataagccaactgaaaaagtaactattattaatatgtcttaagccaaaaaatttagtggcttctctcagtttgctctattgtctgtttgtccttaacacatattttataaatctctgtcagctcttaaaactaacaaatgttagatcataacagtgagtcttcacttaatcatccatacatgattctgttttcctttctcaataataatgaaacttgattagtcatgtaccctgtctgtattggataatttgaatgctgcccttcctccacagttttagcaagggaactggttagattttgagtcaacagaatttttttttaatttttaaactccagtgattatattcataattttattataacactctgctctgctctagaatgtgcattttatttttaaattggagcttcatttcccattattttgtgaatataaaatatttaagttggattttaatcagtgccaaagtttcagtgccagcaagtaaaatatgtcaggacacatctcatacaagtttccagtaggtgtgtgaggggtgaggcttgattgacatagaaaggagatttcatacactttctcctagaaacgaattacagattctaggtatctacatgctagctgtattaagcttttgcttaattcagcagatagttcaaatatggaactaaaactcaaaatctattaaaatactactttaaaatatctttgcaatctaatttatgagataatatataaataatattttaaattaataatgttgcatcgtgtgagtttaccagctgaagcaccattggtgaattttgactatgtatgtttcttcaaagtgcatttttctgttaaggattttctggtctactcacccacactgatcaaccaattgcattagaataatcatttctgaacatttctatctgattgtgcccttcagattacaagggattaaaccttatctctcatctcatcaccttccttttctgcctggtttacaagcacgggggttctaacatggtacacacagtagaagccatttatgttcacaagagaactctttctgagaaggaattcctactctgatgtattagccatgggtccttttgtttttaaaccatacctgacttggaagactgagtcacagaataaaatctaaaagccagcactactaatactatgcagtgaggaatggagaaagtaacctctagtgagcattttattagtgaaggtgttgtgctgattatgcacgggaagataatctgctttgtggaagatggtgttcttaaagtatctgtttatgagttgcattcttttcttccattgacacatccagtgtcaagactatttttctaaagtccttcatgtcaactgagaaaaactggctctaagttttctatgaaggctgtatgactatgtttttggcaaatccatgtcccatatctgtgtatttcaataaaagtaggttttattttctcttgttacccaaagacaagtgtttaaagagatcaatatatgctttaaacctacttttctccaatgacatcatgtaatggcaaaaggcaatttcctagtacatactgccattgtgacatttaattaataaatatgatttgtagtgacaggaacatgacattactccaagctcagccatttcctcctcttcccttactccacacatcagctgattcacgttccttagtctatgatgaaatccctcctgacaatgaacccctgagtcccttgtctcttgaagcctcactatctccctcacatccaggtaaagtatttgagaaaagttgtaggatgtcactcttttttttccaaaattttttacctacctgttgtacatagccaccttaaatttcattttctgcagaatctctaggaaatggtgacttatgggctttaactcaaaacccaaccggatttagtagacgagactttaataataatctcaagttctagcaagttccttggaatgatactttccagacttaggtgtacctataaatcacctggtgtcttagtaaaacacatttgtgagtcagctggcctgtgggcctgagatggtgtgtgtgttagcaaattccaactgctggtccacagagaggaaaggctgggaagcctggaggactgccacagatggtgaagaacatggatctccatttgagtataaaaggtagaacactaagcaatgagtgatcatgactcgtgcagcctcctctctcaccagagatctcagcatcttgctgtgaaagggaatcaatgacagtgagtttcaccacctttcttagtttcccaactcaaactgtaatcagggctggcactggtcccattcttcctcggagttatagtcattgctagctgctatatgacttacagtgtcgttgctccctctctaaatgtgtccatgttaagatgaacaaatgcataaatgaggaaaaaggaaaatgaaggagactcaaagcccaatcagttcccttgctaaaactgtaggggaggggcagcattcaaattatacaatatagacagggtacaggactaatcaagtttcattattatagaggaaggaaaacagaatcgtgtatggatgattaagtgaagactcactgttgtactttaacatttcttagttttaggagctgacagagacttgtaagatatgccttaatgacaaacagacaacaaagtaaacagagaggagctattttcactgggtgaatttttttttccattttttattaggtatttagctcatttacatttccaatgctataccaaaagtcccccttacccacccacccccactcccctacccacccactccccccctttggccctggcgttcccctgtaccggggcacacaaagtctgcgtgtccaatgggcctctctttccagtgatggccgactaggccatcttttgatacatatgcagctagagtcaagagctcaggggtactggttagttcataatgttgttccacctatagggttgaagatccctttagctccttgggtactttctctagctcctccattgggagccctgtgatccatccattagctgactgtgagcatccacttctgtgtttgctaggccccggcatagtctcacaagagacagctacgtctgggtcctttcagtaaaatcttgctagtgtatgcaatggtgtcagcatttggaagctgattatggggtggatccctggatatggcagtctctacatggtccatcctttcatctcagctccatactttgtttctgtaactccttccatgggtgttttgttcccacttctaaggaggggcctagtgtccacacttcagtcttcatttttcttgagtttcatgtgtttaggaaattgtatcttatatcgtgggtatcctaggttttgggctagtatccacttatcagtgagtacatattgtgtgagttcctttgtgattgtgttacctcactcaggatgatgctctccaggtccatccatttggctaggaatttcataaattcattctttttaatagctgagtagtactccattgtgtagatgtaccacattttctgtatccattcctctgttgaggggcatctgggttctttccagtttctggctattataaataaggctgctatgaacatagtggagcatgtgtccttcttaccagttggggcttcttctggatatatgcccaggagaggtattgctggatcctccggtagtactatgtccaattttctgaggaaccgccagactgatttccagagtggttgtacaagcctgcaatcccaccaacaatggaggagtgttcctctttctccacatcctcgccagcatctgctgtcacctgaatttttgatcttagccattctcactggtgtgaggtggaatctcagggttgttttgatttgcatttccctgatgattaaggatgttgaacattttttcaggtgcttctctgccattcggtattcctcaggtgagaattctttgttcagttctgagccccattttttaagggggttatttgattttctgaggtccaccttcttgagttctttatatatgttggatattagtcccctatctgatttaggataggtaaagatcctttcccagtctgttggtggtctttttgtcttatagacagtgtcttttgccttgcagaaactttggagtttcattaggtcccatttgtcaattctcgatcttacagcacgagccattgctgttctgttcaggaatttttcccctgtgcccatatcttcaaggcttttccccactttctcctctataagtttcagtgtctctggttttatgtgaagttccttgatccacttagatttgaccttagtacaaggagataagtatggatcgattcgcattcttctacatgataacaaccagttgtgccagcaccaattgttgaaaatgctgtctttcttccactggatggttttggctcccttgtcgaagatcaagtgaccataggtgtgtgggttcatttctgggtcttcaattctattccattggtccacttgtctgtctctataccagtaccatgcagtttttatcacaattgctctgtagtaaagctttaggtcaggcatggtgattccaccagaggttcttttatccttgagaagagtttttgctatcctcggttttttgttattccagatgaatttgcaaattgctccttctaattcgttgaagaattgagttggaattttaatggggattgcattgaatctgtagattgcttttggcaagatagccatttttacaatgttggtcctgccaatccatgagcatgggagatctttccatcttctgagatcttctttaatttctttcttcagggacttgaagtttttatcatacagatctttcacttccttcgttagagtcacaccgagatattttatattatttgtggctattgagaagggtgttgtttccctaatttctttctcagcctgtttattctttgtgtagagaaaggccattgacttgtttgagttaattttatatccagctacttcaccgaagctgtttatcaggtttaggagttctctgttggaatttttagggtcacttatatatactatcatatcatctgcaaaaagtgatattttgacttcctcttttccaatttgtatccccttgatctccttttgttgtcgaattgctctggctaatacttcaagtactatgttgaaaaggtagggagaaagtgggcagccttgtctagtccctgattttagtgggattgcttcccagcttctctccatttactttgatgttggctactggtttgctgtagattgcttttatcatgtttaggtattggccttgaattcctgatctttccagaacttttatcatgaatgggtgttggatcttgtcaaatgctttttctgcatctaacgagatgatcatgtggtttttgtctttgagtttgtttatataatggattacattgatggattttcgtatattaaaccatccctgcatccctggaataaaacctacttggtcaggatggatgattgctttaatgtgttcttggattcggttagcgagaattttattaagaatttttgcatcgatgttcataagagaaattggtctgaagttctctatctttgttggatctttctgtggtttaggtatcagagtaatagtggcttcataaaatgagttgggtagaataccttctacttctatcttgtgaaaaagtttgtgcagaactggagttagatcttctttgaaggtctgatagaactctgcactaaacccgtctggtcctgggctttttttggctgggagactattaataactgcttctatttctttaggggatatgggactgtttagaaggtcaacttgatcctgattcaactttggtacctggtatctgtccagaaatttgtccatttcgtccaggttttccagttttgttgagtatagccttttgtagaaggatctgatggtgttttggatttcttcaggatctgttgttatgtctcccttttcatttctgattttgttaattaggattttgtccctgtgccctttagtgagtctagctaagggtttatctatcttgttgattttctcaaagaaccaactcctcgtttggttaattctttgaatagttcttcttgtttccacttggttgatttcacccctgagtttgattatttcctgccgtctactcctcttgggtgaatttgcttcctttttttctagagcttttagatgtgttgtcaagctgctagtatgtgctctctcccgttttttcttgaaggcactcatagctatgagtttccctcttagaaatgctttcattgtgtcccaaaggtttgggtacgttgtggcttcattttcattaaactctaaaaagtctttaatttctttctttattccttccttgaccaaggtatcattgagaagagtgttgttcagtttccatgtgaatgttggctttctgttatttattttgttattgaagatcagccttagtgcatggtgatctgataggatacatgggacaatttcaatatttttgaatctgttgaggcctgatttgtgacctattatgtggtcaattttggagaaggtaccatgaggtgctgagaagaaggtatatccttttgttttaggataaaatgttctgtagatatctgtcagatccatttgtttcatcacttctgttagtttcagtgtgtccctgtttagtttctgtttccatgatctgtccattggtgaaagtggtgtgttgaagtctcccactattattgtgtgaggtgcaatgtgtgctttgagctttactaaagtttctttagtgaatgtggctgctcttgtatttggagcatagatattcagaattgagagttcctcttggaggattttacctttgatgagaatgaagtgtccctccttgtcttttttgatgactttgggttggaagttaatcttatcagatattaggatggctactcctgcttgtttcttcataccatttgcttggaaaattgttttccagcctttcattctgaggtagtgtctatctttttctctgagatgagtttcctgtaagcagcaaaatgttgggtcttgtttgtgtagccagtttgttagtctatgtctttttattggcgagttgacaccattgatgttaagagatattaaggaaaagtaattgttgcttcctgttattttagttgataaaggtggcattctgttcttgtggctgtcttcttttaggtttgttgagggatcaccttcttgttttttctagggcgttgctcccgttcttgnnnnnnnnnnnnnnnnnnnnattctttgaaggctggattcgtggagagataatgcgtgaatttggttttgtcgtggaatactttggtttctccctctatgataattgagagtttggctgggtatagtagcctgggctgcagtttgtgttctcttagtgtctgtataacatctgtccaggctcttctggctttcatagtctctggtgaaaaatctggtgtaattctgataggcttgcctttatatgttacttgacctttttcccttactgcttttagtattctatctttatttagtgcatttgatgttctgattattatgtgtcgggaggaatttcttttctggtccagtctatttggagttctgtaggcttcttgtatgttcataggcatctcattctttagatttgggaagttttcttcaataattttgttgaagatgtttgctggacctttgagttgaaaatcttcattctcatccactcctattatccgtacgtttggtcttcttattgtgtcctggatttcctggatattttgagttaggatctttttgcattttccattttctttgattgttgtgccgatgttctctatggaatcttctgcacctgagattctctcttccatctcttgtattctgttgctgatgctcaaatctatggttccagatttctttcctagggtttctatctctagtgttgcctcgctttgagttttctttattgtgtctacttccctttttaggtctagtatggttttgttcatttccatcacctgtttgtatgttttttcctctttttctgtaaggtcttctacctgtttgattgtgttttcctgtttttctttaaggacttgtaactctttagcagtgttctcctgtatttctttaagtgatttattaaagtccatcttgatgtcctctaccatcatcatgagatatgcttttaaatctaggtctaggttctcaggtgtgttggggttccctggactgggcgaagtgggtgtgctgggttctggtgatggtgagtggtcttggttcctgttagtaagattcctccgtttacctttcgccatctggtaatctctggagttagtagttatagttgactctgtttagagattgttcttctggtgattctgttaccgtctatcagcagacctgggagacagattctctcctctgagtttcagtgctcagagcactctctgctggcaagctctcttacagggaaggtgcgcagatatcttgtatttggacctcctcctggccgaagaagaaggcccaaaacaggacctttctcagacactgtgttgctttggcagttcccaggtggtacagactctcacctaagcagactaaattcctaagttccttggagtcccgggaccaagatggcgaccgctgctgctgtggcttaggccgcctccccagccgggcgggcacctgtcctccggtccagacggtggctggctgtccccggcccacaaagggtgctgcctcagcgcctctgtgcttccgcctgttccagaagctgtcaggttctctggcgcaccctctcacctgttcagactaatttcctaagttcggcgggtcccggaccaagatggcgaccgctgctgctgtggcttaggtcgcctccccagccgggcgggcacctgtcctccggtccggaaggtggccggctgtccccggcccacacagggtgctgcctcagcgcctctgtgcttctgcctgttccagaggctgtcaggttctctggcgcaccctctcacctgttcagactaaattcctaagttcggcgggtcccggaccaagatggcgaccgctgctgctgtggcttaggccgcctccccagctgggtgggcacctgtcctctggtccggaaggtggccggctgtccccggcccacacagggtgctgcctcagcgcctctgtgcttctgcctgttccagaagctgtcaggttctctggagcaccctctcacctgttcagactaatttcctaaattcggcgggtctcggaccaagatggcgaccgctgctgctgtggcttactgggtgaatttttaattctcatatgcaaaatgactctatagtcttccttaattcacaagattatcttttctgcattttttgcatattttgcttgtttccacttaatattgcttctatcctgatgcacattgtttttccatcttgtgaatattctacagcaatatcaactgtatattgatttatagagtactgtccacatggatttcatttattacaatccctatccagataaaacaactatcttagtcagtcttatcaggaaactagtaatataaccaagacttaaactgtttctctttattcatttaaagagtatttgctcactcattaggtcactaatccttccctaaaaggatcttcataaaagatgtgtcacagtgctttttaatgatttcagaaacaggaatgtattttacttgtgagaaaaatatatttcatttatttagaatttgtgtgtgtacaggctacactttgacaggaatctagaatgcttctggttcactgtgattcattctcagagaagcatatacattggctacacaatcagttaactgtccaggttttttggttctctcatttttgagacaaagtcttctgtagtccaggcttggcttgaactctccttgagtaaggatgatcttgaatatctgatcctgctgtgtccagcccctaaattctgggattacaggcatgaaccagtacacatggcttatgtcatatcagggatggaaagcaaggctttgtgcatgttcaacaactatatactagccaactaatttacatccccagcctccagttttgctactaccagtatcaacaaatgccctatcgagatttaataaattaataaaagcagtttttatcaactaccttactctatgccccagtaattgaaatctgtatgtaagtttatatcattttaacataattcctaaagtattatggtgttacagaaatataataatagtagctcattgataaatggttcataggagtagtcaagactatttacatagtatataaaaattctgctccttctaatatatgaaagtttgtttaaattggatgtccctgattttagagatctgaattctataaatgaagtttccctttatctgtattatacttcaactaatttgaagttattttgtgttccacattttcattttaatcataattttcaaggcattacttattcctagcaatggaaaaatatgacaaacatggcttttgctctactgaaataagtctctcaagtcatgagttgctttacacatgacaaaaatgtgcccatgggtagagccccagctggcctcccttgtgattttgcagcatctaatcttgagggaaagctagccttcctaaatgtttcctaaagaaacaacaactttttacattttttctgaaattgctatcctagtggaatctctaataatctactgttgagaagggcatttttattaactcaaccttgtcatcatgccctgactcatgtcccacccacactcctttttgtaagaaagaacacttttttgtgggtaattacttttccaatgaaattagaatactaccttaatttcatttgaaagattttcaattatcatttatataaagccaatattttcttactgatttatgaagtaaattatcaattgtttttatgatttttgttttatgattatctaaaacacaataaaaatttgttttcatacttttacttcccagaatatttttctcagcacttgggtgaatatgagaatgtactggccgcacttgaagacctgaatctctccatcctgaaggcaatgggcaagacaaagaaagtaaggcagtttcaatggtcactcttgagaacaatatcttccttggaaaatattttcttgaaactcatatgcatttctcaatttattatgaaaatacagattgcttctatcactgatggttcattttttatattgaaaaaatattcaatatattcttctttcacagtacaattacaactattaactgtctccagtgggtgactattttgtcctgagaatacaaagatacccaatgctattctggaaactcttaatatggtggtaatacatgtgtgtaaataaatgcattattatgtaacagggaggaacccaagatggaaaacttagttcacacttaaagagataatacccgaagatttagaaatcaagatcttggtcattggacaacagagaagtaactgcacatacagaaactctatgtcagaaatggcccagggcactcaagaaaataaacatgaatagtaagactagaagtttggaaagatgagagactgacacaattggagatgaagctggattagagaagccatcctccatgatgccaccaaatctaaggatataaacctacacccaagatacaaataagacagtatttcaagcagagatatgaaagctcatttagtctttcagaaagagcacattagaattagcctgtaatagagataagaatttgatgacattgaatcaggaaggtggatagggaggctggttaaccagttctggtaagagatgcttgtatttggaggacaaattgatggtaaatatggtgtactttcgtttgccacaatagctatagaatttggagaaatatagaatcccatgggatgaaagaaggatttttcaagataaacctaatcgttagcttggatacttgggtagtgacttcaccaagagagaatgctgaaagaaaaccaagcctgggggtataacagcataagcttctattgactcaacactgccttagtggtctaaaagaagacacttaaaccactggagaaagaaatctttctcataagtaacaactagtgctgcaattgtaatgaagagcttgaattgtgtcatgtaaacataggggaataactaaaataaggaaagaatctaatcctgcccaataagacactatagctttttttaagaagagaaggagccaggaaggctggggatgaggtgggaagtttgaagacaagccaggaacttaaaatgtttataaactaaagaaaaatattttaaactgcggtgagtggttaaatactgactgctatgtagaaacaaaaaggtgagaattaaatttttaactatccgtgaatcaagtgccatattagtgtttaaaatacatgacaggttactttatatttggctaagaataaatggtaaggacattcacaggttccacaagtgaatatactgttatcattttgctaaatggacatattgtcaatctgctccttaaatccaaaattatctccacccataaattggagcacccacagacctcaacagagaagtttctttgtacagtgaatggcagttaacataggagttcacatctagtcaaagtgtacaacataagtacttggactgctcaccctttagtgtggcacctttatcaacactccctaatggcacagagatcatctcagaagagggagcagatttattgtaatagacagaggtcaaggaggatcagttaaagaacattttctggacaagagaaaattgttgtactcatgaactcctaaaagctgggtggggttgcttatataagaggtacataaaatccaagcagttagcatgtcataaagaaaatagggaagactcaagaatgcccacttcaaagaaactaataacagttgatggctcctagggagtgaaagttttctttaaggatgtagaccttggtaagttgatcctttgccaatgaataatcctaacttcttgaatatttgtggaacataaattggacttggtgtgttatttttaaaaagaagaaaaaatataaataatataaaaaaagaaaaaggcatggatttagaatagtagaaaggtgtgaattgtatctgagcaaaggtaaggaacagcatgagtagggggcattgtaactgatcaaaacacaatgaatgcatgtacaatttccaaataatcaaaagtgcattgaacttaaaatatattaaagctgtatcttggaaaaaatacatgacaggtaagatgtttttaacgcatacagagagtttctgaaagtaaagacaacacatcatacaactggagactccttagattcctaaagccacatggaaaacagtgaaatgagactgataagtggatattagcccaaaacctaggatacccaagatataagatacaatttgccaaatgcatgaaactctagaagaatgaagaccaaagtgtggacactttgccccttcttagaattgggaacaaaacacccatggaaggagttacagagacaaagtttggagctgtgacaaaaggatggaccatctagagactgccatatctagggatccaccccataatcagcttccaaacgctgacaccattgcatacactagcaagattttgctgaaaggacccagatatagctgtctcttgagagactatgccggggcctagcaaacacagaagtggatgctcacagtcagctattggatggatcacagggctcccagtggaggagctagagaaagtacccaaggagtaaagggacctgcaaccctatagatggaactacaattatgaactatccagtaccccggagctcttgactctagctacatatgtatcaaaagatggcctagtcggccatcactggaaagagaggcccattggacacacaaactttatatgccccagtacaggggaacgccagggccaaaaaaatgggaatgggtgggtaggaaagtgggggagggggggttatgggggacttttgggatagcattggaaatgtaattgaggaaaatacgtaataaattttaaaaaatgcattgtttacagcatcccaatctggaaacagcacagcaaatgggcaccaggcaagctccagacagaaggggcactgggcaccttgatccactgggtgttggggacggcctgtggctctcatgtccgggttcgagcctgagaggcaaccggagctgaaagagaagagggaacctaggcgggtcgagaaataatagaaaccaacacaagctagtctgttcaaggctcaaatgtttaatgacgaatgcgcttataaaggaggggggaggcccattcctgccaattcaaccttggagcccagctgcaggtgaccacgtgcaggatagggtgtggtctcaggaatagctcagcggcctcccagcactataccacccacagacctgcgcacagcacagaatagccataaacacccatttgctggcacaccatgcagaacagacacagagtgtcacccaggggcctgccagcatagtttgtgtggctagcctgcagttggagccaccacaatatctgagtatatggtggccagtggataaaaataagtggaacagcatgagcattctgaagagagatggaactggggactcgagggtggagaggagtaacctgttgtaagtggccagagccattaactgggccatagtgagatgccagcccgagctgccaatgaggtccctggctatttagtgacaggcatccgtgtcatgtccgtacctcatattaaccctagagaacatggggacacttctggtggggcagctaaccgggatcacatggaagttcaagggatgtacagaactgcccttgtcccttacttgttgttgtgctctggagagcggctccacctctcacctgttgcgggaaatattgaaaaacacaccggcatgttcccacacttgtgccagcaactatctgccccagcgtccagactggccacgcactggcaggcaatagccaacctgtttttatctctatggagactctctggtccagagcttcaaacacgtctccacccagctcactaagttccctctggcgggttgttaccaagccaaacccatgcttcgaatcctcccacagcctttgtggtgaacagcacgtaaacccattctttgcctttctctcttgaacccagatgagccagcgtgtgaaggaaaacacagcaaaaatgtagttcagaaatgacagtaactcagtcgctgggtgcaccaactaaaatcctaatcgtataagccttattaaatctaaatcctacagtcaaaccgggagacattcgtatctacatcttgtcctcacactatccccgtccaaaaaggacctaaccctcctgcttcctcttttcctccgcccaacccagaagtgcctcctactcgtccaatgattggctgctcctttattcattaggggattgcctcaccagtcccacccacaacactcaccagttgcagtactggacccagcaagccctgcacctggactgggctgcacagtggcgctggctctgctggatgtgggagagccgaccctccaggtgcaagagtgggagagctatctctcacaggaaagctacccacagggtcataagcacaggagagctagtcctgcccctcatcagctgcagcactcaggagagcaggccctgcacctcacctggagagcagagcagaacttactctaatggtgttggtgcaggtgagccagccctgagggtgagagcagtggtcggtcattgcccactaccctagtccctgccacccatctgccatgaagtggtgtggacacaggaatgatgctctttcctcctagcctctgtaacagtagggagagctggccttagggtcatgagagcaagtgagctggccctgtccctctctggttgcagctctcgggagagtggcccctgtacctcttctgggctgcacagtggagctggccttcatggtgaagtaactaatgagccagccacaagggtttcagagtggggaaagctgtcccagcttcttgcaggctgcagcacttggaaatgtgcgccctgcaccttgactggacagcacggtgaaactgactctggcggtgggggaggaggacatgtcggggggggggggggatgggggtnnnnnnnnnnnnnnnnnnnnnnnnnnnnnnnnnnnnnnnnnnnnnnnnnnnnnnnnnnnnnnnnnnnnnnnnnnnnnnnnnnncagcattgggtggcctagctgcagcagtgctggagagctcaacctggtggttcttataagggagagcttgtgagctgaccagcacagctaccacataggcccaaatttaaggatctgagttggcccaccccaaaatctgtatcgtttgtgagcagttgggaatcgataaaggggtagtcctgttgatccgaagcagcagggtctccatgacacagagccctttctcgaagaaacaacagacagcccaaagaaagaaagtgaaatgagagagtagaaataagactaacagatttttagagaataatgcttagagagtctccccagatgtaaaggagaacagacaatccaagtatcggccaatgatatcttatacccaaataaactgcacagaaggtaagcaaagcaaagagggcaaaagtggaacctgaaagcattttaacttgacttcctcagaagactctaggaactgtaattaactttcgcccttggttaatttatctccagaagttgtcattttaaaatctatgctgggcctcctactgtacactgcttgaaaggcaccaacaagaaattggcaagttcagtgcttgcctaggatatacactatagctagcctaaggaacatagcaaagccctagctcataaaaactaaacagagaaagggagtggttagggtgtgtctctagagcacttatttagaatccgtgaggtcataagtttagttcccagtactacaaataaatgaatagaaatccgtttagcacatattgtgctttgaatgagaaatataccccacaaagttacgtgtttgaccatttagttctcagatgacttcactgctttggaaagttgtggcagttttaggaggcaaagccagcctggaaaagttgctcactggggtcagaccttgaggttttgtagccctgctctacttcctgtctgctttttccttcttgttctgccaagacacaaaaaggcaaagagtcctagctgctcacttctgactctgagaagctgccaaccactgtgccttctccttggtagagagtgtctctttaaactgtgaatcaaaatagatccattctcttataagctgattcttattaaatatgtagaaacagcagtgagaaaatcagctaacacaaagtagctctcctcttcattctttaggtcttatccttagtggcctcattaagaactgtcttgctacactctctacaaagtttcacctctgttacaaaatccatttgttgctattgaccatcacaatgaataactatgagtaactatgtaattaaaaatgtttctgtagaaaataaaaaaaaacgatgtctttatttgtttgtttattttacttgccacaattgccctaagccctgtaaaggtcctcacaatttaaattttcttctggtattaaataaatgtagttaagggagcatccatacagcaaaaaagccaaaaacttcagttccttgtagaaaaaaaaaacgattctaagttctagaagctttccagtttttttaatatgcatgtaaaacaagcatgtaatcttttatatttttacacaagcatgcactaaaatcccgttctttatcttctgctaatacaatgaaaccttgtggcctttaaaccgaagccaaccttttactttcacatcttaagttgaattcttttttttcttggctttgagccttaacatgtgtttgatttatataatactgcttaatccatgaaaacacttctttctaaaagaaaagataaaacagtagaaaataaaattagaaatcatatcttagtatgaaagcttaaagatggttgaaatgaaggcatcccaacacccttcaaggcacaggcgacctgttatctcttccgtgttgccagcatggggaagtctgctaactgacagccagcatttctcttctagaaacctggtatatttttatccagatgaaacagtactgtctcagtaggacgggctgacattcctggcttttaggaaaagtgaaatacaagccatcaatgcgatctcgactggcagcacatctgtttgccatatcagagaaaagacaaatgagttctgactgtttaactcaaggcccaggaagtgagtcagggcaaatacagtataccatggccactgtaaaattacactgaagccaaagtttatcatatgctggtatgcaatatgtgatataccctctttgttgattgataacatttagaaggttattcaaggctaaaatgaagaatagtatttttaaaatgatatttaggatgtggtagttaccatattgaatgttgctatgggaattgctaaatataaaatatgcttatatagtttttcatctagaatttaattttaagcaagaatctctagcagtatatctttaatatttggagaaatgagtcttggtttctagaaggagttggacctccttcttatatctgcctttggggatactctttctctggcaactctggacaccttcacttcaaactttccctatttctcgtatccccgttttcctagttctgagcttctctgagagatgtatttctctcaatatttaaatattgtgatatattctgggtttatcatcagtgcaaaaatgaatagatattcatgattcttagatttatcattaaaataaatccctcctcttttcagaaaaaaataggggaaccgaagagatgtgtcaaatattaaagcacccctgggctcatagaagacaggcatgtccatcctttgttgttctattgttaccatttacatggtttttgaagtaaagtggaagtgaattcttggagttcatggtaaagtattttccaaacagcttatttgacaccccatttttcctcgctcgtttttatgtgaatgtgtgtagtgaggaggaaaccatggatagctcaggcatgggaaacaagagggtctccaggccacacatggagcctgaaggagagaagctctgacccaggtctaagctctacagtcttctgtacttagcaaaaggtaacagtaggctcctagagaggatactcaagtagattgtctatggcatagtcctcacattggaggcccttgtaagcttctgcataactgctgacccagaagctaagcaaatcctaggcagaagaccccactacttctgactggacaaagagggacagatctgaggtgagcaacaagtgagtgtgacctttgaggtgatgtgaaggtgggaaaagtgttgaacttactgataccatttgtgaggagatgtgggtaattaatccatgcagagatcaccagcaaggcgaaggctgagtgggtagagaacagagctcatagccaaggctgggctggctcaggacttggattgcctctcctttgataactatggcactggtactttcttgccattgctgaagccacaccctattctggtggctgatgtgactccctatagccaagttaccagatgaacacttctgactcttccttgctgctagcacaatgcttgagtacctatgaagaaaatggagatgagggtgctgaagagatggctctgtggctaagagcacttgctatgcttgcagaggacctaagttcagttcccagcacccataacttgacagctcataactcataactgcctgtgttccaggagtcccagcacccacttctagctccacgggcatctttacacagggggcacacatacatgcatacatttaaatacacttagaagcaaagatgaagaataaaggctataacacaatggagcttaggaaaaacggactaatcagcttttacatagttatttagagtcttcagtattctttaatgtgcactattctttttctctttaaaattaatattttaaattagcataaaaagtaatggttttcattatgtattacagcacactctatcttttatccgtttctctctgtcttccccctcattcctgtcctgcttttgatggtcaccgtcctccccaaaagttccacaagtcctcactcctcctcttttcatataacatgtagtcttaaaacaaaggtttctgtagttaaaacacaataaagtaaacagtactacttttatgcagcaaaaaaaagaacaagagtggaaacatgggtggcagggtgggtggagcttgagaaaagagaatgaagtattgatatgattttacaacattcatgaaaattagagatctgcatgggggcaggttagctgaatttgtggtctctcgtttctcctgtggtttgtgctaatcctgagcctggattggacagctctccaatgtctatctgagctgtcttcacatcagtaactgccttctgtacataccaagggcctctgctggacacattaggctgatgattttcctacatccctgccatccagtttgtacccccacggagtggctgatatcctaactggaaagagtcttctaagtgcattggaagtaggagaaaaaaacaaagcactataagctatacaggcagagcaggtactgttgatcttcctactggagggatgcatttgtaggtgtccagtactcctgccaagcgctggagttttctgagtctacagccatgtgtgacaggtggcccaggggccaatcatcccatgggtctcaaattcaggcctatcaaacccagggtttgtctcatctgggcttttccctgagcactgtcctcatctgagcttcccaccacatgtttttctcagtgtccagtcctcctgcacttggcagctgtctctgagacctgggatggcagcaggtaaaattcagactccctgacatgaggttcctctgcgtacttggtcccctggagggggtgcacaatatttgtgttattgtttcatcccaaatgctgttgcccagtgaccccctcatagagcctaacccctctcttcctctccttctctgctgagaaggtggagccctctcacccccaaatgccccccctctggtgcatcaagtctcggccagattaggctcatcctctgcctctgaggccagacatccctgttgggaaacagataccacaatcaggatacagctttagtgagagcctcagcttcagaagcacttaaaaaaaaaaagattttatcttaatatagcagcctgccagtgccctccagtcaagcagagagaaaatgtgattcctccccactgtcgagttctccctccagtggaatcgatgtcttagtaaaacctgcagcttatgcacgcagttcctactcaatattatccactgggcagccacccatctagacctgtttgtattggttgtctttttctgcaggtcacctagcctagcccctctcagtgcttctcagaagtgctatatcactgctttgtggggttctgggagctctccaggaagtgagtctctctctttctcttgtgctaactcttaactggatcacatggagacaacttctattccaccaccttactcagaagttttatttgttcttggtagtatcctagtaaggcatgctacacagatgacaatattccacttccaacgtgaggaaaaagcatctctcagttattaattggcttactgaggccacaaagatagatttaaaccaagaaaccttcactttctctttatatactttttaacatctgtttagttgttcgtgcatataggtgtgtaggtgtgtgggcacatgtacgtggtgatgcccatgtttggatcactggacaatttgaggagttgtttttttaggaaactaaggcatcacatgccttccctccatgagccatctaatcagcccccctttataaattaaggtttttataacttcatatttaacattacaaatgtaaaatcataacatgaatcactatgaaaaccttctagtgttagctactttggatttattttttaaataattgacctcttgagtgttcacctgtggaaagatctggagatgtccagcctgtttcttatattcttctcatgcacagtttttacacaattgaacaaggagtttggtgcaagaaattatggacagaagcaatgatacttcaatgcttaaataataattactgaaatcaaaagaaaaagacacataagcaaagttctaagcaaaagaatttgtagatttctatagttggatatcatcagagaagattgaatggtgtaagttgcatttcctgtcagagaggtaatatttaaccctggtgtagtgcacatgcctatgattacagaagtaaggggctgaggcaaggagagcatgagctcaaggcaagcctgggctacaaagttaaagatgtactgacctttcagcttacaagaagctgaaatatatccccatccaaatatagtgctgtcaagaacaacaaacactagtggcctccagttgacatattttccagatagctagctctatttcttgactaattcattttttcatcttttcacattaaacaccatggtaacatctgtaaatattttcacacactaactgtgtgagagttgactatcttattccactggcaaaactgtgtctgctaacatagctgaacagcagttaacttttagatacttaacacacttgaaaatgtgaaaatcccaattctcctttgcttttctattcctaaagttttcccctctgttttgtcatttttatataaattttgtcactggtctttactctttacaagtgcctttcactggagttgttgagacttgtacaaatctcaaactttgtaattttgagagaactatgtagattcatctgtgttcttttttaaggtacatgcatgtcttagttggggttttactgctgtgaaaagacaccatgaccaagttgtcttttaattaagacaacatttaattaggactggcttataggttcagagattcagtttactatcatcaaggcaggaacctggcaacatccagaaaagcatggtacaggagatgctgagagttctacatcttcatataaaggctgctagcagaatactggcttccaggcagctaggatgagggtcttaaagcccacacccacagtgaccacctactccaacaagaccacaccttctaatagtgctactccctgggccgagaatataaactgtcacagtgcatttctgtttattcaacctgacttttctctcttactaatttttttacagtatttaatacagattcaaatgattccttaggtcaatccatagagtttatatttggtctctcatgagcagtgttttagcgaatgactatctcaagtgcccttggcaactccactggctactctcttgagtagatgctccatcagtaaagtggggttggcttcctttgttgtgttctagtcttgagccctgagatctgttgccaccataggcctgtgtgtcttccaggaaaaccaacaagtctccatagcctttcacttctcacatcttcctccactttgctaatcagaaacttgaaaatgtatgtgatggtttggatatgctcagcccagggagtggcactattaggaggtgtggccctgttggagtgggtgtttcactgtgggtgtgggctttaagatactccttctaactgtctggaagtcagtcttccattagcagccttcagatgaagatgtagaactctcagctcctcctccaccatgtatgcctgcatgctgccatgcttctatcttgatgataatggactgaatctctgagcctgcaaaccagccccaattaaatgttgtcctttataatacttgctttggtcatggtgtctgtgcacaacagtaaaactgtaactaagaaagtttacgtgcattgttaatatataaggcaacaataaattgtctctccttaagaacattgtgcaagatatagtttttaaaaggttaagctactaaatattacatataaaaacatgctaaaacttcagtggatttttaaaatgtattttaattcagaagacaaaaaatgtcaaaaatgtacaaaacaaaaatatgcattaaattaattgttaatgcgaacaataaatatatacttgatgttaaatgaagagagaccagtgtcacctgagtggccacaaatgtgaaagtcttacacaagcaccaaagaatgtacagaattttaatgaagaatagataggagagtcagtgagtgatgacatttctttgaccttttaaagagacacttttcaaggctggctctgctagaagcactctctcatgcacagaaaagttgtcatttagaatgggtgaagtcagagcagcaatgtgcaaatttacaaagtttcatactatttactgtttcctcaatgagtatacatggcaggcagagtgagcttggaaaacatcttgagttgacatgatttagaatagctcaacagagttctaacagtatagctcagtatcagagcttcttctagcactcaaaataccctagatttgatccccagcctgtaaaagacaaagcaaagcaaaacaccaacaaagtcctacaactgtgacagaagccagtttgatatctcccaaagcaggggaatcccattaaaaatcacattttgtgattacattatattatttgataatattcccagtctttccaaccctctgcttcctgcctccccctcagtcaataacaagaactataagaaactattttattttagataatgtacttaaggaagctaggacaaaccccacacccacagggccacaccgactgcaacaaggccatgccctctaatagtgccactccttaggctgagcatatacaaactatcacattctattccttatatcccatagaggagttgcacaacacaacttagtattcatctgtcaagagaatcatgtttgatgtgactcatttcttttgcctgaagaaaaaaaaatgcaggaagaaagattcaaaaattgcttgccactgtatttctcgggcatcaattatgatcataagaaaggttgggtttcttttcaaatattagacaattacatttatttatttatttatttatttatttatttatttattgtgtgtgtacataagtatgcacacgtgtttgctcctttcatacacttgcttgttttctgtcatctctaaaattgagcatgtttacttccgccataatatttctctgtttttttcttgggaagccttactgtgcatggtttggcccatttctctactcatgtatgtgttattctaggtatttcaatgaatgctaaagatgggttttttcccccactgcttctagtaaaaaactactactgatatatagaaaaactttaatgaaaaatgccgttgttgatctgcatgatttcatgttattagcagccacgagtaagtcgagaagcaggaagccaatgctgctaggactgagtgtgttgcccttgagtttattttcacatgatctgagcacagaggatagataaaacccaagagtgtatgctgacaacatagtagcaacttcattaagtgttcagaacatatttgtgtaaagacttttctttgtttagtcaggaacatcaacttatacagtttctcagtctttcctcacacagtcatatgctcttccatattatttagattactactgataataataataataataataataatgtttcaactggaaggaatttggctggtaggggggttaatgtgcatgtgatatctctcttgtggtagagaaatatgttaccttctgttgtgatttggacctgaaatatccctaagagactcatggtaccagttcttgtttctatttttaaaaacgtctactttggacatagaacccagaggaaaggtcagtgggcatcagtgtttggtgctatattgtacctattccttcttatgacattctattagcttccttcctggtctggctgtgatgtgaactactttactttgccacacccttcccactgtgatacagtgaaacttatgagcacttttcttccacagatttctatgtcatgtatttttatcacaggaatgcaaaagctaactgacacacaacattagtaccagagaagagaagtcattgctgtgactaaaactggctgagtgattgctaggattctagaactggactgtggaaggaacttgaaatttggatatataagtggaagacttctgtaagctcagctgaatgggtacttttgatgggcactcaggaaactagagcacatactatgaggttcctcatgggaataagataaaatggcatcctggctgtagtgtcgtcattgctgactgcctttatctagggttgcagcaaaaactgcagagaacaaaattcagagcagaagggcatgaaaaacatgcagtgagttgaatgtaaggagaaaattattgtggttcttaaatgagctaactccatgaaaaagaagcccgtactttgcactggaataataggaaagttgcctttgaagaaactatcaggacccctcctcagtacaggcaacaagatgaaaattataaactcattttaaagaggtctccttcagaaaaaaagtgcttcttggctatcttgctttcaaagaactgcagaagtatttttggttcattcacctaggcactaggagaccaccagagctgtggtccaggagggacctgccattgttcacaatgacaacagagtgtgaagtcattcacagggtgctggctttgcagctatgcagaacacaagcattacaatattacagaggctgccaccaggatctttcctggatcttgtgagactaggagtattccctgtgggtaactcccatgaacatgatgtgtgaagcagggaaaatgaagtctatgctggaacagagacccaaaaatgtggtgataataaggatgtggaatttctgacaaggaaaattccaggcaacaaatagagtctctcaagagagaggctacaggttttaacaacagtaaggctatggggacagggttgtctaaacaccttagaaatcatactacaccactgtatgctctgggtgctggatggaaacgcacaattcagtatttgtccttctcagaccaagtccttttttcttgcatttctcctttctctccattcttcatttttgcagtgtgaacatatgtgccattatatcttggaaatctagaactaatttaattaactttagagtgcttatatcaaatagttttctttgagtctcagaggaaacattgaatttagaagtttaaataatgcagaaactaataagattttgagaaacttttgaaagtagactaggccaaaggtcacaggggactggggtagaatattgtgatctgagtttaaaatgttccacacaggcacatattctgagtgtttgcctctcagctcattgttttgagagacaaatctttgggaacagtctctctctctctctctctctctctctctctctctctcccctcaccactatgatataaactgttctttgtagcatctttcctatcatgatggactgaaatttcttttctcttaagttgtttgtaatgaatacttgtcaaaaaatctaaccaatacatcttctgatcttgcgcgcgcccgactagccagcaagaacgacgctgcaacaggatccttccgcacacgtttattgggagagcttaattgcagaggcgaagtgaccccaagcccagaactggtgctgcttatataggcctaggagaggcgtttctcacacccggattggttatgcatgggttatgcttaccacctcatttgcatgcctacatctgatgggttaacttctctctcatctgattggtcaacttctctctcttctgattggttaacttgtctctcctctgattagttaacttgtctctcatctgattggttaattctcaaaacctcatcttggcaaaaaaactttactgcctatgtatgcgtggtggccagcggtagccagcgccaccctgcaacggcacatgtggcttccaacattctaagtcattcaaatatggacagtaaaaacaatttagagtaaatatttgagataataatttctacccttttgaaaacactggatcattaaatatcacagctatcaaatttttctgtgtaatttattgtacatgattttataatacaaagctacttcaattccagaagtgattcataaatagcactcaaataaaagggtaattttcatggtttttttcccccttaggatctttgtaacattcttttctttcttttatcccttgaagttgaatcaaccatccaaggctgatgaacttatcttttaaaacaattactcccatccacctccttccctcttaaagtgctctctaggctatgcttcatagaacaagtccaagtcgccagattccttccaggagatgctaatacattatttatcttccatcctttgctgtatatgggttggaggtctcataccagctcatatatgctgcctggttggtagctcagtatctgtgagatctctgggtctaggttagttgagatttctggtctttttcctatgggatcgctctccttctcaacttctttcagcctttccctaattcaactgtcttggccagctgcttggtaggcctcttggagggcagccaagctaggttcctgtctgtaagctcaccatatcattaataatagtgttagtccttggaacctccccttgagatggatcccaatttgcgattgtcaatggacctcctttccctcagtttcttctccattttttgtttcttcagttcttttagacagaaacaattctgggtcagtttttgactatgggataggaatcccattcctccactttatgccctatctttcttctgacagtggactttacaggttccctctcccactgttgggcatttcatctaaagttcctccattttagtcctgagagtctctcaccccaaggtctctagaacattctggagggtcaccccacctcctacctcccaaggttacctgtttccattcattctgctggccctcagggcttcactcctgacctgcaccaccacccccaatatctgatcatttctccttttcccctccctcttccattccaggttcctccctccctccctccctctctccctccttccctctgctccccataattgctttcttctccttcccaagtgagagtgaggcatcctcacttaggacctttggcttgttcaccttcttgagttctgtggattttatcctgggtatttgtacttttttgacttattagtgagtacataccatgcatgtccttttgggtctaagttacctcactcaggatgatatgttctagttccatccatttgcctgcaaaactcaggatgacctcattttgatagcagaatagtattcaattgtgtaaatgaactaccttttcagtatctgtactgcctagttttgtgtcaacttaacacagctggatttatcacagagaaaggagcttcaattgaggaaatgcctccatgagatccaactgtaaggcattttctcaattagtgatcaaggaggaaaggccccttgtgggtgggaccatctctggctggtagtcttgggttctataagagagcaggctgagcaagccaggggaagcaagccagtaaagaacatctctccatggcctctgcatcagctcctgcttcctgacctgcttgagttccagtcctgactttcttggtgatgaacagcaatgtggaagtgtaagctgaataaacccattccttcccaacttgcttcttggtcgtgatgtttgtgcaggaatagaaaccctgactaagacagtaccctttcttccactgtgggatatctgggttgtttctagctaccacaaataaggcctctatcaacatagtagaacatgtgcctctgtagtgtggtggggcatcttttggatatatgtccaagagtggtatagctgggtcttcaggtagatagatctatttccaattttctgagcaacctccagatttatttccagagtggttgtaccggtttgaaatcccaccagcaatggaggagtgttcctctttccccacatcctcaacatgtgctgtcacctgagtttttgatcttagccactctgattggtgtggaattcagggtcattttgatttgcatttccctggtaactaagaactttgaacatttctttaagtgcttctcagccatttgagagtcctctgttgtgaattttctgtttagttctatatcccgtttttttaattgggtttttgacaggcctttaggcactgcccacagactttaggaaccacacacacttctttaggttccgcccacagactttaggcactgcaaacagactttaggcaccacccacagactttggtaatgccttttatgggtgttttgttccctattctaaggatgaatgaagtatccacactttggtcttccttcttcttgattttcttgtgttttgcaaattgtatcttgggtattctaagtttctgggctaatatccacttatcagtgaatgcatatcaaggattcttttcttagagcacacaaagaacagtcaattctgggccctccatttacatctggtacccttacttataagttgaactctacctcttcccagtcctttcagtactatttcagtctccgttcttttgtaattcaatggttcttctttacgggtggcatttctctgccttcctcagaatttcccttgcctctcttctggctggtcctgtaatagccttggcaatcctatgaaacatagagtaaatatttattcatcctggtgcattattcaggtctctctagaggagtagaactggtagaatggaatatatacaacgagatagaatgaatccataaaaacacatacatatatacatcatagatgtgtgtacatatgggatttattagaattgtttacaggctgttgttcagctagtccaacaatggctgtctagcaatggaaaatccaagaatccagtaggtgtttaatccttgaagctgggcatctcagtatatggctggtgtacagtatacagccataccaaagaagtagactctaatggcagtgaagaaatgaactttccagtgaaggtgagaaaagacctaaaaccttcttcatccatgttcttgatattggctgacaccagaaggtataatgcagattgaaggtggatcttccacctcaaaatatccagattaaaagtgggtcttcccacaaattattaagaaaaatccctcacaggtatatccagccacataggttttagttaactccagatgtagtcaaactgacaaccaagaatagcaaccacacctaagaaatctttctttatcttctaaagaaggtttgtttactcccaagttccttgcatatattctcattacaatttcttaatttatgtcctttcaattaatgtatactataatttagacctggaatgccctcctccaaaagtctatgtattaaaggtttggtcctcagactagtaggatataatgaaaagaaccttattagggagggcctcatgagaagtctttaagtcactctgggtgtgcattcagggaataatggattatcgtacctccttcctctttctgacccttgtcgctaagccaagagttgtctggatttgttcttccatgtgctcctgtcccttcactagagatgcctaaaaacatctgccctgtcaaattgggtctctcaaactgtaagccacaattaatcttttctacttattggctgattatctcgggtatttattatgtcactaacaaaaagtgtcatatctcattctagcatcaacagttactgatggggtagtaagccattcaaatgatcttaaaaataaatattgactcctggaagaacaaaggatatgctgcaaatcactgctctttaagaataaactggaagaaaacagagggtttcggtgaccatattccaattctgggagggttgaagagccaaactgaatgtgaattccaaggaactggggaaaagctgaaaagagacaaagtcacagaatttccatcaaacactggctgaaatctttggagtaattgttcaccttaagcagcagattactctttctgaatttaaccactcatgaggtaaagctgtgctctctgcagtctatctgaattccactggtgcaggacacaatcagtcacctgcaaggggccaggtgcattttgcagagagcttaggggatctgggaaataaaattggtttcacagttttaatcatagcactcatacaatttagtatttttgtaaaggatgctatttttaaaattgtaggtcagcatcaagttttctcacagttggattttttttccttagtccactgtgttgaacttgcctttgagaagatttgactatgacatatcttcagtttgtgctcttctgttctgacattttgaaagctgtaaccaagattataatgtggaagaatgtggtaggcacaggtgagcagtatttttagatacctcattctcatgctgatgagctaaagagcacaaacatatatagcataaaaccataaagtgtgcttagttatttgttcttaagagttttgtctttttttcactgataatgtctttgacactgatgatggtaaacagagcctagttcctttagtatttaaggtgatgtgtgtgtcatctatacaatatggaacctacctctcagtccttgcttcttcctttgagttctgcatagcttcctattcctatacagtaacatatggaaaactatttccaagctgtataaataggacacacatgcagtgatgcctcaggaaagaacgacattttaaaacaaattacgtttaaaaattaaactttattttattcctacatcctatacttgttagtgtatacctgtgttaaattgctagtctccattttttttccttcactatatgtgggcagtactatttccttcctaaagacattaggaggataaaataagacaatatatatatatatataagaagtttatgactacatatattccctaattgagtcaaaacagattagttatctttttaccattaagagcattcctaatttgcaaacttagttactgagagcagattggaaacatggattggtgttttataaaaatatcattatttgtttattattgactgggaatcttgtacatttatatagtaggcttagatcaagcacccttcattccctccttttcaactcttctctgattcctaccaccactcctccatcctcttccatgtattctctttgaaaaaaaacaaaactcacagaattcatttgtcacttccagcatgtatatgggcatacggtcagctacaggaatatgagtagcctctcaggaacctaatcccagaggaaaactggctttccctctcccatcatcagccatcatttgccccactcatctgctagaatttaggcttcctggtccctttcatgctagaattttgtctggcctgatcttgctcaggttttgtgcgtgcagtcccagtcactgtcacatgtgcaaatggtctgttgtgtgtaagaaatgctcttttgttgtagtcattgtgcctctggctcttacaatctttcaaccccttctgcagtgagctctgactcttgggagggaaaagtgttatggagatgtccaatttatgaatgaacactctgtgctctcttgttctcttcacattgaccagttgtggttctctgtatgaatcgatatctaatgcaaataaaagcttctctgataaaaggtgagaactttctctggatgattgaagcagttatttaaaggcagaaacacagagaattaattgtgtggtggcagagatgtctgtctataaaaaattatcaaaattaattcacaaaagtatagggaaattttgagatgaaagcatggcttctagtcaggcattttcttattaaggtgatcaaaacagatcatctgagtggcagaacatacactcctacaacacacttggaaacacaaaggcagtatgtgggacctagctaccccctttataaatagttccttaaacagaatcctatgcctccaaattccaaaaagcaagcagcaaaaccaggctcaacccacaggaaacacagatgtcttctgaagagcaataatcaaacaaccaaagctctagtacgtggtggctgagagcttccttaatgtctctaactcagaaggagcagccctagtgcactaaatgttgcctgatgctagctatcaaaaggaatgtaacagtgaacaaaccattctctaatcaagtgcatgtgatagaaaatgtattttaaatacctttgtcttaatcattttgtggcaggatttttttttcagctgatataacaagtgattaccaatctgataaaaaggaattagagtaggaatttgtcagacccccagcagccctaggacatctgacacaacaacctttttacagagcacagcacttgctggaaaaagtacgtgttggtggttgaagggaacagttcccttctcttaaatcatattctcaactccaggtgtatttgtctccttcaaggcaggcacacaatgatttctcagtgagctaatcgatgtttagtaggaggagaattctcctgtgctcattttagacaaagcactgaatcgtttatagagcttgggagatactttgtagataaatcttacatatttgacaggtagaaagcagcaaggaccgtgccctgctgcagtttcatgctacatttttaggtttgtcattcctctcatcatctttgtagggcctcctccagtgggtctttaggaaagcattcactacactcccacaactgcttgtccagaaattctaaatatagaagggtttgatttgttgctgcttgataaacacaggcttcaagaccatctccaaggaagcaaaacctatattaatgtagagagttttagtggggaaaatatcaattttgttgtcacagtttaagcctacatattttgtattgtagaacacccgctatgcttttggtgttacctctgtagtattctgaactttggcatacattagccccagcaggttcttttttaatgctaaattgtaacagatacctcattatacatgatacagtaatagatcttctaattagttgtttaactatcagattatgttactcaacagtgcataaattcatgctatctgaagttcaaaaagtgaaacaaacaaaactgctaattccttgagaatttgattttatttcaaagcacatcagagttacactatgcacagtcaagcaaaaattaactcctgggatgtggatggattcactaaccttccaaaaatggcactcttgagagataactaattatgtttctactaagtgtactgacatgctgaccagggtgaattaagaatgcttccatttgctggtttaggacactcagagaaattagtagccactttctataagctatnnnnnnnnnnnnnnnnnnnnnnnnnnnnnnnnnnnnnnnnnnnnnnnnnnnnnnnnnnnnnnnnnnnnnnnnnnnnnnnnnnnnnnnnnnnnnnnnnnnnnnnnnnnnnnnnnnnnnnnnnnnnnnnnnnnnnnnnnnnnnnnnnnnnnnnnnnnnnnnnnnnnnnnnnnnnnnnnnnnnnnnnnnnnaatgttctagagaccttggggtgagagactctcaggactaaaaggaggaactttagatgaaatgcccaacagtgggagagggaacctgtaaagtccactgtcagaagaaagatagggcatacactcccccctacccacccactcccactttttggccctggcgttcccctgtactggggcatataaagttataacattaaattcttaatcctctctaattttctgtagactttctagttttagcttgtttcttcttagcttgtaaataatatgccctcagtattgtatcatatacagaaagtttctaatctaatgttcatgatcacacacctaagtgccaagcctatttgctccatgtgagaataatttaaatgggaagaaattcaagattacttcacagccctaatgactcttgccagccatcctaatacatcatcatttaggcctcatatacaaatgaaaaacagagcctatctttagaattgaacgtggatagatatcaatattctcacatttcactgagaccaaaaaatggtcttaaatatctgtaaaaccatagcacctacaaaggttaaaaccagctaggactgaaaatccccaagagtcccataacttcacaaagaaatagcagctcccagggagtacttgactgagcaggctgagtggaccatcctccctggtccaaaactcttgacttcttctcttgcctgattatttgcatcttctgttgccttccaaatctcatacctaagtgtatacaatcaaatgtactcaataaaagtagctgctatttcctgagcatttaacacatgtcctccatgaaatatgcatcattattttcatcagtctttcagcccagctccaccacgtcactccctgagtcaaggacttggtataatctcattttatcaactctctgttcaccttccacaatacttcatttttctcattctgactgagattccctcacctgatgtagcaaatgttaatcgagtgccaggtcttctccaatcttgtgggacactgaagccaagatagaattatgagcatgagagatttatagaaagaaaagcctaaactcctgtggaaaggaaagaaggaaggaatcgggaaccatgagcatggtagaacattccaactggagtacctacctgctacctgaaaatgatggctagtgtgcaggaaggaaggtcctgtgggaaaatttgactagcccataagaagagtgcacatcaggcagacgtgaccttggacaggagcctgcaccatgtcttagttactggtgaaggatgtctctgaaaaaaaaaaaaaaaaaaaaagtcactaatgtcatcatgaaattctcaccctcatggtggcttatactcctcatcaccttccaaagtctgtacctccagtgacacaatactttggtaataaatctccaatatatgagcctatagggaatatattgctagtgtgaaacaggaggtggacaaaaacttgctacgtgtaatcgaatggaactctaacttatctgagctggaggaactctaacttttctgagacagaaagggtcatggaaagggtgagatatacaccaaaaccaacaccaagatgtgggcctgcgtggtctgtaagacttgcagatctcatccttgacggttataatattatgtgaaatgttttacttttattagggtctctgcaccctgctttgatctagactggctttctttctcactacatcaacccataattcaagtaggttttcttatgctcactaccaatattgtgataagcgtaaacatacgacgaatgaagtgtgtgtatgtcagatgcaccatgagtatagtagcaagcattgttaaggactgaggagatcgatcagttgttgttgcatgaagacttgaattcagaattccaatgcccacgttaaaaagctcaacacaaaggcttgtgcctgacattccagctcccaggaagccaaggcaggaggaccacaagggcttgctggtcagccagtctagctgaatcagtgaacttagtgagagaccaccatcccacaagaaaagatagaaaggcaactgaggaagatactcaaaatcatcctttggccttcttcacattcatgcacatctgtgcacatacacacgcatgaacagacaaacacacacacatacacacacacacacacacacacacacatacacaatgtgttggtaaacaagttattctaactcatcttctctgcgcacaataattaaacctttcacttttctttctttcggggtttaatgagtgttgctgcgttcgcattattagcagtagtatcttcattcccttaagcagatcagtagctttcccgacagcactggtcctcacacactgaaatagcaaggttcagacttatgtaaaagggcagtgtgccacagtagaatggccgtactctgtatgacagatcccctgtggtgacctccgctgagggcctgtaaaagagaaaatagacagaagcaggggaaggacactctgctgtggggcaaaaagacaaaaagacaaaaaaaaaaaaaaaaaaaaaaaagtccctttttcttgcccagatctatgggaagtagtgaacacagtcagctcgttctggatgtaaagcgagccagatgtgcctggttcatagatttgaaaaagcaatatggtcaagcctgtcatccagcttagcatcctatcctccaagcgggtcagaaaatattgctcagacctaagtagaaacagtccaattagttcattgcagtctaatcactaacgtgaagcagggcctcttctgagcataataaagatcatcaccctaacctcctgggtacatgattctctacctgttgccatggcaaaggagcaagatgtaagcctctgattaaaatgaatagttttgtatgaaataatcaagttactgggaggtttcaccggtgtctcatcatcttccctgtaatacgctgagcctagagctcaaagtgtaaccttgaaacacgttttcttcttatttatacagtaactgaatcaatcttctgccatcagtttcttgaattttttacaatattataaatttgctttaataattatagatatttttaaaactttgtgtcagtgatgaaaaatagattggtaggcactaggagcttgcattacacttacccctgtctgtgatttgccttttagtaataatgtttttagttccttgattcaacacagaaagcccaagttgaatatgaaactaggaagtaaaattattagacaaatgtacgatgacctggagacagtcaacatcgcatcaattttgatgaaccattgcctaaaagctgtaacttttctgagaaaaatctccaaggttgatgcgactgcagtctgtctacagaagagcagtgtgtttggaaaagtttgcttccttctgtactctctctgcttaaacagacgatccactgcaatctagaaaatgttgtcttcccatatgaattatttattcacagcccagagagcattcctgcagcagtgcccttgttaacaggtagcttgtcaaccagggccctttggtttctgctggttactgagacaggagtctgctgaaaccatcaataagatgtgttttaattaaacgccttttgaaagtgggcagagagaacgcatgcccatgttctcctgtcctgtgcaagtctcttggatctcttgtgactcacacgcatgcccatgctctcctgtcctgtgcaagcctcttggatctctgcgtgactcactctgaacataggggatttgtatgaacttctctcttgcaagttaccagtgaaatacaaggactgtcattttctgactcgaaatcttgttttccatcttaacacaatgtataatggtacaatctaaagagaccaaagtaatatcgcatctcacaactaatcatgttttatatataatgtaccatatattttattttgtacaaagtcccatgggaccaaattattggctatttatcatttgaagaagttaatcattcttggggatattatttttgtgaataaaatcttattaaaatattctagtattctatacgcagatgggctacagaatcaagtgggattcaaaatttggcaggttctcaggtgcttaaaatgtatctgttattcccacacaaaccatggtgttaaagaatgcccacagtattttaatgctcaattatttattctgtctcaaaactcattcagatcaaagagaagaataatttgccttgaaaacaaaaaagattaaatgtggtattttgaaaatatatttccatctggcaattcagtgacttgggcatgttaactgaagacgttatagcaccatgattaaaatagcagtatccatctgacaccatgctgagtagcaggagtcgaagaagaggttggagcctcttggggttatgtttgcttcagccttgtcctatcctggttctatacactcaaaatgacagccaaagggggaaaaaatgtgtgagcggtaaggtagataacatcatatttaccagaaaacaaggtaatattttataatcaacaaatataagttgagcctaatacacatatgaatataggccagcagtctttgtacccaaaaaaagcaccatttggtactgtgttacgtttcagagaaatgtaggctagtcattgaagagatagcatctgaggagcgataggaattactgatttagaagtgtgtacacactttcttgccctactgcctgccaagaagtcccatatttcacagcctatatctgtctattcccacagctgttcaaatatatgaagttagcgtatctctaccagattggttctcacacagatcttgacctttttattgctggatggaacagaaataggaaagcagaactaatcaagttgagagccgagtgatcttaaggcaaacactctggaaataactcctcgcctccccagatcatgaaacaaaaagctcccagtgaccacaggagcctttgcacataaccagcaactgctcaccatggtcaccacatccttgagtttcattgtgactttgtcacatggatgcccagtccaggaaactagaattatgctgaattttgtgtccattacaggttgccccagtctattttatttacttactttttcaatgtatctataacagatcagaaaaattgtgctctcagttcagccattactggttcctagctatagtagcatgatcttctgaactcagtgtttgcttcaaattcttggtcaagctaatcgttgacttgataaggtggagcctgatagtgcctttcatcaacaagactgtgggtcatgtgttttcatagcagcagcctttgaccccaaatgctgaaatcagggtgagcaaggtccaggcctggacaaattctgccagactacagatttcacgtggtctatgaacccagccagacttttcatttgaaaaggttctatggctgcttgcgtactctggtggctggatacatgaccccttgttcacagagcctaaaatccactgtctgaaactcttatcttacttctagacatggtttgcctatacttagaacctaaatcatcactgtttaaagactctgtagacattttggatgtctaaataggagtgatttagtcgatccctgagaggggctcctagtaatgttatgccagagttctcaaatgttgacaatttgttggaccttggggcacaggaagatttccattgtagaagtcatttttcccctgaaatccttagataactttactttaaaaacatatatgttgttatagttttctaacatagaactatgactttttgaaaggtgggattaatttttgtttgataggcagtttacctctttttgtttattattattattatttttgttgttgttgttgttgttgttgatcttttaacttattcaatttacatcctaatcacagctgccctgcccagtcactgggttccacaatctctccacctatccccatccccttctcctctgctggggagggcccccactgggtattcccccaccctggcacttcaagtctctcccacttaggcagacaaggcaggcagctagaagaacagacaggcaacagcttttgggatagtccctgttccattcctctgctggattcagattttcttcttttgaattactttgttgttagattgactgttctctatcttccatattaatcacttccattcataagcctttgtttcttttcttggctatttttttttattgttaaagtatttctccctttcttctttcttatttaggtattatgcgtggtcatttagtggttcttattccttctgacttaggctttccatcttccccagtactcacagctgtgtggtctgattgataacttctgtgatactgaacagaggactgaacctggttggtgaaagttggacccacattacttaagaaggcaaaaaagtttaaccatgtatctaacattctagaaagaaaagaagaaaacatagtaaaatcagagacagaaaaggattggggaaagatcttggaccatgggacattcattcaaagaaaatgaaaaacaatattcagaggaggcaaagggagatactagaaaccttgctgaattgaccggttgcacctcatgtatttatccttagtgggaggcaaatcaagggtataaagactttgtgactgactccacagagttcctttgccacagacctccacattttaaactgcatacccctcaaagacaattttacatatcacagcttaaatctacataccacatctctacataaaaggtgtatatgttagaggaagcaaggcagaagatatgcaggagacaatgtaggtataagtccctaaaaacatacatgaaagtaatatcaaactcatactctatagactgagtaggttgtatttatgtatttaggagtgtctgtgtgagtatgtgcatgtgtatatgtgtttgtgcatgtgtgtgtgtgtgtgtgtgtgtgtgtgtgtgtgtgtgtgtgtgtgtataaaacaatcaaaaaaaggctacaaatctgaaaaagaacccaggaaggataaatgagagggtttagacagaggaaagaggaaaaaatgaagtaaatatattatatatcaatagatttttgaaaataaaaaaatgttaaatgaaaatatgggtaggagactcgagccccgggctaccgtgccagcagagtcttgcccaacacccgcaagggtccacacgggactccccacaggaccctaagacctctggtgagtggatcacagtgcctgccccaatccaatcgcgcagaactcgagactgcggtacatagggaagcaggctacccgggcctgatctggggcacaagtcccttccgctcgactcgagactcgagccccgggctaccttgacagcagtcttgcccaacacccgcaagggcccacacgggactccccacgggaccctaagacctctggtgagtggaacacagcgcctaccccaatccaatcgcgtggaacttgagactgcggtacatagggaagcaggctacccgggcttgatctggggcacaaaccccttccactccactcgagccccggctaccttgccagctgagtcgcctgacacccgcaagggcccacacaggattccacacgtgatcctaagacctctagtgagtggaacacaacttctgccaggagtctggttcgaacaccagatatctgggtacctgccttgcaagaagagagcttgcctgcagagaatactctgcccactgaaactaaggagagtgctaccctccaggtctgctcatagaggctaacagagtcacctgaagaacaagctcttaacagtgacaactaaaacagctagcttcagagattaccagatggcgaaaggcaaacgtaagaatcctactaacagaaatcaagaccactcaccatcatcagaacgcagcactcccaccccacctagtcctgggcaccccaacacaaccgaaaatctagacccagatttaaaaacatttctcatgatgatgatagaggacatcaagaaggactttcataagtcacttaaagatttacaggagagcactgctaaagagttacaggctcttaaagaaaagcaggaaaacacagccaaacaggtgatggaaatgaacaaaaccatactagaactaaaaggggaagtagacacaataaagaaaacccaaagcgaggcaacgctggagatagaaaccctaggaaagagatctggaaccatagatgcgagcatcagcaacagaatacaagaaatggaagagagaatctcaggtgcagaagattccatagagaacatcgacacaacagtcaaagaaaatacaaaatgcaaaaggatcctaactcaaaacatccaggtaatccaggacacaatgagaagaccaaacctacggataataggaattgatgagaatgaagattttcaacttaaagggccagctaatatcttcaacaaaataatagaagaaaacttcccaaacataaaaaaagagatgcccatgatcatacaagaagcatacagaactccaaatagactggaccagaaaagaaattcctcccgacacataataatcagaacaacaaatgcactaaataaagatagaatattaaaagcagtaagggagaaaggtcaagtaacatataaaggaaggcctatcagaattacaccagattttcaccagagactatgaaagccagaagagcctggacagatgttatacagacactaagagaacacaaatgccagcccaggctactatacccggccaaactctcagattaccatagatggagaaaccaaagtattccacaacaaaaccaagttcacacaatatctttccacgaatccagcccttcaaaggatnnnnnnnnnnnnnnnnnnnnacaagaacagaatgccaactctaacaacaaaaataaaagggagcaacaattacttttccttaatatctcttaatatcaatggactcaattccccaataaaaagacatagactaacagactggctacacaaacaggacccaacattctgctgcttacaggaaacccatctcagggaaaaagacagacactacctcagagtgaaaggctggaaaacaattttccaagcaaatggactgaagaaacaagctggagtagccattttaatatcggataaaatcgacttccaacccaaagttatcaaaaaagacaaggagggacacttcatactcatcaaaggtaaaatcctccaagaggaactctcaattctgaatatctacgcaccaaatgcaagggcagccacattcattagagacactttagtaaagctcaaagcatacattgcacctcacacaataatagtgggagacttcaacacaccactttcttcaaaggacagatcgtggaaacagaaactaaacagggacacagtgaaactaacagaagttatgaaacaaatggacctgacagatatctacagaacattttatcctaaaacaaaaggatataccttcttctcagcacctcacgggaccttctccaaaattgaccatataattggtcacaaaacaggcctcaatagatacaaaaatattgaaattgtcccatgtatcctatcagaccaccatggcctaagactgatcttcaataacaacataaataatggaaagctaacattcacgtggaaactgaataacactcttctcaatgataccttggtcaaggaaggaataaagaaagaaattaaagactttttagagtttaatgaaaatgaagccacaacgtacccaaacctatgggacacaatgaaagcatttctaagagggaaactcatagcgctgagtgcctccaagaagaaacgggagacagcacatactagcagcttgacaacacatctaaaagccctagaaaaaaaggaagcaaattcacccaagaggagtagacggcaggaaataatcaaactcaggggtgaaatcaaccgagtggaaacaagaagaactattcaaagaattaaccaaacgaggagttggttctttgagaaaatcaacaagatagataaacccttagctagactcactaaagggcacagggacaaaatcctaattaacaaaatcagaaatgaaaagggagacataacaacagatcctgaagaaatccaaaacaccatcagatccttctacaaaaggctatactcaacaaaactggaaaacctggacgaaatggacaaatttctggacagataccaggtaccaaagttgaatcaggatcaagttgaccatctaaacagtcccatatcacctaaagaaatagaagcagttattaatagtctcccaaccaaaaaaagcccaggaccagatgggtttagtgcagagttctatcagaccttcaaagaagatctaattccaattctgcacaaactatttcacaaaatagaagtagaaggtactctacccaactcattttatgaagccactattactctgatacctaaaccacagaaagatccaacaaagatagagaacttcagaccaatttctcttatgaatatcgatgcaaaaatcctcaataaaattctcgctaaccgaatccaagaacacattaaagcaatcatccatcctgaccaagtaggttttattccagggatgctgggatggtttaatatacgaaaatccatcaatgtaatccattatataaacaaactcaaagacaagaaccacatgatcatctcgttagatgcagaaaaagcatttgacaagatccaacacccattcatgataaaagttttggaaagatcaggaattcaaggcccatacctaaacatgataaaagcaatctacagcaaaccagtagccaacatcaaagtaaatggagagaagctggaagcaatcccactaaaatcagggactagacaaggctgcccactttctccctaccttttcaacatagtacttgaagtattagccagagcaattcgacaacaaaaggagatcaaggggatacaaattggaaaagaggaagtcaaaatatcactttttgcagatgatatgatagtatatataagtgaccctaaaaattctaccagagaactcctaaacctgataaacagcttcggtgaagtagctggatataaaataaactcaaacaagtcaatggcctttctctatacaaagaataaacaggctgagaaagaaattagagaaacaacacccttctcaatagtcacaaataatataaaatatcttggcgtgactctaactaaggaagtgaaagatctgtatgataaaaacttcaaatctctgaagaaagaaattaaggaagatctcagaagatggaaagatctcccatgctcatggattggcaggatcaacattgtaaaaatggctatcttgccaaaagcaatctacagattcaatgcaatccccatcaaaattccaactcaattcttcaacgaattggaaggagcaatttgcaaatgtgtctggaataacaaaaaacctaggatagcaaaaagtcttctcaaggataaaagaacttctggcggaatcaccatgccagacctaaagctttactacagagcaattgtgataaaaactgcatggtactggtatagagacagacaagtagaccaatggaatagaattgaagacccggaaatgaacccacacacctatggtcacttgatcttcgacaagggagctaaaaccatccagtggaagaaagacagcattttcaacaattggtgctggcacaactggttgttatcgtgtagaagaatgcgaatcgatccatacttattttcttgtactaaggtcaaatctaagtggatcaaggaacttcacataaaaccagagacactgaaacttatagaggagaaagtggggaaaagccttgaagatatgggcacaggggaaaaattcctgaacagaacagcaatggcttgtactgtaagatcgagaatcgacaaatgggacctaatgaaactccaaagtttctgcaaggcaaaagacaccgtcaataagacaaaaagaccaccaacagattgggaaaggatctttacctatcctaaatcagataggggactaatatccaacatatataaagaactcaagaaggtggacttcagaaaatcaaataaccccattaaaaaatggggctcagaactgaacaaagaattctcacctgaggaataccgaatggcagagaagcacttgaaaaaatgttcaacatccttaatcatcatggaaatgcaaatcaaaacaaccctgagattccacctcacaccagtcagaatggctaagatcaaaaattcaggtgacagcagatgctggcgaggatgtggagaaagaggaacactcctccattgttggtgggagtgcaggcttgtacaaccactctggaaatcagtctggcggttcctcagaaaactggacatagtactaccggaggatccagcaatacctctcctgggcatatatccagaagatgccccaacaggtaagaaggacacatgctccactatgttcatagcagccttatttataatagccagaagctggaaagaacctagatgcccctcaacagaggaatggatacagaaaatgtggtacatctacacaatggagtactactcagctattaaaaagaatgaatttatgaaattcctagccaaatggatggacctggagggcatcatccggagtgaggtaacacattcacaaagaaactcacacaatatgtattcactgataagtggatattagccccaaacctaggatacccaagatataagatataatttgctaaacacatgaaactcaaggagaatgaagactgaagtgtggacactatgcccctccttagatttgggaacaaaacacccatggaaggagttacagagacggagtttggagctgagatgaaaggatggaccatgtagagactgccatagccagggatccaccccataatcagcatccaaacgctgacaccattgcatacactagcaagattttattgaaaggacgcagatgtagctgtctcttgtgagactatgccggggcccagcaaacacagaagtggatgctcacagtcagctaatggatggatcatagggctcccaatggaggagctagagaaagtacccaaggagctaaagggatctgcaaccctataggtggaacaacattatgagctaaccagtaccccggagctcttgactctagctgcatatatatcaaaagatggcctagtcggccatcactggaaagagaggcccattggacttgcaaactttatatgccccagtacaggggaataccagggccaaaaagggggagtgggtgggcaggggagtgggggtgggtggatatgggggacttttggtatagcattggaaatgtaaatgagttaaatacctaataaaaaatggaaaaaaaaaaaaaaaagaaaatatgggtataagtaactccagaaaattagtttacatagtaaagccactacatatcaaatgtgaactgtatgtttgtttatcttaactgtaattctgatatattctattattatggcagataaatttgggtaatttttaaatttggggctccttgctaaatttgtgacatcctccttcatgacattaataggcatattaaacatttatcaaaatctactagctagacaacataccgtgagctttctgtggctttcttcatgacccttgaagcaacctgtgataactcttttgaccattatgagaactttgaaagatagaacacttttgtaagttctcacagctgtcaaatggcacaagcacagaagagatctcgtgtggccatcttcagagactccctttttattttgttttagaatttattttatttttgagatcataatgtaacaaaatcatttccccctccctttccttcctccaaagctaacaattttcacctaatgattcaatttatgtaacagttatcaatgacttgagtaaacattattcagatctcagaaatgcaatcagctttaatttttctgtaacctttctaatagaggggaagactgaacaatgtctgaaatgaaaatgtctcacaggagagcagtgcgggctatagagccttgtttcagaggcagatagcagtagtgttgccaactgtgatagtgtctgatgtccttgacaaggagacattgtgactagattgcactaacttgattaagtttcacacgcagaaaatacaaacaagcaagtctgatgatctaactgctctatttaactgacatgactcacattgggttaataactgagcttcccactcttctgtcatgcagatgttcagggctcactcgctgagaaatgatcttgcaattaagatgcacaggcagtaccctaagaaacacaatcttcaacttagcttcaaacattagggaaagctagaatcgagatgctggcattgtggctctccaaaggcagaaatggaaaatttaaatgtttgtggctaacagtgtctacccaataattcaatttatatgacaattaccaatgacttgagtaaacatgatttggatctgagaaatactgtcaattttcatttctccataacctttcaaacaggaaaactgaacaatatctgaaaataaaaaagaatctagacactcagtatctaaacattggctgcctcatgctttatagattcttggaaattgcttcctcattcctcaaacactgccctttgctcaaatgaatatgtaccaagcaccaacacaccagtcttctgggaagacaagaaggcaaagagcccttttgttcttcacgttcaatatatttgttgaggatgagaggtccaggctttgacattttccgacttgttatctatttaatttcccatctgcttctttgccactgccttccaaaggaacatctgcgtgtatgtgggagaaaggaaggaggttggatgtgagccaccggggtctgcagtcttggagcatgggagccagaggaaagaaaggagaggagactaacaaatggtccaaaagctgaaatgaggacaaacagtctgctgagagcaaagctgtatttccctttatatccacatggccaggcaaagcaggcagtggcgtgtacaaacagccagagccacacgtgtacaggaagcagctggtgactgcaagcatccagaacacccaagggctcagacattccttctgtttctcaaggcccttatccagtgtcctgttcatcacatagcctttaaccatttctggaccagccagtgtgagccaggagctattctgaacattcacgaaacagatgaaaaagatacaatatttgcacctaaggacttgacaatataaaatggcaaatccttttcctcaagcagagaaaatatgttctaggaacacagagaaggaagaagggtggtgggaaaataaatgatggttccacgataataaaggcagtaaagggctggagagatggctcagcagttaagagcactgactgttcttccaaaggtcctgggttcaaattccagcaaacacatggtggctcacaaccatccgtattgagatccgacgccctcttttggtgtgtctgaagacagctacagtgtacttagatataataataaataaatttttaaacaaacaaaaaaaaaacacaagaaataaagtaaagagagtaagctcaacctgggaggatgaatagaaatgttgcgcatcaaggtcttctttaacttagctgatctttcacttaatgatatctagtgctgccataatttcatttttttcttgtggctgaatggaatcccattgtgtatatctattgtattctctgtccatttatctgttgatgaactcaaccagttctattccctgactcttgtgaatagtgtagcatgctgtacggactcagaacagttgggtatatgcccaggagtggtcacaaactttaagccctactttaagacaaacactgcatgttctatgccatatgcacagcatgcatttaagtgtgtgtgtgtgtgtgtgtgtgtgtgtgtttgtgtgtgtgcgtgtgtgcatgcaaaagctagaaaggtgaccatataggagagaatgaaatatcaaggcaatgagagggtgggaaagagaagatactggaattatatgtgatgtaaaagcagaaaggaaaagctgagggagagggggaggaagtagcaatgaggaacggagtatgaaaatgccatcataaaatacattcctttgtatgaacaagaattagtttaaaattctaatagaagacaagttatcgaccctcataccttaacagcacacataacagcaacccttagtaagtgatttaaaatctcagtctcaggctggtgagatggctcagcaagtaagagcactgactgttcttctgaaagtcctgagttcaaatcccagcaaccacatggtgactcacaaccacctgtaatgagatctgacgccctcttctggtgcatctgaagacagctactgtgtacttacttataatagtaaataaatcattgggctggagtgagcaggagttgaccagagcaagcagaagacctaaattcagttcccaacaaccacatgaaagctcacaaccatctgtacagctacaatgtactcatatacatgaaaataaataaataaataaatctttttaaataaataaataaataaaataagacctccgaaggctcatctcacataccttccttgttaatgtcaagctctcaacatttctgtccaatattctctcccaccttggttagagcacttcctgatgttatcatagagtatgaccaaggtgctgtggaagagcatataaaataacacctgtattgctatggtggagcaaatgataggaaagcaacagtagtctgattttacttttccttaaatgtctagctttatggtcagctctagacaggacatccataccataccctctccctaaggcttggggaatatcatgtaagacagggcagaaagaatgtaagagccagagaatagggagacagtctctaaaatgttatctggacatgacatgccatcactcatgagtcatagtgaccacaggtacctgcacaagatccagcctgccaacattccagcacagggatgtagaagcatatgaggccccatccataacagaagaaacattgggagttaatgtatgataaatgatggggaatcacttttgttcagagggtgtggccactgacaagtggactctacccagtaatagccccacacatatgcaaatgcaggcaatgttaattaaaccccatggagtttttaaagacatgaaatcagaaggatatgttggtccaaacaaagtgtgaaacagataagagaaggaaatgggcgtctgtgaattgatgaaaatatgtcatatacatatttttaaagtatcttaattcattgcagtctttatacatagaaacacaatatcaacataataaaaagttagggtagacatttatctctaaaacacagaacttaaatgaatatttaccttgatcatatacatatacatatacatataatttgccattccctgtgtctaagaagctaaagttaaaaaaaaaagttaaaattagagttaccccagtgttaacattggctaactttaaaaaaaaaaaaaaagcaaacaaaaatcaaaattcttctttttctagctctggcatgacagtgacaaatatttagcatttaaatgaaaaaacaaaactaaactaaactaatgccaggatatggccattgctcactaagtgtatcgtttctcctctgttcagtgctgtctgcaaacggatgcaaacttaccatcctattcaggattagtcacagtttacactgagatgcagatgagatgggataatctctgactatgcaactgtgtcttgtattcattttaataaattttatttttaaagtatgtgttggtaaaatggaaacaactgcaatgtgagaatcaaacgcagcctttatgccatgaatgcactttccagatcaatggagaaataattctgtgaaggttgagctgcaaaacttagtaacttctgagatcaaatgaggtattttgtgtatttttaactagattcaacttatctagagttcttatgtctattgtaaatatgggacattgcattttaggcttatttcattaagtagagtttaaggacagttctgaatttctaagtaaggctaactgtatggtggataaaaaacattttcctggaggcttttggtcctgtaaagggtctaagccccagtgtaggggaatgccagggccaggaagtggaagtgggtgggttgatgagcagggggagggtgggctggataaggaattttcagaggggaaaccaggaaaggggataacatttgaaatgtaaattaaaaaatctaatcaaaattccaattatgaaaaaaaaaacattttcctgtgttttcaactacaagaagtgggcttttcacccaggaccacatgggtttactgcagagttctatcagaccttcaaagaagacctaattctaactctcctcaaattactccacaaaatagaaacagtaggttctctacccaattcattctatgaagccacaattactctaatacctaaaccacactaagatccaacaaagaaagagaacttcagaacaatttcccttatgaatatcaatgcaaaaatattcaataaaatcctcccaaaccgaatccaagaacacatcaaaacaatcatccatcatgaccaagtaggcttcatcccagggatgcagggatggattaaatacggaaagccattaacgtaatctactatataaacaaaatcaaagacaaaaatcacatgatcatcacgttagctgctgagaaagtatttgacaaaatccaacaccccttcatgataaaagtcatggaaagatcaggattcaaggcccatacctaaacataataaaagcaatctacagcaaaccagtagccaacatcaaactaaatggagaggaacctcaaagcaatcccactaaaatcagggactagacaaggctgcccactttctccctaaatattcaatatagtacttgaggtcctagccagagcaattcgacaacaaaaggagatcaaggggatacaaattggcaaggaagaagtcaaaatatcactatttgcagacgatatgatagtatagataagtggccccaaaaattccaccagagaactcctaaaccttcatttttatatcagtagctagatataaaatgaactcaaacaaatcggtggcctttctctacataaggataaacaggatgagaaagaaatcagggaaacaacacccttctcaatagtcacaaataatataaaatagcttggtgtgactctaactaaggaagtgaaagatctgtatgacaagaacttcaagtctctgaagaaagaaattaaagaagatctcagaagatggaaagatctcccatgctcatggattggcaggattaatatagtaaagatggctaccctgccaaaagcaatctacagattctatgcaatccccatcaaaattccaactcaattcttcactgagttagaaaggtcaatttgcaagttcatctggaataacaaaaaacctaggatagcaaaaactattctcaacaataaaagaacctctggtggaatcaccatgccagacctaaagctgtactacagagcaactgtgataaaaactgcatggtactggtacagtgacagacaggtagatcaatggaatacaattgaagacccagaaatgaacctatggtcacttgatctttgacaagggagctaaagtcatccagtgggaaaaagacagcattttcaacaaatggtgctggcacaactggcggttatcatgtagaagaatatgaattgatccattcttatctccttgtacaaagctcaagtctaagtggatcaaagacctccacataaaaccagtgacactgaaatttatagaggagaatatggggtaaagcttcaaagatatgggcacaggggaaaaaaatcctacacagaacagcaatggcctgtactgtaagatcaagaatcaacaaatgggacctcataaaattgcaaagcttctgtagggcaaaagatactgtcaataagacaaaaaggccaccaacagattgggaaagaatttttgccaatcctaaatctgatagtggactgatgtccaatatatacaaagagctcaagaagctggactccagaaattcaaataaccttatttttaaaaagggtacagagctaaacaaagaattcccaaccgagcaataccgaagggctggaaagcacttgaaaaagtgttcaacatccttaatcatcagggaaatgcaaatcaaaacaaccctgagattccaactcacaccagtcagaatgggtatgatcaaaaattcaggtgacagcagatgctggggaggatgtagagaaagaggaacactcctccactgctggtgggattgcaagcttgtaaaaccactctggaaatcagtctggcggttcctcagaaaactgtacatagtattaccggcagatccagcaatacctctcctgggaatatacccagatgttccaactggcaataaggacacatggtccaatatgttcatagcagccctatttataatagccagaagctggaaagaacccagatgtccctcaacagaggaatggatacagaaaatgtggtacatttacacaattgggtactattcagctattaaaaacaatgaacttatgaaattcttagtcaaatggatgtatctggaggatatcatcctgagtgaggtaacccaatcacaaaagaagtcacttgatatgcactcactgataagtgaatattagcccagaaacttagaatgcccaacatacaatttctaaaaacaagaaactcaagaagaaggaagaccaacacgtgaatacttcgttccttcatagaatagggaacaacatacccatggaaggagttacagagacagtttggagctaagacgaaaggatgggccatccagagactgccccactagggggtccatcccataatcagccaccaaacccagacactatttcatatgccagtaagattttgctgaaaggaccctgatatagctgtgtcctgtgaggctatgccagtgcctggaaaatacagaagtggatgctcacagtcatctgtaggatggaacacagggcccccagtggagaagccagagaaattacctgaagagctgaaggggtttgcaaccttataggtggaacaacacctataactatgaactaaccagtacccccagagctcgtatctctagctgcatatgtagcagaagatggcctagttggccaccattgggaagagaggcctcttggacttgcaaactttatatgcccagtacaggggaatgccagggccaagaagtaggagtgagtgggtaggggagcagggcagtggggtggtacaggggacttttggaatagcatttgaaatgtgaataaagaaaatatctaataaaaaatttttttaaaagaagtgtgcttttcaaaagatgatgattgaaattttgctaaataaaatgttctatgatgttattctgtggactggaaaaataaggtaatttatatcagaaggacaacagcaagtactttataatttagaatcgatagaagcacagaatactttcagtttgtaaagcttgtttagcccaattttcaagtgagaaagttgaggtcccaaaaggttaaatagctgcacttcctttgtttggatttgcaaccatacatgctaattcccaaaacatgactcatggcagcttctcatcattttattcctcttggttttatattttacatcataaaaaatagatatcgttttgtttagggatagaagcaaataaatcttttcactagctgaattgaactatacccttcccaccagaattagttacttctgtgtcactgtgaccagactatctgacaatgacaatttcagaggtaaagattccttttggctcatgatagagtagggaagacacagccaagaaggaagtctgtggcactgttagcatgcagctgaggcttctcattatagcgaaccaagaagcaggtagtgactggggccaggaagtgaatgtatctacaatgaaggaaggcatttgttgaaacatgactatactttgggggcaaaaaaaaaaaaaaaaaaaaaaaaaaaaaaaaagaaaatacatgatgttatggttattatatacatgaaacagaacaaagcaagtcagttacattccaacatttttttctggaaactttttcttttcccatggatatctattaatttatctatgtgaggcaggtacaaggataagtgatgaaatctaatcagttattgaattcggcctctagcaggtggaaagtccttccacagacttctgagctaacaactctttcctctccattttccctttcagaattggtctaagactgatgggtacttggggaaaaaaatcttttcctgaatgtttgtctctgccaagctaccaaattcctaattacattttttttgtaacccccaggactaccaagaagcttccaatttggaacaatttgtcactcgatttttgttgaaggagaccttgaatcagttgcagtctctccagaactctctggaatgtgccatggaaactactgaagagcaaacgcgtcaagaaaggtagctactgatttccctctccaatgatgctctgtactcatgggaaggcagttgaagggtttttctgcttattctacagagagctgaattaataaattttaagaagtgccaaggaccccctagactatttactttgaataaaaagaaaacctcaccttttattatgctatctgtcatttattcagcaaatgtgaattaagaatttagtatgtagagaagaatttaaaaacaatatagatgataataatgtatatttaacttgatattaattcttaaagagctaaaaacttattacatacataaaacagacagcaaaactaaactgtaaaggcacacaataaatatagagggaaggaaataacttgtcagtgggtttctgaagagtgagatattaaatatggcacagtggaatttaatcccatgttctggtcttcaaaatcggtataatttgaaaacgtggcagtgatcagaaaggccttaatagatcaaatgatcctggttatattagaaagatggtggcattaattagcaagacagattcctttcataatggaggaaaatgagtgctgagaaagatttaaaagctaacgctaccagtgtatatcactaagaagaaaattaacaacataaaaaagaggcactagtgctgaagagaagcctgtattataagcaagtgaagcaatatcagaatgactcaaaccatttgcattgttattcagttgacattgtgccttgcaagatggacaagggcaacatttttgctcttgttgatatgtcactctaagcccctggatatgcctcatggaacctttgttcttggaaccacacagtaaggcttttgaacaaaatggtcataatttatcctgtaagaccaatttttctaaacagattaatggatacatgattatcaagacatctccgtattacagaattttcagccatgtgtatgttcagtgttggatgaataggcactgccaagttccaacagaagaaagctgccgtgggccgatggtggatctggggtgcagccgaagaaggctgactgcatccttcagtgggtctgagcacccttcttcactgtcacttgtcttttcactgtgttgagcaattctaaaccaaattcactttgggaaaacagcaacccagtttgaaaaaaaatacctcctccagtttgaaatgatagctggatgtcttgaagcacagtgaaattgatttcatgtttttggtgagaacatgatggtccctattacctctttggtttagatctcctggacccaaattctttccttttataatcaatcattttccacctgagaggagacttagaaaagcctcgtctccgcctccaccccaccctcacccccacttctttcttaggcttcccttctgtagttattgtatacaatcataggccacacccaaaacagcaaatgtttaatgaacaattattttttttgtattaggcttgctttcagcttttgcttgcaaccagaagctgcatagcatctgtgtttaatgggaaggaacaaaataatacagagtttaagaaaaatagaagacatcagaggattaatgagccttttactttcagatttatagctccaaaactgcttgaataatgggaactattactggtctcttgacagtgtagagagtgctgtgatatggaacttgactaaagcatctggggtccagcccaaccccattctgaggtactctcaggagtttctgaataaattaatttctaaaatatggaaaaactacaccactatgggtgggtgaccattatatccattatgaagtttctggcggttcggaaggaagcatttattagctctaacctagaaggctgtgtcttcttcccaagggtcaccaaaggccaacacaagcagaggccccaggaccagtgccagtgacagaataacagtaagaggaaggctgtcctgtcccaggatatcaatcaaaacaaccttggcaaagcttagtaggcagagaagcctttaactggatctttaggaggactttgagaggcaagatgatattctgtattggaggatatggtctagcccaccccatgttggataccactcatacagctagcttttccaatctttttttgtcactccacaattctttgtctataaagccttcaagttccccactgagtgctctagttgtgccttgtatccccacttaattaactcagacttgtacttatcgccttctccatcagtcttactgtttctagatgcctaggcctttatgttgttccctctccttgtgttaaacaagtggagcccaatgaatgggagagagcccaacagaagagcagcagggtagggacagtgaggagtccaatctatctgctatctggaagtctttacaagctagccagatgcattggaagtttattacatcataggttggtgtcagtagttataaaagaccaatctaatgcaaccaaagcttaaagaaaattagtctagcagctatatgtagtacatagagtgtgtgaaaagaacaaagtaaagagaagccaaaacaggatttaccaaactcctcagtttttaatatcacaaaagagaattccatgatactttacatagtcaagagttgtaagctgtaggtttcataaaaattcccagggtcataatcattttcttccccttcagcatccattttactttagaatttaatacttgtgaaaacaagggatacagacttgttgagaaagatgaaatctagagaaaacatctcttccttctagaagcctcaggcagaatcacacaacatcgttcatcctgaaataatgaatcagacatactgcgctgagcataatgtctgtgcccattcatgtgaaataggcaatttcagagagggggatatgcacagttggaatgtcatagaggtgagagtctcagatggcatttcgtgccatctctgtatctgctcagacaagctggctaagcgggagccactttaattccctggcttgaaagagcctaatagccagtggcagagaagtcattatgtgatgtgaaaggtacctccagaggaccccaggactattgcataaacccacctccacacaagcttcatttcctaaacacagttcaactacatgtggatttcctttgtatagtggaatccttaagtttggtctgttttccaagtttcttctataagcagagatacaaatgagtccctctgggcttaggactcatttcttgacttgatcattgtttagtatagaagaaagaataggctttcgtttcacccatatccccctatggcttatgttcccctagcttggttagagaaaaacgggtctgttgttgtgtcaccaaagcatgggacttatgctgtaggaagatccatagggaaaattaaatattggaaactagatacatctgaatgtttttgttgttgttctctgtttaaactttctcttttttctcttattggatattttctgtatttacttttcaaatgtttccccatcccaaggttcccctctggaaacccttatcccattccccctcctcctgcctctattagggtgctccccacccacccacacactcccctccttcctgcccaggcattcccctacactggggcatcgaaccctctgaggcccaagggcctctcctcccactgatgtacaaaactgcctaaactttcaaaattaacattttaaaagcctggatgaaagagtcctttaggaaagaaaagccccaccccacccccaaaccccaaactagaaactcgaaatcttaaactataaggatttaaaatgatttgaaagccctgggaaagcagctctcacagactgtgcaaaaggagagcaaagaaccctgggatgctggaggaccgatggagccatgtggaactggctgtgagctgaaccagacactagtgtattatgggaatgcccaccagagtttgcaatgattgctccttcccagtctggaggaccttagaggtcaacatgtgtgaatcaagtactacagggggcagagcccaaagctgaagatgagacatgaagtgaaggccttgataccgaccaggacatctaaaccccctttgtatgccatttcggttacagactttgggctcaaagtgttcagttaggggacacttcggtggaagatctgatcactctatgagaaagccttggtcatccctatgagtaggcttaaagacttatatgggaagatgtgacttggctaatggcgatgcatacaaaatgccaacctgccttgtaagtcctcactctggaatgtagaggtaggggtagagcaacagaaagcacgaaacaagcacaaaacaaaacaaaaccagcagaaacagaaactgttactgagtttggggccagatttgttaaaactgctagcagagccatggtctctaatccaaatcagagacatgcactactgaggcaggtgatagaatgacttttaaaggagaaactgcaaaaaactgttctgctcagccaagatgagacggtcaagttgacctcaaaatagtccttgagtgtctgcatatgcaagttacataggccaaaaccagcagttagtagcaagaacaagcagggctcaaggggttgggcttgtcaacaaattgtcttttagaagcttggtgtcaaaaacaagcagctcttaaataacaacatggatccctagcaaaaatgtagtttctttagccatcataaaacaattctgagaacagaaaaaagatcagaagaactagccccatcaaaagcaaacttgttgctataggaagtaaagtctgcagcggatgacacgacgagctttgtctcaaatgtccaaacttataattgtaaaagtgaaattcctagggaatattttaatataaaattataataaaatctctgcaaagtagcaagaaagaaaatatatgatgagaaaaccagagagtacgtctaaaagatcttatgtttgtaaaatagaaattctaggaaaagatcaagggagaataattatcaaaagaataattcaagaaaacctttcagaacaagaatgtaagtcttcagcctggtaaattagaccaagtactcattataatgatgtttttaaaatattctaacactaaggaatgcaatatgacatttcagaatattacagacaatgatgtgcccagaaattctagggaggggaatccaggatgtctggaaaggataaaggatatgctttgggaattggaatgaagagctcgctctgtgtgtgtgtgtgtgtgtgtgtgtgtgtgtgtgtgtgtgtgtgtgtgtgtgtgtgtgtgtctatctgctgtctcactttctctcgatctttctctcttaataaaataaaacaaaaactgacacattgggataggatgacaaacaaacaaggaagagagcccaagagaaggcagagagagagagagagaaagagagagagagagagagagagagagagagagagagagagagagagagagagagagagagagactactcgtttgcacactcaggaatccataaaaacagtcaactggaagctttaatatataggcagatgacccgtttctgatcagtgcaggccctgtgcatgctaccttagtctctgtgagtaagttcttctgagctttgctcatgttcattttgagggctttgtttccttgatatcctccatcccctctagttcttaaactctttctgcctcctctttcacagggttccctgctgcctcatgggagggatttgatggagacatctggtctataattgagactctcagtctctgcataacgtctggctgtgggtctctctgtatttgttcccatctgatgaagaaaggggcttctgataatggctgaacaaggcactgatctatgaaaagagcagaatgtcattaggagtcattttatcactacacgtttttttaaagaacagtagtatttgattttaccatctagtttcaggttcttggtcacccaagcagtatctggactagtttccatctcacagagtaagacttcagtcactcagaggttggttggttactcccacaacttttatgccaccattaccctagcatatcttgtaggtgggacacagttataaatcaaatattttgtgactgagttgatatttctctctgggtagagcagtgtattttcctgtgccaaaaacactaggacatgtgagtaagttctccatgtaggcatcgatgtttccatgttcaggaagttgtctgggtgttgtctttagcaatggagtcttgccatcagattgtggagaacaacctatagtcttgagaactgcctgggttgtttccggattcccatgggatttttttcagccaactactcaattagatggaacccaatcccaatactgaaatcttcatttgatgacaagagctatccagatggtggtatgttgccccccattatttggcaaactcatttagatccccttctactggttttagtatccacaccaccccttaagtagtccttaattttagctgtttcattcagtattccttctcttgtcacactctccacccgactctgtctaccttcccacttgatactcccatttcagcaactccattcatctacaactctctattctttttccatatcctaggaagatctatctgcccacaaccccaggtcccttactctatacctatgtggttctctggactgtagctttgacttattagctaatgtccacatataagccaacatgtactatactgtatttgtctttctagatctgagttactcattcagttactcatttttttttctaattccatccatttacctgaaaattccatgatttcatttttttaacaactgaataatgctcccttgcatatatgtatcataatttctttattcatacttctgtcaagggtgatctctaggttgtttccaatttctaggtattatgaatagaggagcaataaagatggttgaccaagtgtctctgtggtaggattaagaagcctttgattatatgtccaagagtggtacaactggatcttgaggtaaactgatacccatctttctggcatgccaccccaatgattttcataatgtctatacaagtttgcactcccaccagaaatggctgagtttttcccctactccccattcttgccaacatgagctgtcatttgttttattgaccttagccattctgactggtataagatgaaatatcaaagtagttttgattttatttctctcatggtaaggatgttaaacctttcctaaagtgtttcttggccatttgactttcaattttttgataattctctatttagatttgtgccctattttaatttgattatttgtggagggttggtatgagtttctagagttttttaaatatatcttaaatattaggcctctatcagatatgtagttgataaatatcttttcctattctgtaggctgctactttgtctgaatgaaagtgttctttgcccatttattaattattaattttaatgtctgtgctaatggtgttctgttgagaaagtctttttctgtcccaatgagttcaaggctattctgcactttctcttctaacaggttcagtgtatctggttttatattgaggttggaatgcatttagagtggagtttgtacaggggatgagtatgaatctatctggattcttctacatgtagccattcagtttgattaggtccattttttttttttttggaagatgcttttttcccccagtgtgtttctagcctgcttaccaaaattcaggtatcctcatgtatgtagattttatatcttgatcttcaatgattccactgattaatatgcatcttattatttacatacatacatacatacatacatacatacatacacacacacacgtgtgtgtgtgtgtgtgtgtgtgtgtgtgtgtgtgtataactttaactttgacctttgcattttgtatccccttgatctccttcagcagtcttactgttttagctaaaaattcaaatactatattgaataggtatagaacgtggaaaaccttatcttgttcctgattttagtgctttgtatttttctctatttaagttgaggttggctatgagcctactgcaaactgttacagttatgtgccttgtatccctaatctctccaaaacttttatcatgaaggagcatttgattttgtcaaaggcctttcttgcacctaatgaaaagatcatgtatgttttgtttttctgtttggttatgtggtggatttcatttataaacttactcatgctggaccatgcctgcatttctagggagaaacctacttgattatagtagatgctcttcttgatgtgttcttggatttagtttgaaagtactttgttgtgattttttttttttttgcatctatgttcattattaaaatggcctgtggctctcttttttcttgggttttaatgtggtttgggtatcagtaattgtcatcccataaaactctatgctaaaatcatctgatcagagaccttttcttgggagaggagatttcaattactgtttctatttcattaggggttttaggtttgtttaaattgtttatctaatattgatttcactttggtaagtggtatctattgaaaaaattttttttgttttttggggtttttttatttgtattttttaataaagtttgtaatccaatggacacacagaacaaaattgtgctgagaaaaacagtttcataaattaataagtgttaggaagtcagggagaggtccaggtcacaggaagagggagtggagtggccaggtctcttgtacaatattgaaaaaattatccattgcttttagattttccaaattggtggagtataggtttttaaagtatgtccttaagattctctggatttcctcagtgcctggtattatgtcccccttttcatttccaagtttgttatttggatattttttctttaccttttagttatttcggataaaaaaaatttgttactttagatttttttttctttacctcttagttaatttgttgatcttgttgattttctggaagaataaactgtttcgttgatggtttgtgctattcattgtttatttgtatttcattgatttcagtcctgagtttcattatttcttgccatctactacttttggttgtgatttcttctttttgttctagagctttcaggtgtcttgttaagttactagtatgagatctctccattttttaaatgttcactcttggtgctataaactctcctcttaaaactgccttcactgtgttccatatgtttggggaagttgcatattctttttcatccaattctagaaagtctttaatttcttttgaaatatctgtcttgaccaattttcactcagtaatgaggtgttcagtttcaatgagtttgtaagctccctggcatttctgttgttgttgatatccaactttaatcacccatagtggtcagagagtatgcaaggtgttggaatttttttgtgtgtgttgagacttgctttgtgatcaggtgagtcctcaagtctggagaaagtttcatgaagtgcgttagagaattgactggaaagatcgcttagatccatttggtttacgagctccatcattacctgttttcagttgtttttgcttgttggttgtttgattggttggttagttgggttttgtatttttttttaagattttatttatttattatatgtaagtacactgtagttgtcttcagacactccaaaaaagggagtctgatcttgttacagatggttgtgagccaccatatggttgctgggaccttcagaagatcagtcggtgctcttaactactgagccatctccccaacccctgttttttgttgttgttgctgttttagtttgattgttttgttttgtttggggagttggggggtttggttttgttttgttttggggtgatgatagcaagattctattaacaagattgggatatggaagtcacccattatcagtgtgaaggtcagtgtgtgattttggccatagtggtgattttgtttgttttgttttgttttgttttgtttcttggtttggtgttattttttgttgttgttgttttattaagcacattttctgtacccattcttctgttgagggacatctgggttctttccagcttctggctattataaataaggctgctatgaaaatagtatgtcctcttatatgttcttcatcatatacagcctgcacctctacctcagcaaagcaaccttcaacgagcattttatctgtagaaatctctctatcccaactctattttgtcatgctatctcccttgcctcatctctccaccatgcgaaccattataaatttgcagcaggtatctagtattgctcttgctatatctccccaatcttagaggattattctattattaatagcccaagaagtcaagatttgttttacaaatagtgaatgcattccaaaattagtgacactttccttaaattttctcagttctaatttaatttgcaattcaaattcctcataacactgtagaggtctttgttgtatattaaccagatagactaaagtttgttttctaactttggttagctttttctaatgttatcttttgtctctacctgagtattctctttaattgaaattttaaattcttcccttaaggtctgtgtccacacttcatatctcttattattatcctgttccttcagttcctatattcttttttcaaggttctgcctccatattttgattttttttctttatattgcaattctgatagtctgctcttcattttattttgattaattttaaaaggttattcttcaagtcttgcttccaatcctcattattttctctctcctgctcagtctgctctgtgagctgctgcatcctttgttctagcatcttttccagctcctgtctcccaccttcattttcaactttctgtctcttattctgatctataatttcctctgtcttcaattttagtgtttcctctaggccacattgccaagtcttaaatttctctttctgttgttcatgctgctctataatttcctgtatcttctgttctaagccctgcttccatgatctaagcttctctttgtgttgtaattctaatattgcagcatctgccttagtttgatttgctagctttagtaaattatcctctagactttgcttccaaattttatctctatctccatgctgttctgatctgtgaattgtcaaattagttttcctagtgtctcttccagctcctgtctctaaccttcattctcctctttctgctacttattgggacctataaaatcctgaacctttagttttagtgttacttgtaatctcttttctaaggcaaggaannnnnnnnnnnnnnnnnnnnnnnnnnnnnnnnnnnnnnnnnnnnnnnnnnnnnnnnnnnnnnnnnnnnnnnnnnnnnnnnnnnnnnnnnnnnnnnnnnnnnnnnnnnnnnnnnnnnnnnnnnnnnnnnnnnnnnnnnnnnnnnnnnnnnnnnnnnnnnatatgggggggttggaggacagtgaccttttatctcaggttagttgagctctaatcaatatgctgggcaccaattttttttcagtaaatctccaacccagataagccctggtaaagaaaacacaactcaattaatatgaatacaagctgcatgcctagattgggcagatctaccactacactactatattccccatctttgagatcccttatcacttgtggtttctccaggccatgtacttctgctctgctttccttccacctcctcctgctcctctgtcctcttcccttccctttttctcccccaaacttttcagctccaccttcccttctactgcccaatcactgtctctaacttttattttacaaattaagctgggaggaaggttcacaagaagtcacctgtgtaagtaattcatgactcatgaattcaacccctcctgggaaagcagaattagcatcaaaatataagcaacatcagggctatcctgtttggggaatagatgttaataattgtaatgtcctcttggaggatttttcctttggtgagtatggagtttccttctctatctcttctgattaattttgattgaagtctattttgtcggatactaaaatggctacaagagtttataatagcttgcttcacaggtccatttgcttggaatatcttttcccatttttttacaggagatgatgtctatatttgattttaagatatatatcttggttgcagcagaaggatggatcctgttttcacatccattctgttagtctgtattttttattagaaaattgagaccactaatgttgagagatattaatgaacagtgtttgtttattccatttatattgttgttgtggtgtgtgttgcccttcttttgatttgctgttcaaggattatttattccttgtgttttcttataattaacctctttaggttggaattttccttctagcactttctgtagggctggagtagtagatactgcttaatttgggtttcttttcttttcttttcttttttttcatagaatgcctttcttttctccatctatggtgattagagttttgctgggtacggtagtctcagctggcatctgcagtcttgcacaatttgtagaacatcttacctgtggccttttggcttttagaatttccattgggaagtcaaatgttattgtaattgctttataatgctgtttgttctttgtccctatcagattttaatatttttctttgtttatcacatttagttgtttgattattatgtggtaaggggactttcgtttttggtccagtctatttggtgttctgtatgtttcttgtagctaataggtttctctgccaatatactacaccaattctagccaaatcaagagtatgaagacaggtttattgagtggtagctctcaggtgagttcactgatctcatgggtagaagtcaatggagtctcatgctggggctaaagcaaaggggtttgtgagcaaaggagtgagctgatgacatgtgagctaggaggtgggattgtgcctagcgtgatttataaacagaagctgagcccctgggcaggcattcatgagtgggttcctgtaaacatgaaggcagggagagatgacatgttagccctgagtttactccctgcagtagggctggagaggaaaaagagctaatgggctttcttagcttgtgcaggggatgagcagggtttccaaacaaacagaaccttcataaccatactagactttaatttagaaatgtttttctttaattttgttgaaaatattttctgggcttttaacctgagtttcttcttcctctattccaattatgtctagattttttaaaatagtgtcccaggtttcgtatatgttttgtgtcaatacatgtatgtatgtatgtatgtgtgtgtgtgtgtatatatatacacacacatatatatgcacacatatatacacacatatacatatatatgtatatatatatgtattagatttaacacttttttgacagaagtatccatttcttccactgtgtcttcagtgctcttcaatctctctagttctgttggtaaggcttgcctctgaggttcctgtttgagttttggaatttttcatttccagacgtctttcagtttgagttttctttattaataattctatttttagcctttgttttattcatttcctttcaccgtttgtgttttcatagatttcattaaagtatttgctcattttatctttgaggactgctaccatattcataaaggccattttaagctatttttcttatgtttaaactatgttgccaaaattaaagcctgttgtggtaggattgctgaattctagtggagatgtattatcctgaccgctcttgattatgatatcacactggtagttaggctcttggattttggaaaattgcaattctaggagctgatatctgatcttgtctttgttgggtgggtgtattgttccttgatttgtgttgccatctctggttctttgaaaaatgctgcggttgtacattgcttgatagaaaattcttctggaatcctaataagtgtgacttctggggattccatgtaaaatgtgtttctaagtattggaagctgacacttgagagcagagacgggtaaggagtgagatttgaggtctgtgtccacaggagagaggaaatagagtgttccagcaggagctgactagtctcatagggaggcagagagtgaggggagacagtcagagatggtctactgcagaactggacgtgagactggagattccacttggaagaacacaaaggaaagcaaaggtctgcacttgggcagagtcaggggaagctttctttaagatgactgactaccctaaagccttggttccataaaaacacaaacatggggactatttcacacggaactttgtgggaaattcagcttaggaagtgctgaggctttgttattatcaagcaaaggaaacaataagaaaaaggaacataagataaaaactaaagaaatctttgctagtaaaagataattaagaactcattctcacaaaggcaaatgaatattagagttgactgcccatagtagaaaataaatatataggaagtgtatcagatgctcaagggatttctctagctcgagaactccataggcaacctaaggtcagtacaacatctctagatacttttcagagtctctccttttcagatcataagcacatgtcttccattctcatgtttgcctcttaactgaagatagtttaagttccaacaatcgtgttctgtatgactaccaagtaacaagaaaggcaaattttcttttttgctaaatccatcattctagctaagcttctttcttggaagttcttcacaatcgttccatgtatttatcaccagcatggttatttcacattggaacgataatagagcacctaaaataaaagtgtagatataatgatttaagaaagttgagtcctgataggaagataaatggtacaattaaaatttgctaagaactgtctatgaaaagggagtggagacacatcatggaaggaagaagattcagttatttggctttttaaaatatatgaatttttggtagattggaacaaaaatgtaaaatattaattttttaaaataattaaaggtttatttatttatttatttaatatatgtaagtacactgtagctgtcttcagacacaccagaagagggcatcagatctcattatggatggttgtgtgccaccatgtggttgctgggatttgaattcaggacttttggaagaacagtcagtgcttttaaccgctgagccatctctccagcccgtaaaatattaattaagcaaagaaaactccataggtattctcaaattgatgcaaaaccatacacatcatgaactcacattttatttctattaaagcctcaggcaatgatacaaagaagtgttagattataagctaaattttacttgagcttaattttaagaataatgaaaacctagaatgttcttatcctcttgtttagatattgtagtaacagtgagcctggctatccacagcatgtttgcaggcagtatttctcccatgtatccattaaatatcccaggaacccctagaagttgatactttaggatctcatcctaagagaagatactgaagctctgacagtaaagttcaatgctggctcttgtttcaggcaaggaccatccaagccagaagtcctgtccattcaatggcctggaaagcgatccagccgccgagtccagagacacaatagtttctcccccaacagcccgcagttcaatgtcagcagtccaggtaagcacacattgatgttcttcctcaccatgtggatagatgaaaaactgaagcctggaaatcttctattataccacatgtatatgaaactgaagaggggccaagtataggaagtgaggacgtaacctcttgcccatcgcatcaaatcccagcagatgtgcctggatagctcacagagggatgaacacaacagaaagcattcaaacagccaattcccaagaaacttgcactggatgtagtgcacgctaactctgaacttgctcctccaccccatacctcctccaggtcccctgcagtgtgtattataaactaatctagaaaaatcttaggactagccatagttggggcttctgaagattgtgaggccatgtaatgtttgttgggctaattctgacttggtagtggtttgagtattacacttttactgtaacatttacagttattgttaaaatcattctgaaataggcaagctcatgtttgcccaatattcaagtaattattgtaaatatgaatgtacacaaacacatcttcacttgaaaacatcagtttaacattttaacactaaaacttcaatacctgacatttcaagcacattctacttgattggaagatgtcaaagtatacttttgaacagtcgtattctaccccaaatctgggtgtgttaccacattcttccagctcactcaggaaaagaaaaaaaaaaagaaacaaaacaaaacaaaaacagtgctcagaatataaagtgatttgtccatgatcacatggactattagctcatttttattgtcaaagaaacccaaaatctcaagagttacaactacaaatccttttttcttcctcatgagttgtttctcatgagtatggttggctgaggtttggatactatcagtcaggttctaggctaagttctgtgctcctagtgtagcatttttgcctcctggtaggtgtcagaaatacaagcagccagaccaaaattatataaatacatttaaactacaatgttagccttgccacctaattttacactggccaaacaagtcacatgccaaccctataataatagagaaccctaataatcatagagaagaaaactatgcccctcaatgaatggagcaagagctgaacaaaattgtccctgtaagacttacataggaactgtacagaaagaaagagcaaagagtcaccaaccagactacagacagctttcatggctataaaatggcagtgctggattccctaggccaaacagagattataggatttccatttttaaccatttagaagggacagagccagtgagatgcctccaggagtaaatatgtttaccaagcctggtaccctgaacttgatcaccaaaatcaacatgatagaaaatcaaaccccatagctaaaccaactccctcagattgtcagcttacttttacatacatgccttgagatacatgaatctcccctgtgcatgcatgcatgcatgcatgtgcttacacatacataaacatgtgcgtgtgtgcacacacactagatagatagatagatagatagatagatagatagatagatagatagatagatagataaatagatagatagattgatacatacatacatacatacatacatacatacatacatacatatatatgattattttttagaaaaaaaatctaaaaattagttacggccatgccatcctgaatgtatcgtatgcatcacttttaatcttagaagctaagtaggatgaggtcttgttagtgtttgggtggaaaggcataggtgaagctatagttcccagggacttttggttttacttaagtctttgtgggcaacaactcggcttagaaatatgctacttaaattataaattcaaaagtaaacatacctatagagttgcagaccctttcagctccttgggtgctttctctagtttctccattgggggccctgtgttccatcttatagatgactgtgagcattcacttctgtatttgccaggcattggcatagcctcatgcgagacagctataagaaggtcccttcagcaaaatcttgaactaaccagtacccccagagctcgtgtctctagctacatatgtatcagaagatggcctaatcggccatcagtggaaagagagaccccttggtcttgcaaactttatatgcctcagtacaggggaacgccagggccaaaaagggggagtgggtgggtaggggagcaaggtggaaggaaggtataaggaactttcacgatagcatttgaaatgtatataaagaaaatatctaataaaaataaataaataaataaattttttaaagtaaacatactgtattttttatctaaagtgttttctttaaacccatttctttttctttttttaaataaatattttttaattgtgatgagaaattaataaatccttcctcatacctttctaatgccagtgaaacaaattgactataacatagcaaagatgttcattaaacccatttctaataccactttttgatgcagtgccaatgtttttttgtttgtttcttttactttataacttgttagtgcattcttcctcccaaaagacagatacaaaagtacatttggatagaaatcactgtgctttacttttgcagtcttaaatattaatgggatttactgtgctacttctgtatgagaatagcacctctttatgatttaagtcttgaatccacttctttctatgctaaagcaagacttggagctgtgaattcaatattgctctcatttgaaggaagagtaactaatataacttcaacaatatacttttgagacatcttgaatgagctgtcaacagcacataagaagctagaatgtagactatgaagagtgagctagcggacaacagaagcagcacagcttctggaacagaccaggtttcgggttccagacatccgggcaccttccctgccagaggataggtgcccgcccaggagggctctaatgctggagcaggtgagggagccatcttgggtcccaggtccgtcagagaccggtctgcacaggtcagctcgctgaatgcagaagggaaacagcttctgggacagatcctgtttccagctccagacatctgagcaccttccctgccagagaagaggtgtccaaactgggagggctctgaccaccacagtaggtgagagagccatcttatgtccctggtccctcagagaccagtctgtgcaggtgagcttgcaggctgcagaggcaacacatcatctgggacaggccctgttttgggccttaatcttcagccaggaggcaggtctgaacgccacacctctgtgcaccctccctgcaagaggagagcttgcctgcagagagtactctgacaaatgagactaaggacagagctggactcccaggactgctgacagaggctaacagaatcacaggagaaacaagctccaacaagagaccactataacaactaactccagagattaccagatggtgaaaggcaaacgtaagaatcttactaacagaaaccaagaccactcaccatcatcagaacccagcattcctacctcagccagtcctggataccccaacacacccgaaaagcaagactcagatttaaaatcatatctcatgatgcaggtagagtacatcaagaagggcattaataactcacttaaagaaatacaagagaacagtgctaaagaggtagaagcacttaaagaagaaacacaaaaatcccttaagagctacaggaaaacacaatgaaacaggtgatggaattgaacaaaaccatccaagacctaaaaagggaagtagaaacaataaagaaaacccaaagtgaggcaacgctggagatggaaaacctaggaaagaaatctggaactatagatgcgagcatcagcaacagaatacaagagatggaagacagaatctcaggtgccaaagatcccatagagaacatgggcacaacaatcaaagaaaatgcaaaatgcaaaaagatcctaacttaaaacatccaggaaatccaggacaaaatgagaagaccaaacctacggataataggagtagatgagactgaagattttcaacttaaaggaccagcaaatatctgcaacacaattatagaagaaaacttcccaaacctaaagaaagagatacccatgaacatacaagaagcctacagaactccaaatagactggaccagaaaagaaattcctcccgacacataatgatcacaacaaatgcactaaatgaagagagaatattaaaagcagtaagggataaaggacaagtaacatataaaggcaggcctattagaattacaccagacttctcaccagagactatgaaagccagaagatcctggacagatgttatacagacactaagagaacacaaatgccagcccaggctgctatacccaacaaaactctcaattaccatagatggagacaccaaagtattccatgataaaaccaaattcacaaaatactcttacacacgctcgtgaccggccaggaagaacgcaacaaaccggaatcttctgcggcaaaagctttattgcttacatcttcaggagcaagagagcaagagagagaatggcgaaatcccgtcccttttaaggagaattatcctctgcctaggacgtgtcactccctgattggctgcagcccatcagccgagttgtcttcacggggaaggcagagcacatggagtggagaactacccttggcacatgcgcagattatttgtttaccacttagaacacaggatgtcagcgccatcttgtaatggcgaatgtgagggcggctccccacaaaatacctttccatgaatctagcccttcaaaggataataatgggaaaacaccaacacaaggatggaaactacaccctagaaaaagcaagaaagtaatccttcagcaaacctaaaagaaaacagctgcaagaacaaaatcccagctttaacaactaaaataccaggaaacaacaattccttttctttaatttctcttaacatcaatggactcaattcctcaataaaaagacatagactaataaactggctacacaaacaggacccaacattttgctgctacaggaaacccacctcagggaaaaagacagagtgaaaggctgaaaaacaattttccaagcaaatggtccgaagaaacaagctagagtagccattctaatatggaataaaattgacttccaacccaaagttatcaaaaaagacaaggaggtgtacttcatactcatcaaaggtaaaaatctaccaagatgaactctcaattctgaatatctatggtccaaatacaagggcggccacattcattaaagaaactttagtaaagctcaaagcacacattgcacctcacacaataatagtgggagacttcaatacatgactctcaccaatggacaaatccaggaaacagaaactaaacagaaaacatggacactaagagaagttatgaaacaaatggatttaatagatatctacagaacattttatcctaaaacaaaagcactacatggtacctcctttaaaattgaccatacaattggtcacaaaagaggactcaacagatacaaaaatattgaaattatcccatgcatcctatctgatcaccatggactaaggctgatcttcaataacaacataaataatagaaagccaacattcatgtggaaactgaacaacactctactcaatgattcctaggtcagggatgaaataaagaaagaaattaaagatgttttagagtttaatgaaaatgaagccacaacatacccaaacttatgggacacaatgaaggcagtcctaagaggaaaactcatagctctgagtgcctccaaaaagaaactagagagagcatacactagcagcctgatagcacagctagaagctctagaactaaaggaagtaaattcacccaagaggagtagactgcaggaaataataaaactcagaggcaaaatcaaccaagtggaaacaaaaagaactattcaaagaatcaaccaaaccaggagctggttctttgacaagatagataaacccttagccagactaactagagggcacagggacattatcctaattaacaaaatcaaaaatgaaaaaggagacataacaacagaacctgaggaaatccaaaacatcatcagatcgtactacaaaagactccacttaacaaatctagaaaacctggttgaaatggacaacttcctagacaaataccaggaaccaaagttaaatcaggatcagattaacgatctaaatagtcccatttcccctaaagaaatagaagcagtcatcaatagtctcccaaccaaaataagcccaggaccagatgggtttagtgcagagatttatcagatcttcaaagaagacataattcaaactcttctcaaacaattccacaaaatagaaacagaaggtactctaccgaattcattctatgaagccacaattactctgatacctaaaccaaacaaagatccaacaaagaaagagaacttcagaccaatttcccttatgaatatcgatgcaaaaatactcaataaaatcctctcgaatccaagaacccatcaaaacgatcatccatcatgaccaagtaggcttcatcccagggatgcagggatggtttaatatacggaaagccatcaacataatccactatacaacaaactcaatgcaaaaaccacatgttcatctcattagatgctgagaaagcatttgacaaaatccaacaccccttcatgataaaagtcttggaaagatcaggattcaaggcccatacttaaacataataaaagcaatctacagcaaaccagtagccaacatcaaactaaatgaagagaaactcaaagcaatcccactaaaatcagggactggacaagactgcccactttctccctacctattcaatatagtacttgaagttctagcaagagcaattcgacaacaaaaggagatcaaggggatacaaattggcaaggaagaagtcaaactatcactatttgcagatgatatgatagtatatataagtgaccccaaaaaatccagcagagaactcccaaatctgataaacagcttcagtgcagtagctggatataaagttaactcatacaaatcaatggcctttctctacacaaaggataaacaggataagaaagaaattagggaaacaacacccttcacaatagtcacaaataatataaaatactttggtgtgactctaaggaagtgaaaaatctgtatgatacgaacttcaagtctctgaagaaagaaattaaagaagatctcagaagatggaaagatatcccatgctaatggattgtcaggattaacatattaaaatggctaccctgccaaaagcaaactacagattcaatgcaatccccatcaaaattccaactcaattcttcactgagttagaaagggcaatttgcaaatttatctggaataacaaaaaacctaggagagcaaaaactattctcaacaataaaagaacctctggtggaatcaccatgccagacctaaagctgtactacagagcaattgtgattaaaaactgcatggtactggtacagtgacagacaggtagatcaatggaatacaattgaagacccagaaatgaacctatggtcacttgatctttgacaagggagctaaagtcatccagtggaaaaacgacagcattctcaacaaatggtactgacacacttttcagttatcatgtagacgaatgagaatggatccattcttatctccttgtacaaagctcaagtctaagtggatcaaagacctccacataaggccagagacactgaaattaatagaggagagtgtggggaaaagcctcgaagatatgggcacaggggaaaaaaattcctaaacagaacagaaatggcttgtgctgtaaggtcaagaattgacaaatatgacctcttaaaattgcaaagcttctgtaaggcaaaagacactgtcaataagacaaaatagccaccaacatattgggaaagaatttttatcaatcctaaatctgatagggaactaatatccaatatgtacaaagagctcaagaagctggactccagaaattcaaataaccctattaaaaaatggggtacagagctaaacaaagaattctcaactgaggagtaccgaatggatgagaagcacctgaaaaaatgttcaatatccttaatcatcagggaaatgcaaatcaaaacaaccttgagattccacctcacaccagtcagaatggctaagatcaaaaattcaggtgacagcagatgctggtgaggatgtggagaaagaagaacactcctccattgctgttgggattgcaagcttgtacaaccactctggaagtcggtctggcggttcctcagaaaattggacatggtactaccggaggatcctgcaatacctctcctgggcatatacccagaagatgttccaactagtaagaaagaaacatgctccactatgttcatagcagccttatttataatagccagaagctggaaagaacccagatgtccctcaacagaggaatggatacagaaaatgaggtacatttacacaatggagtactactcagctattaaaaacaatgaatttataaaattcttgggcaaatggatgtatctggaggatatcatcctgagtgatgtaacccaatcacaaaagaagtcattagatatgcactcactgataagtggatattagcctagaaacttagaacacccaagatacaaattgcaaaacacaagaaaatcaagaagagggaagaccaacatgtggatacttcattcctccttagaatagggaacaaaatacccatggaaggagttacagagacaaactttggagctaagacgaaaggatggactaaccagaggctacctcacccggggatccatcccataatcagccaccaaacccagacactattgcatatgccagcaagattttcgtgaagagaccctgatatagctgtctcatatgaggccatgtcagtgcctggcaaatacagaagtggatgctcacagtcacctattggattgaacacagggcctccaatggaggaggtagagaaagcacccaaggagctgaaggggtccacaaccctataggtggaacaacaatatgaactaaccagtacccccagaactcatgtctctagctgcatatgtagcagaagatggcctagtcagccatcattgggaagagaagccccttggtattgcaaactttatatgccccagtacaggggaatgccagggccaagaagtgggagtgggtgtgtaggggagcaaggtgggcggggaggttatagggaactttcaggatagcatttgaaatgtaaataaagaaaatatctaataaaaaaagaagctaggatgcccatttaaagtctcagaccattataacttcttttacctctttctataaaaatagttacaatgatattaaaagcagagtttatacaatgtttaaagtggaattttctttatagtccagagaatgatctataacagctatattttggatttcaaatgaatgagcttatcacgtaaattaccaaccaaagtaaaagaataaggagagagaagggagggggagagaagagacagagatgaaggtgcggagagggtaagcgagagagtattattaaaataagatcttaaaacctcctacagaaactgactgaggaagccctgtaaaggcagccagctgggtttgctcagggatcgccccagcagagtatccccctttggtgaggcttccaagaaaaagaacaaatagcaacctctaaagatgaggtcatcaggctggaaagctgaggcagtcaagagttcacaattgaactttctcttcatggatatgctgaagttctgtgtctgaagttctcgcttctctttttcactacaggcacttgtatatcatggggaaaacaataatagcacttgctggcaatgctttacctgctagcacctctctggggcataatgtgtttacacttgagttgttctgttattctagttcctccctgctgcaaagttagagagcctgctcatccccagtcaaggagccttggaggacactttgagacaaacatgcttggggctgaaatgaggagggagggcaatcctactgctaaagccacttctcagtgagctgaaacagcacatggcattttacctgtgtaacatatattacgtggtagcagacatgcagatctgtatctgtgtacatatatatctacatttatacatatttccatatgaagtaaatatgcatacaaaatccataggtagatagatagatagatagatagatagatagatagatagatagatagatagatagactaaatttcatatacataaatatagaatatagaacaggctctagtttgctaagccgtgactaaagggtccatgtattcccaggttagtcagtgggaaagggaacgccagctaccttgctataaccttgttaccttgtaataacactacttttgcatcacagctccaaatcaaaggactgattttatctgttcctgccttacagatgagtttagaatcaggactttctttcttttcccgaagaaaagtgtcttaccagattgtaaagaagggctcagcaaaatctgttctctcaagcgtcacagggcagtatggtacacagtactttaaaaaaaaaaaaagaaaagaaagacactttttaaaagagcaggaaaggcttgtaaatgaagcagtgatgcagcgatttctgagagttgggtacttagaaatcactcgtgggatatatttttggggatgtgtttaaaagtcggtggcactgcattcttccttcagggtggaaggataggtaaccaagcacttggcattcttaaaaatttaacgttctgcctttgtgatttcttgccaagcattgttagaagaagacaaccagtggatgacccagataaacagactccagaaattaattgatagactggaaaagaaggtaagttttctctctctttctctctctctctctccctccctctctctctctctctctctacctccctccctctctctcttttctctcccttcctccctccctcccttccttcctttccccctctctcctgatccagtttcctcacttcctgaatatccatccatggcttccccatggatagaatagtgttcaatgtctgactctgtggatgtctgattggtagctacaaggccttgttttctgattggttatttgattgcttgttaaaataaataggaaagctcaattacatttaaaataaggtccaggtctgctaattaaatgaactctctggattatgcttgaatgatgctaatcaatctcataaagatatacaagtgaagtcttgcaaatctttaatttagggaccagggttattctttgctcaacttctagagattaacatactaactgatagttttagtgttaagccttcctagtaggcaagaatatggtgaagacatctttggagctccattgtatgttcctaagtagtatatcatttttggtttggtttggtttggtttggtttggtttggtttggtttggtttggtttggtttggtttggtttggttttcgagacgtggtttctcaatgtagcccttgacttactttataggtcaggtcttacagctagcaccaggaagatgaaaactcgaggcctaaagatggacaaggttgctggaaacaatgttctctctgtacaagaatagccaagtcatagggaaccaaccttggatagctccagtctttcagctagtgcatcttagttgacattggtctcctactgtagcgagcgaacacatgaactatgaacatgtcacaagtcaactttcctctttccttttacgataactgaattgtcagctgagactaaaagaaaactagtgccatgaatattagttttcttatgttggaagtcctggaaatagataagggttcctgtgttaaataagtttagattcttttgtagaacaaatatctctttttgaagtggttttgaagttccaagaaaaactgtctcttcttgatatatgaaatgtgtacagtttttttttttctgaaatggtttaaactttagtaatacctttcttcctgttttaaatcaaagtattgtcacatccttttctttcctggacttttgtctctctctctctcctcctatgaaatggttttattgtaagagcagcatccaagagacttgctgaaagcctgggcctccggctgtgtggtgctcagcgtgagctgccttaacgagtggtggagcagtatgggttccgttttcttgtgtgacttattctgtactgtgctgaattaggtttccagagaaaactatccaattgccaagccgtggctaagtgcatgccatttcaccgctgactcccttgtttcctgtggttgttagccttgggtttgatctccctgttaaaaggaagtgtacctgaggcagagcatacatcaccccccccatctcctaagtatttgtgataatccttcctagcctataaactaaacataattccattcaaggagttggaggttaataatatttgtgattcctaccagtttttcaggtttggttctgtccctccttgccttcatgagtaatagtggataatgaatggaatgtgctgaggtttcatgctatgcttgaatctatacaaaataccttcagggccagaggtaggggagtggcttttggtgtaaatgttcaccatgcaaggatgagagcctcagttcaaatacccagagtcatgggtgccaggaaaactcatctggaacgccatcagtcactctttaattgggcagtggctacctactgtgtgcctagcagcatctggtgatagcagtccagaaatacttatacaggcaaatctatctggtctctaaaaagacacacaaaaatatgtgaaagaatctaagaaacaaaaagatcagatcacgaacttcagctgaactccagaaatcagcaatgctagtggatggaaaggttacatacttaaagaaagtggtctgagagagtctgtgtaaaggatgccacatcaaaactgggtgtgaaaaacatacactatagagtgcatgtgactgtacacacatgtgtgcacacacagacacagagagagacagagagacagagagagagacagagagagagagatttttattggatattgtctttatttacatttcaaatgttatcgcctttcctggttctcccaccctggaaaccccttaccccctccctcctccccctgcttctatgagtgtcttctcccacccactcaccgactcccgcctctccaacctggcattcccctgcactagggcatcaaaccttcacaggaccaagggcctctcttcccattgatgcccaacaaggccatctttgagagagaaaattttgagtttaaataaaaatctttattgtattttaacaaatattagtagtatttttcatttacttttcaattcaccaattttagtaaagaaaaacttgtgctggaatattaaaaaatatttacaatagacaaatatctataatgaccttccaaggaagggaaagatatgataacacaataaaggcagtctatctgttaagcttgtcatgctagctttattcctcctctgaatgcatttctagtctgcctccctccaatcttcgatggcatcaatgaggtgaacagaagtaacaacttggacatatcataaatacctccttagaattgacttttaattatgatacagtatctctttactagaacagctcaatttttaaaatgagaattggttcatctcctttcaaataacaaagttctttgggcttgatattagctatgaaacatagctaccatatggtcttatgctgattgattttgttatataattggcatcttttctttttctctgcctttacatcctctgactgaaggatctgaaacttgaacccctggaagaagaaattattgaagagaacactaaacctgtgagtgatttccatctcaaatttccagaaacactttgaagacaaaacttactttcctcaaaatctatacttcagtgataagttgaaacataactaacgaagagacacatttcacttcttctagatttaccatggcatttattatcacatgtatcacgtgttgcttccaataagaatgaaaatttcatggcacacagaaaacattaaaataaattcaccattagttactagttactaaactccgggaacacagcacatatagagattttcgaataatctcagcaattttccaaattagctcttttgctctttgcttaaaggtcttattcattttgcttggctaacatggatttgtggggactgaatgtttcacagaacgcaccagttgcccatgtgaatgaacttgtcacgtacaaggtgcaaaatggagtttttatacacatttgagatagtgagttattgcatcattgaatatgacgggcagagaacgataccattcagatgttatcataaaggcattttgtaaacaccactaggttgattgcggtaaagacctaatgaaaccttgtcatgtatatcaccgtaggtcaagcatttagtttaaatctgggggtctgtgaaatactaagagatcaaatcactggccttcaagatagccacatgggggtatactatcattaacctcatttcatagatgaacaaagtaaggtgcaaagagatttaagtttacagccgaactacataagtccaatactgaacttacactcacactcgacgtgctattaacactatcaatgcagtatctcttggttttcttgatgtaactaagcagcagattccgacaataatcacaccaggcaataggtctcacgtgggaggtttgttaaaaggaggggagaaggggacacagaggctgcctctaggaggagaaaaggaagaagggatagggggagggaaatgcgccgttttaattgggcagcgaggcacatgctcaggaggatatgcgacaggagagccaatgggaatgtgtagagtctgggaagctagtggtgagatgtcttatcaccaagtccctcgaggctggccaggaatgtgcctgactgctaacagtgtcacggggtccccctggactggcctaggaggtgcctgaatactagcatttcgcaccaatgcagtagaggtgcttactgctagcaaggctgcggattagcgggtggtttttgtttgtttgtttgtttgttcgtgaaatttttccatcatgagaatcgattagagtattcagcaggcttattcaaacatagaaaatctggacattattgtatctaactttctgagcactgaaccattacattatgataaatccaagatgtgttatctatctatctacctatctatctacctacctatctatctatctatctatctatctatctatctatctatctatctatcctaaaacccattttcccccatcattacaaagtaagagaagtaagatattacagacaaaatctttaatttactgctctagttggtagtaagaacatgggaaagaagggctaaaactgaagcagactaaagtctcatccaaaagccaagtatattcagagcatcaagcaatttatatactctgaaaaatatcagagtcaaatgagtaaagtgtgcaatcacaagaacaagcttcaaggggcaaaaacatgttttttccatagagacataagtataaagacagctgaagtaagctcactcctgcctgctatacagaggggagaagaaaagcacatccaagaattgttctgtgatttggaaaaactgaggtctcgagactcttgtgctgttttcttgtttgttgttgttgtttacaagcactcaaaattctcagatgatttcattcttgagactatatattcaccctcgattttatgatgcaagcagcaccatttccatcttatgtatcaaaagttaagacgaacaaatgacttgtttaaggacccatagccagtaagagtgaagccaattcaaaagatacttatactacttgctcttgagaaataaagaagagagggcaagacagcagaaaccaaggaaaacttcacacctgtccagtactagagttttagggggtaccgcaaatctagaatgagtatagatttcattagagaaaattcactaacagtcacttgctaaaagcaaaagtatccttcattataatcagcccaccaaaaacaaaaagctgaaggaccggaccatctatttatcagtctgatgaaaagggccagcaatacacttgtaaatactatttgtcagaaagcagatgggaaagaaacagttctttaaattagaatcagtaatttgataaaggatattatagaaaagtatacatcttcataaaaaatgatctaatatacgggaacaaaaactaaaagccaaaggagatagcaaacaccgaaaacaaaaataaaaaaagtaaaaaaataaagccttctaaatctacatgttcaaaactcacatgaatgcacagagattgaagcagcattcacagggcctgcaccagtctgtaccaggttctccttgcttatactatggcttccagttcaacattttaaatggaatttctaagaatgtgaataagcaggtctctggtttgttccttcctttggacacttttccttctgtttgtcttgtccaactccaatatgatagtttttttgttttatcttattacattttattttgtcatattttattattatcatctcttagaaaattgttttctactgagagacagaaagggggtgaattcagatgggaaaggaggtggggaggaactggaaggagtggaggggaactaatcaggagatgttatgtgatttataaaagaaaaactatgttcagtaaaaggaaaaaaaagaaaggtggaaataaagatgtagttacaatgtaaaagaagagacttctgaggacatacaccaggaacaattgtgatgagtaggtcagctgaataggcaacagatgtggattctaagtgtcacctaagtaaccataacttgaaacaatagccacaactttatgggtagggaatttaggtgggatcagtggcatgggtcttgggactccgtagcttcgtatagatgtctaaggccagtggcgcatcagcttcgctggtattggacaagccattcacacatacagaggttcagagctgctccttgtgggcttagttcacagtataccatctatttttatgcagtaagttgttttgaaattggaccttccccatttgtttacgtagctctgcagttcttaacctataggtcgtcacccctgtgcaggatcacctatcaaatatctacgttatgatttataacaggagcaaaatttcagttatgaagttgcaatgaaataatcctatggttgaaggtcaccacaacatgaggaactgtattaaaggaccacagcattagaaaggctgagaaccgctgctctcgtctgtagctgtggtcacacaagatcacattcgagtagttgcaacaggaacacatgcataaagcctgaaatattcgctgtgcgtttacagaaaacctttacaggtcttgttcacatggcaatctcagggacaagagagaggaaaaagatgaaactaatggttccttgcatccttatttgacattgtaatgcagccacctctacagcattcagttagccaaagccagttagaaagctcaaccaggtccgtgatgagggaaacaaaacctggaaactttgtgggaagcaaaaaaagttacattccaggggcctgtagttctggagtagtgaaggtctttggccgattccagtgttcatcctactgcatcatgtaagcactgctttcaaacagaaagtattctagagaaacaggtgcatgcaggtctagagttcacacctatagctaagatagcccctgagagatgactgacacagcaagacttgcagatgtctatgaaggaacatatccatctccatgtagtcggaaataattctattgcattttaacattaaagcaatttcctgggagagccatacaaagagctgagagtccatccaaaatcttgggagatagtcacaggtttgtttcctctctttcttgatctctgacccagaaagttggattgttgaactcaagatggctattacaggaaaaatggatcaattccataagattgttccaatactattttttaaatgttgtttttccagtataaagtccacacagtgattcagggcccatattctttcatcccttgttcccaagataggttttcctcctaccaacagaaaaaagaaataaacaaacaaaacgaaaaatatgatggctcatatccttcatagctttaagctcaaatgtggtacctaggaattctgtttgaatctttcaattaaaaaaaaaaaggcaacaagtgattgtacctaagtgcaggggaaggtgttactgaaagtctcagagtctgcctggaaaacaaggaatgagcactgagggtcgaccatctaatctgcatgggcacctcatttagaacaacatatgcagacctgtgagcgcccgactcgccagcaagaacgacgccacaataggatccttctgcacacgtttattgggagagcattgactgcataggcgaaagaccctgagcccagaaatggtgctgcttatataggcctaggagtgacgtgtccatacctgattggttatgctaccagtacctcattaacatgcatcgggccaggcagtgactcggcaaaaaaactcttatgcacatgcgcacattggttgtttacccataatcatgggtggtggccagtggtagccagcgccatcttgtaatggcgtttgcggcttcccacacagacctctcttacaagggatcctccaaagctctctatagttactgcctggtttaaatatgcttagctcatgggaagtggcaccattaggaggtgtggccttgttggagtagatgtggccttataggaggaagggtgccactgtgtagggcaagccttaagggttgtttttgtttttgtttttgttttgtttggaaaatgcccagtgtggaagacatcctcctctgcttgcctgcagaagacagtctcctgctggctaccttcgaatcaagatatggaactctcagctccttctccagcatcatgtctgcctgcaggttgccatgcttcttgctatgatgatagtggactgaacctctgaaactctaagctagcccaaattaaatatttgcctttaaaagagttgccttggtcatagtgtctcttcacagcaataaaactctaattatgacaatgccttagctcacaatctgagatctatgcatattattaagtcctctttgttaggaattgttctatggaggtctgacaaacatgagctgtagataaagtgaactaaaaggaaatagagagacagaaagacaaagacagaaaggcagagatcaaactgggccataaaggcataaatggggtgggtggatgagaagcacgcgtccttcactgcttgattgcaacaatgaattcaagctgagagacacctttcaactaggaaattctatgattagacactgagtctcagttcctggaatagccttgcagcccaattgtttctgtgaaaaatgttttcctggatcattaacctctgtgatcatctgtaaaagccaactgaagagcatccccttcctggggaactgggctggaatatactattcatagcctgttgagtgttcctatattcttgtccacaatgtattgtcaaatgtagttctaacagcaaaacagctgaagagtttaataagtcattgtcaatgcaatgctgtttctcaagaatctgttagacttcttaacaacttatatatagttaacttcatgtgtgcactagtatcattagtcttattattttgctaagtcatttaaagacaagaagtggtgtgtgtgtgtgtgtgtgtgtgtgtgtgtgtgtgtgtgtgcatgtggcactggggattgagctaggatttgtgcatgctaggccagtgctctactatgaaacatagccctagaagtcagtctttatccatcactgcaactcagaactcagcatgtagtatttactaacataaaattaaaaagcatatgttggtatgctagttactgctgggaagacacactatgacctagtcaacttttataaaagaaagcatttaattgggggcttgcttacagtttcagagtcttattccattatcatcatggcggggagactggctgcatgcatcgcagcatacgtggtgctgaagcagtagctgagaactatgtcctgatctgcatgtcagtcaagagggtggggggagaaggagagaggcagggaggggcgaggctgattggtcaaagctcttccccagtgacatacttcctccaacaatgtcacacactatttcagtaaagacacattttctaaccctaattctgtcaaagaggaccacttcccttggtgacgttgtatgagcctaggggcaattcttattcaaaccaccacaagtatagtttctacaatgcaatcagtgtttgacaaataatagctatttaacaagcactgagaaattgaatggaatagggaacagaagatcaggggttgaactgtagtctctatgctacatgattatcagtattggacaagttttgcttgtattccatataattctggtgagttgtcttttaaatttgatcttgcatttttgtgaggctatgttcatactttctgaatttttctctcaatcctgagacctatacttccatgaaaggcacacaggcagagctctagggaagtctttaaactgaaattgttataatggtaatgagatttgttggggaaagcagttagtacccaacccattgtgaactattaaatgggtgtatttagcaaaattttttgttgctgtggcaaaatatttgacaaaagcaacttaaggaatagtaagaaagaccttactgtttagttggcctttgaaggtatactgcaccatagcagagaagtaagcagcaggacgtggaggtggctggttatattgtgtccacatcaggaagcagagactaaatgttggtgctcagcttgctttcaccttattcagaacaggaccacagctcagagaatgatgcccactacagttaagctaagtcattccagctaagttaacccaatacagaaactccttcactgaccgtttgtctcttaggtgattctagatctggtcaagttattggtatcaaacatcacaaagggttacggcattctgaatagcacatgttgtaaatgggcaaaatatgatagcctattgaggtttggtctcttgctgtatactataatgttaaatactggccctcaaggtctggtggctctcaggaacaaggagatcctcacataaaccaagtgatgctgtgtaactgttgtagcccctgaattactgatgctatctctctgtggttaattgccctgcttcttggaagcctcatcaaagagactccaatgttgtagacagtttgcctctgcatattttcccacagaagccctgccccttctgtggcaagcacagtatgcaggcagctggtttctgcactgtgtccccctgcagcaaacccagggctccctccctgtctctagccactctgaggaaacccagcccaggctaggatgacactgcccataaaccccccttaataaaacacccagcggagccagatgctagcttgagctggcctccctgcctctgtgaatctagccctccctctgagagctctccaggtgcttgtctttgagacctttagagaaataaattcaaagaagattaaggccccacgtttaaatcatggagaaaaggtaatcagaggtcacagatagttaatgcccagccataaaattagtccctgataaccccacaacagacaccgatttatccccctcccagcttcagttctgtcccaccaaatgattacagccctccactccccttttcccagagaattcaggggattcctaactatactgtatataaacccaatgttttacagactcagcatcgcatgcctgcatttaccctgtgagtgtggggcatgtgatctaagtcaagacttgaaacactaaaaagacttttgcaagttgcagttgaattcacaattcttgggctcagtctgggtttcccatggactcagggcataacataaccttgctccccaagttatccctgattggtcaataaagatgcctacagcccataactggacagaagagaagtaggtaggacttcagttcccaggcctggagtctgaggcaggaccactctgactgaggaagagaaggtggaaagagaagaagatgccatgtggtaagggatcctaagaactgtccatgagggctggccagttggaataagtagcccaagccgaacatggcaagtcatatcttgggtttatttacagggaagtagacaaaatagccatggagggttaaaagctgcccagcactagtgccgttaaagcttattgtaaatatgagttttgtgtcttttatgtgggaactgaattatctaaggcagattagaaaccccccaattaatattaatatttgccacaataccttttaaatcactggtgaagcattagaaatgcatcagtaagctcacattcttaaaaagcaaatttgtagtaaccgcccattatctggtgtcacaaaatatccaagaaactgagctatgcagagacccatagaagttctctttaaaacttagcagctttggggcagtggcaacgactgccccatcaaatgcacttcgggaagttttaagatgctggtgcctatgttctgctacctctgccccacagagaggtgatgctgaaatctcctgggtgattctaattggctgtcttgctttgaaagaggatctgtctctcgcaaagggcactttgtttagcttccgttgctacatagtttcaggcttctgtatcacttcgggtagggaatagttgcatctttcccggttaagtttctggctggcagtcctgtgggtgcctgtgagacaataacctccctttcctcctcagcacatcatgcttgtgcagcgccagatgtctgtgacagaagaggatctggaagaattccagcttgctctgaagcactatgtggagagtgcttcagctcaaagtggatgcctgcggtgagtgctcatatgcaagccagcccctcccccactgccagcctttcacccttggcaaaagtgggaggtttgatgggggtggggggaggttccagagcattcttcagtatgaggttttagctagagcaataagacaattaaaggagatcaaggggatacaaattggagaagaagaactcaaaagtatcactagttgcagataatatgatagcgtatacacaagtgaccccaaaacttccaccagagaaaaattatcaagctgataaacaccttctgtaaagtggccggacacaaaattaactcagaaaaaccagtagccttcctttatataggcattttcaaatcctcctgttaaattctgcggagccatccagccatctaggttatgacatttgcagagtttagcaggatattttgtttgatccttgaaccagcgttgatttaatcatttggcacaccgagggaaataaaatggaaataaactgtgaatgaggaaggtttcaaatagatcgaaatttcccccttctgcacacagcaaccagcactcgttgaaaatcatctttgtagagaaggctttcactcatgggggtctggctttgattgccctgtggactaatgatcatttctgccattgtggaaatagaagggctctccaaaattatgctctcagaccatgattatttcacagaagcagcggcagcatttattttctctcttcacttcatagcttcctctcagctgttatgtaaagagtaatagaacatgctaaactgcatctgtagtttcttgatatgactggtcccgtaaatcagtatgtgcatcattttccacaaacaatggtagaattcctgccatgggaactctacagtgcccctccaaggcatatcctgtcgaatgctagctctttgtctagacacggaatcccatatacacggtcatctgtccataatccagcagtatgtgttgcttcttaacatgcctcagacctggccaggctgctccttaaatatccactcagctgctctctcatgctgtcagacatccacagcacaggcccaaactcacctgttttcagaaaacttccacaacatataccccttcctgtgaaattatttcaactgcattccctaatggtctttaaacattagcagatgtgtgtttgtgtgatgtacaactgtcttcatagaaacacatgtattatgtctgtgttctgctcttcttcctggtggttaattaattttttatttatggtgaaacctacttatcaggtcttgggaaaaaagctagaaggaaacgggaattaaagccagggatacacagccttgtgtcttgggcaatctcactgactgcaaacctcaactttcatcatcaagaacctcatgaaggcagacatgctcacaccggcctgtggtcccagctccttgagacaggaagataacgcaatgaggcattgccgaagtgacagaatgagttcaagtccaacctgggcaattttagtgagactttctctcaaacacagaaagaattatgaatgtactacagaggtagaacttgactagcatgtattagcctttggattcaatccttagtacacacacacacacacacacacacacacacacacacacagtctcatgaaatgtttatatgtaacgtttatgtgtgaactacccaacagtatcttccatccactgaggaatgaaatgtgagctgcagtcaccaatgctttcttcctggctgctctcccatctctgcagtatgagcatcactaactcctcacaacttcccagtgtggcctctgtaacagacactaggaaaggctgcacttccttgattgctattctactttgtgtcagggtcataaaagcacaaataaaagcattttactcttggaagaattagagatttgccaaggcaggggtgtatgtagtttttcaaagcctactcatttaaaaataaaactgcttcaaaaatacagaaaggcacctatgcaattgaagaaggttgaactcagtaaatgctttttgaactgacaaagatagaaagaagaaaagtctatgccaaattcccatgctggttagatgttttatattcattaaaaaggtacaaaagttttcaagattctgaaacactattttcaaatgctgtggaacctgggtgcaaatagccccagaagagaaggaacctgctgtgggtgggtcagagagttagaaaatctgtgatgcttggtgcaaaccatgcggaatcaggaagaactgtccctgctgtgcatggaggcgaggagaggagagaatccatttcctgaaggatagacgtgcagccttgccttttccttcaaacaccgctgtgtttcttagtggacttcatgcacttcatgcagattctgcagctaatttcgtttgcaggggtcgtcaggatgtatacagatgtaatgagtgtcagaaaacgaccacacgggtggaacacctgtggaagagacattgcccatttaattcagttttttcagatgtataagtgaatcagttatgttctctatgtgttgttgaatcatcaaatgccactaatgtcagccattgggatcctgtgtaccctccacagctgcctagtgctgagtcggtgaagcgctatgaattagcaaggattcatctcccatagtgcttagccaagcctcaccacacaagacgaagagtgctgccatggggtgaagccttagaagattagcaattttgcatcaattttcttatttagttttcacgggaatcattacaggcatatattgcacccagcttagacaaaaaaaaaaaaaaaacaacagggctctggtgcattaaaaaacttgctcaagattcactcaaaactgcgtgtttaatctttctcatctgtacttaaaaatagttgaattatctttgtgactaactgggggttgagtacaaacacaagatccttcaagttccagtaatatcagtaataatcttgttagactcaggcaactgaattagaacttgttctgagtattcaccaagaaagtagaagtccgaggacagacagaggctgggccaattgggtctttaaagactggtgagggctaacaaggtggctcagggtgtgaaggtgcttgccatcaagcccaatggcctgagttcaatgagatctatgtgatgaaagaagagaactgacttccacagcttatctctgacttccgcacacccatcctgtatgcacgctggtacacacacacacacacacacacacacacacacacacacacacttggagaaaaactcaggcagatcattcatgtgagttgctatataatgatatatcattatatgctgcgcactttctgtgcaattacaaatgttcagcagattttgtaagagagcagcagtgggataaatggatagacaatgtgctcttagaatagtcctcaacacgagacaggaaatagctcctgccttcaaatgcttcttatgatcaaacattggaaacagaatccctactcattaaggtagtgggcaaatcaaatcatattcttgtcctaaaattcgctagtttttgtttttgtttttgtttttgttttgtttttttcccattggagctaagtgatctctgaggctctcagctgcaaaattcctttggatgtggtcatatttccaatgccaggggcctaggaaccatgtctggattacatgccaagactcgatcttgagatacccttaagaactaatggggtgcactgaagtattattaatcactaatctgtaaggataagataaactatggtaactaaacccagacctctgtttgtagaaatgtggggtgcctctcctgttacttctttttcccactagtttggccctgtgggttaagcagggcaggcactcagagaagaaagaaagccaagagtaagagggcctcctctccattcctcatacaaccatttcacagaggggtaaactgagattgagtaacgggttaaaggtggcacacttgatgagaggtagttctgttaagacattctttaccccatcaccctataatatccttcctacctaatcctcagtctttcacaagcttgggtattgtgctaatgtgaatttcactgggagggcaaggctgagaatcaaacacctgctacactagtgctctaccaatgacatatgtcttcagtgcttgcttatttgagggataccacaccagctagccaaggctagactccaacttaagatcctcctgcatctgtctttcaaatgctggaattactaagtttataggcctttctgtgctagtccagaaaatgtaatatttttatagcacaattactgggcttttaatataatgagtaatatcaataattagtttgcaagaggcaattaatgatgacctgaaatattagggtggatgttttaatctttatcctaaaaaagtagagttgaaatttgcccgatatactattaggttctatttgagcattagggacaccttcaagacactgaataagctatcagttctcgtcccagataaacatatataagcacagtagttttcaggccactgcagaggcttatgggaaaagtcacaaagcttaccgtgaactcctggggtcagaaaattacaaactctctgatgtactaaactattaccatatagcaaacacttattcagaaaaatcttaagttgaactggcaacattagcacatcatacccaagggaccaaattatattttaaaaaaaaaacagtattacaagaataagggaaagaaaatatcttttaagcatactccacactgccatgagcaggatcttttaaaactaaaatagatttcaattccgttcgtgaagttactgccacctggtggtcacaaataggtaaatcctaaatctgcattaatttcatcggtagagtcttaaatatactttgaaacattagactaagaaagatgtcattgagttttacatgcatctcaggtctgtttcttcttacacaagctcatgaccctcatggccacgtccctctgtcgcgctgttctgatgttgatgtggatcgtcctcatctgtgttcttgcttgtttaacttttctctaggctttatatgacagctgccctctattacactctacacggccatgagcaggacagttttaaaaacgaagaatttttagtaaattttggcatgagagatgtttagtaacattttcaaatgggggactgtaaagatgctcagtggatcactagctgctcttctagaggactctggtgaatatttgaaatattcacgtggtggctcacaactcttaccctcatttcagggaaatatgatatccttttctgacctccatgggcaccaggaatgaaaatggtgcacagatatatataaaacacaaaatacacaactaggaactttgaataagtgttcaaagatattaatctaaaactgtatgccaaaatagataccctgagctattcagttcttgataaagccgtttactattcttcctggctcaggccactttgtttcttatacatataggtaacattgttgtatactacatatacagatgagaaattttggttgtgtgagtgtagtgtgtcatgggtatgtgtgtcagcgaatgtgtgggcacacatgtacaccctggaggcctgaggctgttggaagtcttccttggttggtctccacattcttcattgaggcaaacttagacagcttgccatgaagatctttcgagttggtatttctactttgccccgagtcatctcccctacgcctctgtctgcttctgtaacttccaaggcccaatcatgcctttctattgcagtatctctatacagaagctctcaaacgaatctcgctacatgatttatgagttctgggagaacagcagtgtgtggaaccggtaagttccgaggaaaaaattacttgttttctgttgggggtggtggcaatgtacacgatgaagcgtttagactgttggaaaagatttatttggtgctagagatgaaccaaggacttaagcgtgctgagtaagcactccatcactgttacatcccagaagccctgtaagtttatgctctgaaatgaagtccattcagttgcccaggacgatcttgcacttactctataacccagtcatgtcttgaatttgaaatgctttagccagaattccagacctgcaccaccaggtctgaggtgtttacttcatcttaaaacttgccttccttgttacaataaatcctacagttgtcagaatttatttcatactgatcccaccttaagtatttgcattttactgatgctcttggtgaaacagaattcaacaagtgtggtggtttgaataaatgcccaccccatagacttatggtttgaatgcttggatcataggagtggcactattagcggatgtggtgctggagaaagtgtgtcactgtgggggcaggttttgaggtctcatatgctcaagctacatccagtgtgacagaaaggctcctgctgcctgtgggtcaaaatgtagaactctcagctccttctacagtaccatgtctgtctgcatgccaccatgttaataatgaacaaaacctcagaactgcaagccagccccatttaaaagttttccgttataagagttgccatgatcatggtgtctgttcacagcaatagaagccttaacacacgagggccgtgggtgttaaggaggataagtgattgggcatcatgcttcatgaactatatcattttgctctgtgaatatcattctgcttcatttaaactatacacagtggtcaatatgtttttaatgtccttaaaacattaccaaaaaaatacaaaaaggaataaaagacattggaaaaagttacaaaccaactttgagaggaaaaatgtaaaaaaaaaattttttttttataaagtgtggaaaatcatgctatgttttaaaaaaataaaataaaaaggtggcagaaagcacatgggtgcatagagcgtgctccagggtagtgacaggagctaacatagttcaaactgagggcagggggtagtttatagtgttttgtacttagtgattgtttcatgatctcccacactttaatcaatggtgttttctttcctgttcctttcttgacaatttggagagaggaagaaatatgttactgtcttttgtccttaatgactatgtttctagctacaataaacctaatattggtagctgttggtcatcacaatttatttaagtgtaactcaactcctatacttaaaagtattccagtgctgtactatgtcacaatctagtaaatttactaacaaatatgcaattttaaatatgacatgaaggaactttttattctattacataaacagttcctggtgattttaggtagcacagaaaatataactctcactatcagtgtttggaagtgctaaatatagtaataaaggtaagagaagtctgggaagttcaactgatttgtatttcatcttacattgttttttgtggcttcaaggggcagtccagggacgcagcagagtgcttgcctggtgagaaataattggcactcactgtgtagtaatgaagacacagtcagtaccaactatagcacttcaggcagggaccctgacagcaactccaagcattctggccttgttaaagatagtttaaatcccacctcattctccaatcatggaaaatttacagttcctgttctttacatatgaacatatcaagttgcttttcatttgtccatttctcctgggatttagcctacctcccaatgtagcatgtctaatatgcttatcctaaatgcctttcatttaaattttgtgacaattactactctgtagattctactaaagttaaataagcatcaagagcagactatatctgggcatttagttcaaaccactccaaatcttgacatcaggttggatttgatctctgctgtactctacctaggaaggtttaaatacgtgcagctttaacctgcaatcattttgcagccacctccagacgaattacagcaagacgttccaaagaagcaacgtggatttcttggaaactccagagctcacatctaccatgctagttcctggtaactatcctggagcgtgctccatgcttctatgtgctttgctgccaccactgccctgtcttataagacagcatgatctcccacacttaatcagtggtgttttctgtcctgttccttcattttcaatttgaggaggggaaagaaatattttattgtcttttgtccttaatgactttttgtttgtagctacattaaacctagtgctagtagttagttggtcaccacaattttagtaaaatctaagtcaacctatatacataaaaaagtattcaaatgctttcttattacaatctagtatgctgaatgcaatttgaaataagtgatcatagaattatgttagaaaagttcattataatagttatgaaaatgatgtttgtaagtgggagaaagaacaggaggagacatgtttggaatgagattgtcttataaatctgggaaaagcgtaagattgctgagaaagttcacctgctgcctacccactgactcagtcactaactaagcatatatttactgagtacgattgagagcttgaccgtggggctcctgggatacttaagctagctattggcactgctgggatcctcttctgactgagcattttgctaggagctaactaactacagagtaaaaacatagtctctaaggataaaggctgtctatccagtttaaaatatatgtacatatatacatgtacatatatacatatatatgtatatatatccagtttaaacatatgtctatatgtttttatatgtgtggaaatatatacatatttacaaaaagcacacatttacataaaataaaacacagttcaaagcacaaaatagttatcactagaagcaacacttgctttatagacttaaagaagttacctttctcaacttgaaggtagagagtatcttagatatatggacaaaaattttgagttcctggagtttctataaatggataacaacatggtcgaatcagtaataactgacagctagaatagaaatagccatcatggagtggtaactgaccaagcaggacagtgacccaggccagggaagaaaagaacccaccccaggatccttcctgctgggatgccaactgcagaaccacagtaagatgcattctgaatggggacatgtacagataagaactgagaatctgagagtttctaaaatcggaaaatggcagctatgatgtttagaaaaacaaaagtaagatatatttcaagtaagccaaataccattcagacataagcatagaaaccagccagagtatatccctttgaaactcaaaagtcaaatgatgcatgctgaaatagagcaatgcaggcccatcaactgtcagacgccacacagacaggaggcgtgtaaagtactcagttaaggaaccagaatatccttgccatagagggaagaaggtccccaggaaaggaggtcccagtacaagcagtcagaaactttaaacaaagctgactccttgccgcctgctctttaccaagccatgcctgtagtggggcttctttgccattggtatgtttgcatatttacactcattggggaacacatttataatatttgtaatacatccatttgcttagactgaaacaggtatagaaatacattatgttgtttcctaacaactgctaagattaggaagattgcaacatcaaagtgtttataatcttgttacaaagatgaatatattacgtatattcatatattataaagtcttagacaacaaagtacaaaaacccacagtataattacacaggaataactccttatctcaaagcacctaaaatttaaaatgagaaaagcaattctgcagactgaagataaagggataaatggtctctacagtttggactttttccgccctaaaaccacatattatcattttttttctcctttcagcttcatggtggatcctgaacaacaattagatgtccctacacaatgtctttattgttccaagtgtaagtgttcttatctgaaacgtaaactgggaagttctctgtggtcgtcaatcagctgcatacctttgttcactgtgtgttggcacactctttaaagtgtattctgcaaaattgttgctcttgatatttgatggcaattgatctgctacattgtgatcaatcattataacaaaatccaaatatatgaaaatggtatataaataaagtaataaaatgtgataattgtggtaaaaatgctaggtgagaacttctaaaacataggccagggtttgtaaactggcagtgttctcaaccttctgattgctgcgaccctttaatactttcctcatattgtgacaaccccaaccataaaattatttcattgctacttcataactgtgattttgctactgttatgaatcataatgtaaatatctgatatgcagaatatctgatatgctacccccaaagaagttgcaacccacacattgaaacccactgctctaaaggattacatttgtgctttgtgacttttttcagtgacacatttttctgtgagagaaacattctttttccatatggtcctccaactatttgctttataattcctttaatattaacataaatgcataaaacagcctaggctatagcctatagaagctctgtctatctctcatgttgtaaagtggtattttacaagtgaacaatctatagtaacttagggcatttactaatgtaaaacctttatttgtaagtattatgattctcatatataagctagacattattgagcaaagaggagagctttacttcagggaaattaaagtttatgtcagaaggctttggtatgcgacccatataaatagctattcttataaaaaatgagcacttgaatttaaatgaagatttttaaattcagaactttaaatagagtagaacttcaactcaaatgaataaagaaattaaaacaagcacaaaagtttacaactgaatacacctattttgtaaactttcctaaggcaactaagataaactatcccccttatctactcttccctagaggttctgcttatagactctgctacaaaaatacacatgcaactactatcacgtgatgctctcatacaaatgcttataaatctctgagtcttaagggaaaatatacataaaatgttttttaacagttggaatacctagggaaatagagagtttgaatgaaaatttcatttcataactatgagatgagaataccatctctaagtactttgtggaatagttttgtatattcaatcctcataaatcgatgtaaaatttcatagctgttagacactagcaatttttacacgcacacatgcactgcattcagattgcaagggggcaagcagtatgaagcagagcttgccgcagctcttctgtcacaggtgtgcaagacaagacatcactggagttatctgatggctgctgagacttcctgtccatcgtgggaaagggaaggggacagcagagctctcctacagcacaggggacgtactgtggtctctgtgataagctctgaagcgcaggaggctgtaatcacacatgcttctggaaaatcctgggataaatgctttcacaatgaggactgcaaccaatcgcaatgctgtcctaactggttcacttcatatctaacccaaaaattctatcaagtgttttgtacactaggtagtttttcaaagtaggagttagtctactgaaaagtagagtagtcgaactgaaaagggcgctcttcccagaaacagagtttggagaaaggccctctggttacaaatttgaatgaggtctgtaaatatattaaagtagaatcaaaaggacctgagggaaaacagcaaataattaacttgtagaactctgctaattctgatctcagctattatgcaaatatgtatggtttaagtgtgtgtgtgttagattatgtatgaaaattcatacaatactggatcctatgactaaaatgaaaatagtaggagcagcacacacaatcacacaatagccctatagaatgtctcattttcaaacaaacaataaacttatgcctaatgaaggggtatttctccctattaaaaaccaaccctttctctgagaatccacgtaatgaacaagagtctactgaaaggccaagctgggacatcgactgtggactgaatgttaggatctgggcaagcatccccacagcagcaagcaagaggcactgggtttagaacttcacattcaggaagagacgacatttctgtgaactgtggccttgaatgaccttctcgtgatcccaagacacaaatgaataaaagtagtgagcttatatttacttaccttactgtctgcaggatttctgacacattatatgcagtttattgcattaaaacccctaataattaaaaacttaagcctctaaattctttatgaggaatgacggaatcgaaacttaatttgcctctatttgcagcctggatttttcctcttttggagtcaatttcaattttatttccccaccgtgtgactctcgatcatataatctgatgaagaacatcaagctactttccacctgttcatgagtacctctcaattacgaacctttgcagattgctcactgctagtaggtgtgaccgaccctaaggccatattgttaagaacccagtgaatcaatcatgtttgtgaaagcctcccctacccctgccgttgacaactatgctttgaataccagaatcattctgggctctgcagacatcatagtcctggtcaggtgctgatgtacaatcagtgggggaaaagaccgagtgactgacgttaagggcaacaaaaattctgtaccatatatacatcatagcaaatactttatatttgagaatctttacagcttacatttccattccattattacaagtggtgagaaacaagaattgcaagtagcatgcaaattataatacagtcttcccacttcaccaacaacatccccactttcgagtgttatttcccaatttttgcaggaactgcctgcaaagctgaaactgattagaaaaattctttatactttaaaatatctctttctccttttatgagaagccaaatagccaaccatcaaaagtaaaaataaattgaatcgtcacagtccattagttattgtactaggtccacttcatttgcaggtgtccaaaatataaaatgaataattctttatcttcaaattcatctgttcttaaaatgctacttaaaactttggttgttttcctgtaatatagaagaaagacaatttatcaattagactaccgttttcacaacttagcttattcaaccaaatggtatgaatctacttctatctaaatgcatgttactatagaaactattaaagtgactggaactatcaaatacacttgtgtttcaggaaacctgtgtagtccattcttaaaaatagtaaactgtattccaagtctgtgttctattcctgtggtgcctagttttataaatgttgttaatgtataaagcaaaagtaagcaattctaatgtatgtttactcaaaagaagtttgtcaagctcttattagcaaaataaagtgtcaatgaattatttaagcct

SEQ ID NO: 1478 - DNA, 4789 bp, Mus musculus
gagcagccgggaggtagggaggttggaaacgccagaatccatggtgttggaagaaggctcatggccaggacgactggcgcaagtctgcccgccagcgccaggaccgctgaggatggaggattcccgggagacttcgccttcctccaacaactcctcggaagagctcagctctaccctgcaactgtccaagggcatgtccatcttcctcgacattctgaggagagcagacaaaaatgatgatggaaaattgtcctttgaggaatttaaagcatattttgcagatggagttctcagtggagaagaactacatgagctcttccacaccattgacacacacaataccaacaatctcgacacagaagaactatgcgaatatttttctcagcacttgggtgaatatgagaatgtactggccgcacttgaagacctgaatctctccatcctgaaggcaatgggcaagacaaagaaagactaccaagaagcttccaatttggaacaatttgtcactcgatttttgttgaaggagaccttgaatcagttgcagtctctccagaactctctggaatgtgccatggaaactactgaagagcaaacgcgtcaagaaaggcaaggaccatccaagccagaagtcctgtccattcaatggcctggaaagcgatccagccgccgagtccagagacacaatagtttctcccccaacagcccgcagttcaatgtcagcagtccagcattgttagaagaagacaaccagtggatgacccagataaacagactccagaaattaattgatagactggaaaagaaggatctgaaacttgaacccctggaagaagaaattattgaagagaacactaaacctcacatcatgcttgtgcagcgccagatgtctgtgacagaagaggatctggaagaattccagcttgctctgaagcactatgtggagagtgcttcagctcaaagtggatgcctgcgtatctctatacagaagctctcaaacgaatctcgctacatgatttatgagttctgggagaacagcagtgtgtggaaccgccacctccagacgaattacagcaagacgttccaaagaagcaacgtggatttcttggaaactccagagctcacatctaccatgctagttcctgcttcatggtggatcctgaacaacaattagatgtccctacacaatgtctttattgttccaagtgtaagtgttcttatctgaaacgtaaactgggaagttctctgtggtcgtcaatcagctgcatacctttgttcactgtgtgttggcacactctttaaagtgtattctgcaaaattgttgctcttgatatttgatggcaattgatctgctacattgtgatcaatcattataacaaaatccaaatatatgaaaatggtatataaataaagtaataaaatgtgataattgtggtaaaaatgctaggtgagaacttctaaaacataggccagggtttgtaaactggcagtgttctcaaccttctgattgctgcgaccctttaatactttcctcatattgtgacaaccccaaccataaaattatttcattgctacttcataactgtgattttgctactgttatgaatcataatgtaaatatctgatatgcagaatatctgatatgctacccccaaagaagttgcaacccacacattgaaacccactgctctaaaggattacatttgtgctttgtgacttttttcagtgacacatttttctgtgagagaaacattctttttccatatggtcctccaactatttgctttataattcctttaatattaacataaatgcataaaacagcctaggctatagcctatagaagctctgtctatctctcatgttgtaaagtggtattttacaagtgaacaatctatagtaacttagggcatttactaatgtaaaacctttatttgtaagtattatgattctcatatataagctagacattattgagcaaagaggagagctttacttcagggaaattaaagtttatgtcagaaggctttggtatgcgacccatataaatagctattcttataaaaaatgagcacttgaatttaaatgaagatttttaaattcagaactttaaatagagtagaacttcaactcaaatgaataaagaaattaaaacaagcacaaaagtttacaactgaatacacctattttgtaaactttcctaaggcaactaagataaactatcccccttatctactcttccctagaggttctgcttatagactctgctacaaaaatacacatgcaactactatcacgtgatgctctcatacaaatgcttataaatctctgagtcttaagggaaaatatacataaaatgttttttaacagttggaatacctagggaaatagagagtttgaatgaaaatttcatttcataactatgagatgagaataccatctctaagtactttgtggaatagttttgtatattcaatcctcataaatcgatgtaaaatttcatagctgttagacactagcaatttttacacgcacacatgcactgcattcagattgcaagggggcaagcagtatgaagcagagcttgccgcagctcttctgtcacaggtgtgcaagacaagacatcactggagttatctgatggctgctgagacttcctgtccatcgtgggaaagggaaggggacagcagagctctcctacagcacaggggacgtactgtggtctctgtgataagctctgaagcgcaggaggctgtaatcacacatgcttctggaaaatcctgggataaatgctttcacaatgaggactgcaaccaatcgcaatgctgtcctaactggttcacttcatatctaacccaaaaattctatcaagtgttttgtacactaggtagtttttcaaagtaggagttagtctactgaaaagtagagtagtcgaactgaaaagggcgctcttcccagaaacagagtttggagaaaggccctctggttacaaatttgaatgaggtctgtaaatatattaaagtagaatcaaaaggacctgagggaaaacagcaaataattaacttgtagaactctgctaattctgatctcagctattatgcaaatatgtatggtttaagtgtgtgtgtgttagattatgtatgaaaattcatacaatactggatcctatgactaaaatgaaaatagtaggagcagcacacacaatcacacaatagccctatagaatgtctcattttcaaacaaacaataaacttatgcctaatgaaggggtatttctccctattaaaaaccaaccctttctctgagaatccacgtaatgaacaagagtctactgaaaggccaagctgggacatcgactgtggactgaatgttaggatctgggcaagcatccccacagcagcaagcaagaggcactgggtttagaacttcacattcaggaagagacgacatttctgtgaactgtggccttgaatgaccttctcgtgatcccaagacacaaatgaataaaagtagtgagcttatatttacttaccttactgtctgcaggatttctgacacattatatgcagtttattgcattaaaacccctaataattaaaaacttaagcctctaaattctttatgaggaatgacggaatcgaaacttaatttgcctctatttgcagcctggatttttcctcttttggagtcaatttcaattttatttccccaccgtgtgactctcgatcatataatctgatgaagaacatcaagctactttccacctgttcatgagtacctctcaattacgaacctttgcagattgctcactgctagtaggtgtgaccgaccctaaggccatattgttaagaacccagtgaatcaatcatgtttgtgaaagcctcccctacccctgccgttgacaactatgctttgaataccagaatcattctgggctctgcagacatcatagtcctggtcaggtgctgatgtacaatcagtgggggaaaagaccgagtgactgacgttaagggcaacaaaaattctgtaccatatatacatcatagcaaatactttatatttgagaatctttacagcttacatttccattccattattacaagtggtgagaaacaagaattgcaagtagcatgcaaattataatacagtcttcccacttcaccaacaacatccccactttcgagtgttatttcccaatttttgcaggaactgcctgcaaagctgaaactgattagaaaaattctttatactttaaaatatctctttctccttttatgagaagccaaatagccaaccatcaaaagtaaaaataaattgaatcgtcacagtccattagttattgtactaggtccacttcatttgcaggtgtccaaaatataaaatgaataattctttatcttcaaattcatctgttcttaaaatgctacttaaaactttggttgttttcctgtaatatagaagaaagacaatttatcaattagactaccgttttcacaacttagcttattcaaccaaatggtatgaatctacttctatctaaatgcatgttactatagaaactattaaagtgactggaactatcaaatacacttgtgtttcaggaaacctgtgtagtccattcttaaaaatagtaaactgtattccaagtctgtgttctattcctgtggtgcctagttttataaatgttgttaatgtataaagcaaaagtaagcaattctaatgtatgtttactcaaaagaagtttgtcaagctcttattagcaaaataaagtgtcaatgaattatttaagcct

SEQ ID NO: 1479 - protein, 348 aa, Mus musculus
MEDSRETSPSSNNSSEELSSTLQLSKGMSIFLDILRRADKNDDGKLSFEEFKAYFADGVLSGEELHELFHTIDTHNTNNLDTEELCEYFSQHLGEYENVLAALEDLNLSILKAMGKTKKDYQENLEQFVTRFLLKETLNQLQSLQNSLECAMTEEQTRQERQGPSKPEVLSIQWPGKRSSRRVQRHNSFSPNSPQFNVSSPALLEEDNQWMTQINRLQKLIDRLEKKDLKLEPLEEEIIEENTKPHIMLVQRQMSVTEEDLEEFQLALKHYVESASAQSGCLRISIQKLSNESRYMIYEFWENSSVWNRHLQTNYSKTFQRSNVDFLETPELTSTMLVPASWWILNNN

SEQ ID NO: 1480 - DNA, 4821 bp, Mus musculus
gcagagggaggcgcgcgctcagagcgaacacccacttgcatccgaccctggtggcgcggcgcggggaggcagcagctgagacagcaccaggtcagagcctttgcatcccgcccagtctgcccgccagcgccaggaccgctgaggatggaggattcccgggagacttcgccttcctccaacaactcctcggaagagctcagctctaccctgcaactgtccaagggcatgtccatcttcctcgacattctgaggagagcagacaaaaatgatgatggaaaattgtcctttgaggaatttaaagcatattttgcagatggagttctcagtggagaagaactacatgagctcttccacaccattgacacacacaataccaacaatctcgacacagaagaactatgcgaatatttttctcagcacttgggtgaatatgagaatgtactggccgcacttgaagacctgaatctctccatcctgaaggcaatgggcaagacaaagaaagactaccaagaagcttccaatttggaacaatttgtcactcgatttttgttgaaggagaccttgaatcagttgcagtctctccagaactctctggaatgtgccatggaaactactgaagagcaaacgcgtcaagaaaggcaaggaccatccaagccagaagtcctgtccattcaatggcctggaaagcgatccagccgccgagtccagagacacaatagtttctcccccaacagcccgcagttcaatgtcagcagtccagcattgttagaagaagacaaccagtggatgacccagataaacagactccagaaattaattgatagactggaaaagaaggatctgaaacttgaacccctggaagaagaaattattgaagagaacactaaacctcacatcatgcttgtgcagcgccagatgtctgtgacagaagaggatctggaagaattccagcttgctctgaagcactatgtggagagtgcttcagctcaaagtggatgcctgcgtatctctatacagaagctctcaaacgaatctcgctacatgatttatgagttctgggagaacagcagtgtgtggaaccgccacctccagacgaattacagcaagacgttccaaagaagcaacgtggatttcttggaaactccagagctcacatctaccatgctagttcctgcttcatggtggatcctgaacaacaattagatgtccctacacaatgtctttattgttccaagtgtaagtgttcttatctgaaacgtaaactgggaagttctctgtggtcgtcaatcagctgcatacctttgttcactgtgtgttggcacactctttaaagtgtattctgcaaaattgttgctcttgatatttgatggcaattgatctgctacattgtgatcaatcattataacaaaatccaaatatatgaaaatggtatataaataaagtaataaaatgtgataattgtggtaaaaatgctaggtgagaacttctaaaacataggccagggtttgtaaactggcagtgttctcaaccttctgattgctgcgaccctttaatactttcctcatattgtgacaaccccaaccataaaattatttcattgctacttcataactgtgattttgctactgttatgaatcataatgtaaatatctgatatgcagaatatctgatatgctacccccaaagaagttgcaacccacacattgaaacccactgctctaaaggattacatttgtgctttgtgacttttttcagtgacacatttttctgtgagagaaacattctttttccatatggtcctccaactatttgctttataattcctttaatattaacataaatgcataaaacagcctaggctatagcctatagaagctctgtctatctctcatgttgtaaagtggtattttacaagtgaacaatctatagtaacttagggcatttactaatgtaaaacctttatttgtaagtattatgattctcatatataagctagacattattgagcaaagaggagagctttacttcagggaaattaaagtttatgtcagaaggctttggtatgcgacccatataaatagctattcttataaaaaatgagcacttgaatttaaatgaagatttttaaattcagaactttaaatagagtagaacttcaactcaaatgaataaagaaattaaaacaagcacaaaagtttacaactgaatacacctattttgtaaactttcctaaggcaactaagataaactatcccccttatctactcttccctagaggttctgcttatagactctgctacaaaaatacacatgcaactactatcacgtgatgctctcatacaaatgcttataaatctctgagtcttaagggaaaatatacataaaatgttttttaacagttggaatacctagggaaatagagagtttgaatgaaaatttcatttcataactatgagatgagaataccatctctaagtactttgtggaatagttttgtatattcaatcctcataaatcgatgtaaaatttcatagctgttagacactagcaatttttacacgcacacatgcactgcattcagattgcaagggggcaagcagtatgaagcagagcttgccgcagctcttctgtcacaggtgtgcaagacaagacatcactggagttatctgatggctgctgagacttcctgtccatcgtgggaaagggaaggggacagcagagctctcctacagcacaggggacgtactgtggtctctgtgataagctctgaagcgcaggaggctgtaatcacacatgcttctggaaaatcctgggataaatgctttcacaatgaggactgcaaccaatcgcaatgctgtcctaactggttcacttcatatctaacccaaaaattctatcaagtgttttgtacactaggtagtttttcaaagtaggagttagtctactgaaaagtagagtagtcgaactgaaaagggcgctcttcccagaaacagagtttggagaaaggccctctggttacaaatttgaatgaggtctgtaaatatattaaagtagaatcaaaaggacctgagggaaaacagcaaataattaacttgtagaactctgctaattctgatctcagctattatgcaaatatgtatggtttaagtgtgtgtgtgttagattatgtatgaaaattcatacaatactggatcctatgactaaaatgaaaatagtaggagcagcacacacaatcacacaatagccctatagaatgtctcattttcaaacaaacaataaacttatgcctaatgaaggggtatttctccctattaaaaaccaaccctttctctgagaatccacgtaatgaacaagagtctactgaaaggccaagctgggacatcgactgtggactgaatgttaggatctgggcaagcatccccacagcagcaagcaagaggcactgggtttagaacttcacattcaggaagagacgacatttctgtgaactgtggccttgaatgaccttctcgtgatcccaagacacaaatgaataaaagtagtgagcttatatttacttaccttactgtctgcaggatttctgacacattatatgcagtttattgcattaaaacccctaataattaaaaacttaagcctctaaattctttatgaggaatgacggaatcgaaacttaatttgcctctatttgcagcctggatttttcctcttttggagtcaatttcaattttatttccccaccgtgtgactctcgatcatataatctgatgaagaacatcaagctactttccacctgttcatgagtacctctcaattacgaacctttgcagattgctcactgctagtaggtgtgaccgaccctaaggccatattgttaagaacccagtgaatcaatcatgtttgtgaaagcctcccctacccctgccgttgacaactatgctttgaataccagaatcattctgggctctgcagacatcatagtcctggtcaggtgctgatgtacaatcagtgggggaaaagaccgagtgactgacgttaagggcaacaaaaattctgtaccatatatacatcatagcaaatactttatatttgagaatctttacagcttacatttccattccattattacaagtggtgagaaacaagaattgcaagtagcatgcaaattataatacagtcttcccacttcaccaacaacatccccactttcgagtgttatttcccaatttttgcaggaactgcctgcaaagctgaaactgattagaaaaattctttatactttaaaatatctctttctccttttatgagaagccaaatagccaaccatcaaaagtaaaaataaattgaatcgtcacagtccattagttattgtactaggtccacttcatttgcaggtgtccaaaatataaaatgaataattctttatcttcaaattcatctgttcttaaaatgctacttaaaactttggttgttttcctgtaatatagaagaaagacaatttatcaattagactaccgttttcacaacttagcttattcaaccaaatggtatgaatctacttctatctaaatgcatgttactatagaaactattaaagtgactggaactatcaaatacacttgtgtttcaggaaacctgtgtagtccattcttaaaaatagtaaactgtattccaagtctgtgttctattcctgtggtgcctagttttataaatgttgttaatgtataaagcaaaagtaagcaattctaatgtatgtttactcaaaagaagtttgtcaagctcttattagcaaaataaagtgtcaatgaattatttaagcct

SEQ ID NO: 1481 - protein, 348 aa, Mus musculus; identical to SEQ ID NO: 1479

SEQ ID NO: 1482 - DNA, 183997 bp, Homo sapiens
caaatgaaattaattcatttgtgataataaaaccataggtaatgttatggggtgttgatatacataccaaatcttttgaggttagagtcacagtggatctattggagaaaagcagacccaaaatgaaaattattctcttcttatttatgacaagtgctatggtatcataatatgaccatctatcttaatgtgaaatgcttaaaaatataaataactgcaatatttctgattataaaatgtatgcagtcatttgttgtaatttttaaatacgaaaaatatttagaaagaaggtcaaaagtcacttgaaatactttcatccagaaaaaatggccattaatgttttgcattttggtgatcttccttcccaaagtcttgtgtgtgtgtgtgcatgtgtgcatgtgaaggtaagtatatgtgcacatgtatgtgtgtgcataggcatgtatgagcgtgtgtctggaaggtgggctcatggggagagaggcaatcagactttgcagagtcttgagagcaacacaatggatatttggactcagtctcaaggtcagtgatggccaatgaacatttatgaacagaataaaaaatgagatagtatgttcaagattgttgctctgactgtgacattaatagggaaaggaaatatgagaggtcaggtatttcaggaggaggctataactctggagttgaggtagtcagagaggtgaactagggcagaaattcaggcaggtagagggctgtgcattccagaactatttatgtgttcaaattcacaagaccttgcggatgaccagatttgtgagagatgaagggaatcaaagatgattcttactcttctttaaaaataaaaagatcaaagtgttcatcaaagcgtgtcctgttctcttgctcatattcacaaggcattacaaagagatttataaaattgcttattacataaactaatgataatgaactttactgagcaatcattttgagccagaggtcagacatttcatttaatcctcacaactgtccttaggtcaaatgattgacctaaggacacacagttcagaagtaaaagaacctgtgcaagacctaattctctccctctctcaaaatttcacattataatgatgactgttatggactggatttttcgccaccccaccacccaaattaatttgttaaaatgaggttgcaaaggtggaggtttaatccaataaggctggtatcctaccaagaaaaggaagagacacaaaagctctctctccacacacacatatagaaaaagtcatgtaaaggcatagcaagaagataactgtttacaaaagaggaagagggcccctgccaggaaccaaatcaactgacaccttgatctaggacttcccagcctccagaatggtgagaaaattaatttctgttttttcagccccctagtctgtggtattttgttatggcagcctgagccaattaatagaatgccttctagtagcaacaatcaaagagaatccagtgacgttagggaatccttttaaacctaaagcaagtttgccaattggaagatgggcagttcacttaaaagaattttaaaagtccaacttcttagacattaagtatcagttaaggctagtggagcagagcttcatgattacttagaagttttttttatttttgaaatgatcagtattgttaatttttaaagtgttaatgcttttaagccaaaactttctccttttttttttttttaacaaaagacaaatttgaagctgtgaaggaaattggaaggaggaagtcactgttgttgttaagctctgagaattttcccaagtgtaattcagtctgtaaattgcttttgtaaagtagattctttggaaaacgtttgcaaagatgtaaataaaatgctgtactttatatagtacctacataggattgaatctactcacctcaagggtgaactacgatccacaaggactaattttgttcttaaaaaatgttataacaggtttatgttgttggttctgaaatgtctactagaagaatagctgcatgaatagaagaatataatttccaactcatggagtgaaaagcagcttaataaatctagttcaaaaatcactttaaaattgtttcaaataaccttggctcactcacaagctaagtaacgtattttagcgttcaggggttctgtttagagaaattgttaagtggtccatctgttttatatgtatttccctaattagaagctaatttgcacagtttaagggaaatgtcaaatgcgttacagaagcccctttgcatatataaaggagcaaccaagagcagaaaatggaaaccagggtgaaactgggtgcttttaccctctcgataattacaggcttatgaagaaagtcatgactaccacaatgcctgccaaggtgaagagtgggcacattatggcattcacagtatcatgcacctgcctctctttacatctctttgaggttaataaagttcatgatactgtacacataatgatgatcctactgtgcacgggttactgatttattcaactagtattcactgagagctgggacacaatgaacaaaacagacaggggctgcccatagagtattcacagcaaaatcttcatccattatcatgaatctcacaaaagtcttatgaagtggctattattatctgatctttagaaataaacttagggcttggacaggttaagtgacttgcccatggctcagtggctggcatggcaaagttggatgcggctcccaaatcctgcccctactgcatttcttcctaatggttccccagggtttagtaacacatctttaggaatttactgtgagattcctaaatgtccccattagtgtgaataggccaagtctgaaataaattaagcctttttttttaggacctgggcaaaaccctcagggcctctatacagagttgccagatcctctcttccatctccctacatctcccttaattaaaaaaaaaagtagatgcaaaattataatagctgttttctgcattttctgactgtgacatggtagcttaattcatcaaagtttaacctttctttttgggggaggcagggttcctgtgctttgtttccctaagcacatccttaatttgccacttggtgacccagccctcagatctgcccacctctagaagccgatgcttataaatctttcaccagattttgaggcctctctgctttgtctctgtatctttttaatcatcaattcacgtaattggacgttatgacaaggaagcagctaacatcattcaatttcttactctgatgcctatgttcagtataagattgatttagcctttccttcctttgttcattcattccacattcgagtgcctaccatgtgtgtagcaatataccaggcacaagatacagatgaaaaatagagttcctactctgaagcatctcagagttcagacaggcaggcagagaagatactaaaaaatcatttttaaaaatatgataaaggacgtgaaaggggtacgcagagagtgctatggaaacaaggaggagaaaccaatccagcccgggggattggtggggttggagcagggaggaggctcttctgcagaggaaaagatgtctgagctgactcttaaaaagccaactaagtgatgggccacatgattaagaaaggcatgtattctaggcagataatgccaagggcaacggcccaggagcatgggagagcagtgcacatccagggatctacaagtaatgataaatagacacatttttttctgtcattatttttgtgcaggcttctatgctaagtgtcttgcatacattatttaactgaattctcatctaaacactgtgcagcaggtaccattcttatttctatttgagagttgagaaaaacagaggctaaataacataccttagtattaaccaaagataataagaagttaggctgggcttcgagcaccagtcttttgaatatcataatttgcctgctcaaccactccatgccactccagtaattctgtgtggctagaatgttgaggctgggaaggaggcagggagagaaaggcaagagatgacacagaaaaggtgattttactttaaaggctccagtgagcctctgaaggattttaagcaggtgtgtgctatgcttagatgtgcattttagaagcctcactctgtggaaaggataaagtacagatgagaagagagccagattggagacagagaaatcagacaggcagctgggcactgctcctggtgagagatgacaggtttttggtcgcatatagtggcgatagagatggagaggagaggagtgattccaaagataacccttgcaactgattagagagaggtgaggatgggatagaggtagggtgaacgacagtgagggaaggagtccaagtttattttggggtttctcttttggatgaattggtgaaggttgatgttattcaacaagtgatggagcataaaataattaggaaaaaatgatgaattcctttttagacatgctcaattcaaaatgcctaagaaacattaataagaagacgtgtaccagtcagactgaaatatgaatctacatagtcatcagcctacacatgaaaaatcatgggcttgggtaatatcagtgtatggaggaaagaaagagaacaagaatgggaagggagcagatgaagcaagggtacaatttagaaaatgtaacatctagaaggctagaagaattaggagactccatgaagactaaggagagtaggaggaacatgatcagaaagaaaaagcaagagtttcaagaaggaggggaaaatctgtagcatccaggacaatagacagcaatgtcttggtcacagtgaccaccactgctcaccagacccgcatgttccagacaccataccctaccgggtacttatgtgaagtctctctgttcttaacaacatggttgcaaagcagtggtgctggtggggaaaacagtgactaactgttgaatacctgctttgtgcctactgtttactaagctctttgcacacaatacctcattcttgcttttacagatgagaaattttgcccgtgataaagataaagacagggaacactaattgtaacaacacatagggttaagggaggatactaggcactgaggatttcttttctttttttgcttcaaaatggaagagctccaagttgagtaagctagtagcacacagtggcataacacaaaaatgtatcctcagggtaaaatagttcataggaagatcaccattattagttaataattttggcccatggcacttactactcctgagtcctaattttgccctcttcagttagataaacgatcacacagaataggcacttatggggagaagtctctttctctgtcctgcctcagccttcaccacaaacatctggtgttactcttgtctcactgcattaaaattatctattaaaatagtgtttccttaagttgtgtatgttctgcaaaggcaaggccagtcctttttatcatttccccagcttgcctgtcagttgcctggattgaagcaagcaatcaataaatgtctgaagataattaaatgttttaaacagctatttccaatgacttaactatggccttctttaacactagaaatttaaattgaatttatctgtcagaatccaaacataaaaaactaactttgactaaggtaaaacagaaaagaaagttttggaaggatactaggtctctcaggaagtcggcagaaagcctcgagatcaagattggaggacagggctgctgaaatcacagagtgccattatccatttgattaattcatcctcagggctcccctggcactgtggccacactcaacactacactgtgagtgtctactgccattaataaacttccccgcacatcccttgattcaggtttaaacacacaagtgaagtgtcctatcagctgagcctagctctcagcctgtgctccagctaccagagaagagggagaggatctcctttctttccttcagaaggggcgagttctgcccccagtcaggaaacacaccatggggataggcacttaaagcggaaggggatttggatcctaagctgccaaggcaacaaaaatgtccactaacctgactgaaaggattctgagtcatcactcaaaagggaaggataaccttccctagaatttaagatataaataagatagattcccagctgtctgaaatggtttagataatagttcttctacaaggcagagatggattgaaatacaatatattcccacacagctatcatctcctgaaatgctagaaatatcttcacgtcaaagtcttatcataggaagcctgagagctggaatctggaattacatttctattttttttaggcccttgctacaaagaagttgcatttcctccctcaagtcggttgtctgctgtttgtgactgatactatgcacagcagtgaggcatgtgtgtttcacgaaaatgtgtgaaaactgctttcaaaaatgcatgccatctagataaaaagaaaactataaaaatatgtttggttgccacttcgtagagcctattgaatttgtctgtgaatgtgaatctaattgccattttttctactacagcctctgtgaacattacatttccattaaaaagagaagtcagttacagcagaatgtattcctgtgttcacataggaatcataaaaataaataatgatcggttgattgcttaataatttatgtttctccttgatagaccattagaggaaataagcaaatccacaggtacagaaaatgtcattcattgtcagtaaagtgttacaaacagcttcctgtaactgaagtgtttgtaactaaagtgttacaaacagcttcctggttttgaatgatgactgctgattattctcctgttcttcatttataatcagagaaagtctcctttattaactattcttgttaccatgggattggcataaaaatattatcacttgtgtggttgaatttgagggctgagggacccgcacaacttgggttagaggggtcagacttaaactgcacttgttgcagaaaaatctattccattcttcatccaatggcaggaataaacaacatgttattttgataaattcagtaacttgatgttaatggttgacagcccccctccttctcgtggtttttctccttcagtgatttgaatgacctgtgtctatctgatgggttgaccagtatgttttttttttaaatgattttgtatctattttgatgaacagttgtcaaagagaagggtctattctcactgttcaggtaaggaaatttgcagttaattaggaaaatgcacataaagatgtcagatgaatattcctaaagcacagctccaatcaatatctcacccctgattaagtttaatgtctctaactctctacctaattaagtccagagttctatccccgggcttcacagattttcatcctatagcctctgcctattttctgagattttattctacttttttcctgtactgtatgtacagcacagttaagtttggtgattcttaatccttgctgcacatcagaatcacatggaaatcttcaaacaaacaaacattaatccactgggcccaccgcatactaattgaaagtgaatttgaggatgaagcacaggcatcagtttggtttgtgtgtgtgtgtgtttgtgcagggagggttagctccttattttggttatctattgttacaaatccaaccacctcaacacttatttgtatgaaacggtatacattttattatgttcccaattctgtggtccaactgttctgacacagcacagcactggtagtgtgcctttactccatgatgcctggggttttggctgggacaactcacatggctagggatgtctgcaagagctgggagctggagtcatttgcaggcttcctcattgacatttctgctgctgaggctgggataatgcaaaggctctgcttagctatacctgtaagccaggtgtctacacttgcctttccatataccttgggcttcctcaaagcatggtggcttaaggtagaaaaacttcctatacggaagttcaagaatccaggagcaaatccactgtaaaaagtggaattgcaaaggcttttatgcccctaccctcggaaagcacatagcaacacttctgttccatttcattcattgtagcagtcacaatctttcagatttaaggggaggggacccacttctctataggaagaatgtcaatgaatttgtgggcacattttaaagttaccacacaccccaggtgattccaatgtacaggcagcgttgagaacaactggattcattttttttttttgtaagcacccatctacaaaggagcagtgggacttgggtgaagtgaacaagacacctagggtgcaaaatttaagaaaatcattctcaggatcatgcaagcacaggatagagattgagagcaagtgcctccttacattctgtgctcaagtggccccacttgccacaccctagtcctgagcctactacatagcaactgtgtatgaatcattagggtgagggggacttggatttctggactagacagtactttagtattgggatttggaaagcccaggtaggatctgggattctgtatgtttataggaatccccagtggactacttccagcttccacgtgctttcctggtgccatgctttgcttacgctgttccttctgcctggaagtgttttccttctatttctatcaagcatggagtatccactgatttttaaggtccatttcatataccgcttctttcatcaagcttttattggtccccccagccagagtgtaacctgtctctcctgagaaacccctagcatgttttacatgcctttaagacactcacatgttgatcagcattttggttgtgtgtgggcctgtcttataggaagaatatgtttacttttctccaaaggccacaaaatggagatctggatcctcctcacccgttctcactggtagaggcagagtcttgtttagacaaggttccctcttttttgccttatctcgctcccagatagctcaagtttgtaaccaacacatacacattttagatgcccaataaactggatctctctcctgatgaaaggtgtggtcagtttcctatttttacagccttcgcagaagccgtcaaatattgaataattaccctggtttaaatgcttaaacacagataaggacttcgtcttgtgactttgggaaacttcatatttgaacattacctaacaatccttgccccatagcaaacgtttcgaagcctactctaggcagagttcatagcaccgcctttgtcagcagcactgccataggtaagcctcagaaccctctggggtgagaccggtgtaaccattttactgatgaggaaaagtgaggcttacaggttaagtccttcgagcgcaagataacaccgaatggcttaatccctacaccaaaccagctgctcctcgattgctggtattcgtgaaccctgcccccgcctttggggaaggtcgggcagacaggccactgggaccaaaagcagagtaggtagaacctctctgagttcctccctatttatggcatccactcaggtgaggctgggggcgtccttaccttgcgctttggctgctcaggacaaacgccctgccattcgtcccttctctctgtccggacgccctcctccatccctgcacttggggccgtcgtggggctggtaggggtccccaggctatctccagccgtggccgatggccgtgccgggggcagagcccgctcccctccgcgcgttgctacgtgcggggatgacatggatccagacgccgtcaactacgggaaggaggaggcgagagttggagcgcgtgggagcgcagaggccggaggagggagggggggacaccgagcgcggagagcgcggagagcgcggagggaggcgcgcgcgggagcgaacaccctcccggatccagagcccggcggcggcgaagcagcagctgcggccgcgcccttgccagagccggtgcgtccgcctagccccgctccgcctgaggccgtcagggctcccgaggatggaagattcccaggagacatcgccgtcctccaacaactcctcggaggagctcagctctgctctgcacctgtccaagggcatgtcgatcttcctcgacgtaagtacagatggtgggagctgggcggttgcttcccagcacctttcttttccccgaaaggaaggggttcggctcaggtgctgaccagccaatgctttgtccccagaacacaggcgagaactaccgatgcaaatgcaggaggaacgactgtcccttaacttgcagctagggctgtcccagacctgcagcttgtggcttaacacccttaagaaaactgcaaaagttagattttccaacaggctgggtttcgtagagacactattgcaaatacaacagacaacatttgagtgcataggacattttaaagaggcacaaggtgtggggggtgaggtggggacagtgtcccaactcatctctctaacgcgccctattcgcagccttcacactcgtggatgctctcaagcaacccagccagggaagcagcagcgattgagatgccctcgttatcctcccccagaccccctcggaaaacaattactttgagcatatttgtttttctttttacagcggtgggaaatatcattttcataatgattctttttgtcactgccacctcttctattttccctttttcttccctgatattctccttctctccaagttctaattactactgtcacctccatgaattctagcttttgactattttccctttggtccaatttctcacttcggtatcgactgcctgccttcattactctgatctgattacatcctttcttttccttctgtgctgtttctttttcccgtatggtgtggtttctatctttacagcacttttatttcttatttatttctcaattttgttttcctctcctgcctgctgtttctgttttctctatttttccgtctgttgcctatctcttctctctgctttggggtttctctcagctgcttgccgggctccaggctctcccagcccctcagttgtcacattcatgctgttgccggaggtcgtgtctatctcagtggggacaattctgtctgcttcttgtttaggcatgatagaaaatgtcaaaggacatggaggagtgctacgtgctctgtcctttacccttctctgagttatcttttcttattaaagtcaaaatgagtgggagatgggccagaagccagatacatttgtttgtggagagatgaaaatatgaggaaatcaattagtatcataatggtgaggcagagataaagaggataggaggatgtgaggcgctctcccaagtttattttgaatggattggctagaattctttttaattctagggaaagaaactcctatcaataattcaaactgttgtaaggcaaatgatagaagtgaggttcaactgtgtgtactggcagccttcaccctttatcacctggtggctccaattggtgatccaggcattctgggctggtcatctccttcccaccaaatctcaggtgtggtcattcctattcagccacccaatcaggtggttaagtaccttatccttcatgagcatttatctctgcctggcttgggtcagtcagatggtattattggtgctcatggcttaacgggctgatcttattcaagttttgctgttcagggccataaagcacttgaggaggtaagctgagaaaagagaagggcaccacaacatgcctgaaaagtcagggcccctggaaatcatgtcagttatgaggctgacaattaaggggccatggagttgattcaaaggggacaagtggggcctccattcattctgacctgatcttcactctgtcccccattgagatcaagtgcttccctgtgctttttaaaaagcacttaacaaaccccggtgatagtgtggagatgaatggattaaaactacacaaatggaaagtcatcctcctgactcatacaccagccattgcttaagtgttcaactgcaatgttttcgaagagaaaattaaaatttcattttttattatgtatgcatgattgtttccaagtctgtaaacaaatagcatcaggtccctgtactaaaggaacttgtagtctgtgaatagggtggtcttgccttttatatttcagagatttaaaaataaaaataggaaactgattccctatgagaggtgttgacatgcttgtttgtcggtaaaatgctagagtctacaaaaaaaacctgccattggattttgtgtcaaatggaaaagattttgtttacacttttctttgagttattttgtgaaaaatctaacactggtgaaatatgtgatatgaaaaatgatttgttacttagggatttgtgaattattcatttctggatcataccacttttagcaaaataaaatataaaatatacatgcatcactttatttatttgatttaatatattctatggcactagcaagaaagattacttttaaaattatcttcatattataatacataggtgatagatattacctgttccaaactggaacaggtaattttctgtgtgtcttctgtatcaaacagacaatttccaaatttgaggaaaactttgatttgcagtgctttttattgcaatgtcactggaataatcaatcatttaagaaatgatgtaaactgctactgagaacactattaatgacatgatacatgaccagctggttggaaactagagacagattttaacaagaaaatcagagatagatttgccacaactgttggcttttccttcagtatcctctccaaatcagcaatagtaatcactatgatacttccttaggctgttgtgagtatgaaataagggaaaatggaaacaaagcaaaaagtattgcataaatttgaagtattatggttatttcagtgctgcacactgagtgtattaaataacagtaacagtagctaaatccacaaactgatgcagggactatttcttcatgaatctaatttatagaattgtcttgctagaatatgacagaattaagtatcggttcatcataaatactcttgaatactgatgggaggcttagaaaacctagcactggtgccaaggtatgccagtgcattgaggctggagcaagcatttgcatatggcatgcctgccagccacaggagagggactcaactgggtcctggcaacacataggaccacagggattactattgcttttccttttacaccaatggactatcatttccccagttgctgcaatccagttaacagaagaggaactctagtttggaatactagtctatgtagcatgtgtctcctcttttgagtcattacattaatcaactccgctactgtgaaaagggagaaaaacaaaccttcaactcatccccaaaagcaagagaaattcccaaacgaaattagtagcaacttcatccacccaatgccactttcctttcccatcagttttcctttgatttttaactggaagggaagtgactgttccccacttcactgctaaagagggaaagaggctggaaagttgtgagggggatgaatgactttactgcttgtcttcccttccttccttcgtctaagcatgcacactcatgtacactctgaatgcaagatacagagcatagatggtcaggaacttggtgaaaacaagaaatagtttcttttcacaaggacacttaattctgaagccccatatatgctcatttgtatgatgtgtgagatgcacagaggaatgtcgaagccgaatgagtcttccagatgcaatggttctgtgactgaactctgttatagccacacacctcccatctcacctcatctctctcacacacacacacacacacacacacacacacacttgctcatttgagtgagattgtccagttcagaggatggcagttaaccccatcattgtctaccctcattggcaaggcaaatgtcactcttgtagttataggaaacagcagaaattaggaaaaaaaaatttaatgcatgctgggcttaatacctaggtgatggattgataggtgcagcaaaccaccatagcacacgtttacctatgtaacaaccctgcacatcctgtacatgtaccccggaacttaaaaaatttttaaaaaagtatttaaaaatacacttagtcttactgttatcatacattaaaaattgttttcccacactgggcctaccctaggcaaaattgagaagatgaaaatatgtgcactgattccttctctccatccatctttcagtgcctgcttccccttatccagtttcagggcaaccagtggcctggtagtaaaactacctgctggaagtctgggcccacccaccctggtaatgggagagactcccatctgaccccaggcagtctaatgattgcgacacctgggcaacaccaggcattctaatgggagagactcctgccgaccctgtgtggtgggactccatgttctggattagtcctgagtccctgtcttatattctagtttctcaggaatctaccaagggactatttcacctcattatcaaatcttaacctgattcatggtaggaggcacttagaaatattagttcagtaaattatgattgtgtccatcttttaatgtttcaaagataacatttacattttaacacctgccttcaataacttaaagtgatgaataaggaattttagttgaggccatcaaagaatatttttgaaataaaggaatctatttgataatctttgaattgtagcgaaaacacagtattgcctgtcttcaaattttaagcctgaccataatatttaaatttatttaccatctatccagtggtagcaaccttaagatcggctgacacagattattctggtaccataacgtaatgaacttgattctcatccggagtacattttttattagtctgtgggatcagaggcaaaatttgcagcagagacagttctgttcatatttaattataagaactgtcttaataacaaaagctgctgtttttatttcatctttcagaggctaaatgctacttgagattgttctttatgaaatgaaatgaacagaagtcctgggtccaactctgtggtgtgtgattattctattctagttacttcaaaatcctgaggacaaaatacagcttgaaatagaatcttagaatgaaccaaaagtaagaaataggatgcgtttcatgtctccctgactctcagctggggctccatggttgcagaggacaggaagaagctggttgtgataagggaatgaatcctcaaaatcccctctagcaattaactctggaggaaaaataatctgggtctcattttgctttaagcataactcttactattgaaagcagtcctcctgcagtaattacatcaatttagtaaaaaaggaggaccatcttcttctgcatgcgagtctaggtgatacctacctgttgctggaacagtttcattggtgagatctttaatagtaatactagtatcttaaaacacattgtggcaatgattagatttatctatacctcatttccgtgaagttggcagaatgaaaggaggataatgtttttatagtagaaagcagtaaaacagacaacttgggaataaaaatgattgctcatgtttcaagctggccagcaagaagtgacgatctaaatataagagtagctctggttatttaactataactacaagttacttagggaaaaaaagtcatcctcaagggccccttccaagcaattaaagtttgtctttgcaatgtgctagtggggcatcctctttggtactgtatataacatagctctgtagtatgttatccagattattttctattagcatatctatcagggttaacttcattgcagctagcaggaaaaataatgcaaactgttttaagattgttttaaaaaataatgtattggctcctgtaatgaaaaagcagagatcatctcatcaagattacttaatcagagactcaaggagtgctatctggacccagtttccctaagtctctgaaaactactttcctgggtgttggttctttccaggttatatattgtattagtttcctagggctgctctaacaaactatcacaatagaatgtaccctccacagttctggaggtgagaagggcgaaatcaagctgctagcaggatgatgctccctgggaaggctccagagggggaactgtatcatacttcctctcttgcttctgatggcacctgtcagtactttggcatccttggctttcagctgcaccacgccaatacctgactctttgatcatgtggtctctatcctctatctctgcatctctgaatttctctccttgtaagatgcccagtcattggacttagggaccacccaatccagttatattttatcttaatgggattacatcagcaaaccctatttcttttctttttataacttaaagttttattttagattcaggaggaatatgtgcaggtttgttacgtgggtgtatcacatgatggcgagatttggggtacaaatgattccatcacccaggtagtgagcataatactcaacagttagtgtttcaactcttctccccaacctccctcttccctctattagtccccagtgtatgttgctgccatctttatgttcatgtgtacccaatgtttagctcccacttataagtgagaatatgcagtgtttggttttctgcttctgcattaattcactcaggataatggcctccagttgcatccatgtcactgcaaaggacattatcttgttcttttttatggctgtgtagtattccatgatgtatatgtaccacattttctttatccaattgaccactgatgggcacttaagttgatttagtatttttgctattgtgaataatgctgcaatgaatatacgagtgccatgtgtctttttggtacaatgatttatttacttttgaatatatactcagtaacgggattgcagagtcaaatggtagttctgttttaagttctctgagaaatctccaaactgctttccataggctagactaatttacatccccaccaactgtatataggcattcccttttctctgcagcagctccagaatgtggttgtgttttttttgactttctgataatagccattctgactggtgtgagatgatagcatattgtggttttgatttgcatttctctgatgattagtgatgttgagcattttttcgtatgtttgttggccacttgtatgtcttcttttgagaagtgtctgttcatgtcttttgcccacttcttaatggggttcttttttgttttttgaaatataatttttacagattctgtatattagtaatatgttgaatacatagttggtgaatattttctcccattctttagattctctgtttactctgttgatagttcattttcctgtgctccagctctttagtttaattaggtcccacttgtcaatttttgtttttgttgcaattccttttgagaacttagttataacttttttctcaaggccaattttttctcaatgtcaagaatgatattttctaggttttcttataggatttttatagtgtgaggtcttatatcgaaatttttaatccatcttgagttaatttttgtctatagtattagatagtgctccagtttcattcttctgcatatgacctactagctatcccagcaccatttattgaatagggaatcctttccccattatttatttttgttgattttgttgaagatcagctggctgtaagtgtacagctttattgctgggttctctattctgtttcatttttgtatctgttttttgtaccagtaccatgctgttttgtctactgtagccttactgtatagtttgaagtcaagtaatgtgatgcttccagctttgttctttttgtttagaattgctttggctattcaggctccattttggttccatatgaattttagaacagttttttctaattctgtaaaaaatgacattggtagtttgataggaatagtattgaatgtatacattgctttgggtagtatggccattttaacaatattgattcttccaattcttgagcatggaatgtttccccatttgtttctgtcatctatgatttctttcagcagtgttttgtagttctccttgtggaagtctttcacttctttggttaaatgtattcctaggtattttattttttgtgtagctattgtaaatgggattgcattcttgatttgtctctcagattgaatgctattgctgcatagatatgctactgagttttgtacctttattttatatcctgaaactttattgaagtcgtttatcagtcccaggaggcttttggtggagtctttgagttttctaggtataagattatatcgtcagtgaagagagaccatttggcttcttattttgctatttggatgccttttatttctttctcttgcctgattgctctggcaaggacttccagtactatgttgaataggagtggtgagagtgggcgtccttgtcttgttccagttccagttctagttctagcattcaaggagatgcttccagcttttgcctgtttagtgtgatgttggctgtgggtttggcatagatggctcttattattttgaggtatgttccttcaatgcctagtttgttcagagtttttatcatgaaggaaggttggattttatcaaagtcttttcctcccaaacccctatttccagataaagttacattcgtggatactgagcattaggatttcaacatttggttttggaggacacaattcaacctacaatatatccaataacaaaacgaatgacagcagtgcattgcctatatattcctaggttcaaagtcagcagaaagaagagtatgtctctctcctaaccactcaggcaaaaccatgacctgtcattcactggccctaatgtgctcatccctgagcagtcaccgtgaccagagggatatgacaccgtgtttgtcagacataagtgccctgcccaacactggagcacctaggccaagcatgtaggaaatgtaggctttccagaagaacattagaaatcattactaaagagtaatggataccggatggccaaatagttcttatacatcaagacaatttaaaatacgtccaagataatatgattaataaagtataaataaagtagatatagcatagacatgtggttactctttacccatgatgtattatttttcttttatgttttgttgaatcccagttttattgaggtatgattgacttacattaatgtgcacatatgtaaagtgtaaacttgatgagttttaacatatatgaaaccattaccacattcaagataataactatctctatcacctgcaaaagttttcttacatcctcttgtaatccaccctcccctgccctgcccattcctaggaagcttaatctgttttctgtccctatagattagtttgcatttttaagaattttatataaatggaattataagtaggtattattttgcatctaggttttctactcagcctagttatttttggttctatccaagttgttgtgtgtataaatagctcattcatttttattgctcagtagtattctattgtatggctataccacagttggtttgttcattcacggtttgtttatccatggacatttgggtcattttcaggttttagatattataaagaaagatctcaattgggaaacgcttacttaaaattagaatgtattttatttaattatgaataaattatgtgtaagtgtaacgttcgttgcaatatttatctaaaatgctgataaaattttttcctttttcctttccagatactgaggagagcagacaaaaatggtaagaccaaaaatctacagtatctatttattaatctcttacattttatattaccttataaataataatcaggaaaaaggggacagtccgggaaaattacatataaaatactaccttattgtactagtgatcgttttagataagttttaggccctaaatattcataagaagttggcagaaggatttacatttgaaaggaatgtttatgcctttgaagtgaggagctctgccatatttggactctggcttttccttttcatgcaccaaaaaataattttgcagcaatagcagcttctattcattgagtgtctactgtgtgccaggcattgggccaagtgctttgtgcatattatgtcctagaattattacaatacaaagctgagactggaccccaggtctgtatgacacgcaagtctggactctccacactgagctttaacatggctttggagattttactgtactccaagaggtctgcctggaaacctgcattgctagctttatctctaccccattgttcctggccactgctttcctatttgaagtgtatgccctggaaatgataatctatagcaacagagaagtaggagatggcaacctcgaagtaaaaacttgctctgttgatttaatgatgactgcacaacatctaagttgtcataagcagtatctttcgactctattattccactagaaactttgtcccagagaacaccaaataaaagcttgttttgtttttgttttgttttgtttttctttttgctgctatattataagtaccatggtagaggtatattcttgacaagaatttcttgacaaatttaggatacaaagggttctttcccttttttgaaatcccatttatctatggggagagattacaggcagagtccagatctgacagtttaaagacatatgttgtggtctattttacccttatgcgggcagatcaagaaaagcttgactgacaagacacacctttctacacaaaagaagattattaatccaaggaacaatgtaatagcatcccaagtcccaataatatttagttgtgcttggccatcaaaatattttctcagactgtgttgtggtgattgatatattgtcagttcaaatgtgctttttgttcccatttgaagcatttcactattttgtttttagttttagtttttgggttttttgttttgttttgttttgtttttgagacagaatctctctctgtcacccagactggagtgcagtggtgggatcttggcttactgcaacctccgtctcctgggttcaagcaattctcctgcctcagcctcccaagtaacttggaatacaggcacactccatcacacccggctaatttttgtatttttagtagtgacagtgtttcaccatgttggccaggctagtctcaaactcctgacctcaagtgatccaccctcttcggcctcccaaagtgccgggattacaagcatgggccactgcacccggcccatttgattacttttaaagacagaaataatgatggcatcattttgtcttctcatctcatcctttggtcttttgcctgatatccagccccagggatgcctggtgtacaattgaatagcccacctgtctctatgccacctgccttgtattttaatagcagtctccagctcagaaatgcttttgctccctctccacccaagctcctagttttctcaggctatactttcatttcctagaccccaaagctctgatttaggtccacccttacctttgtatgtatttctcttctttccatcaaaattaggataatccacagtcagaacaaaaagcactgaacaaaacaatgcacatgattcaatggcttatgataacctcaaatatcgtgctgcatgaagtggtcacttgcattggcagacccgtctcatatttcctcacctgcccccactctgccttccttaccgcctctcctaatgtccattccaacatgctgtcaaactacctgcctttctgctcttacttctcaaaatcttcctcatgtatcctcctctgcagctgctgaagcactcagtccccctgggcaccctccatctgccacactgttatgttaccctgctgtgacctccgcctcctgtaactttccaccctcagtcagcttgagaacactcacgctttgcttacattcctgctcaaagacaccttatctgggaaacctcccccagttcccttgacagggccccaccctctccctgtgttctcagcacaattggacaaattagcacaattgagtgttctcagcactttggcacatattgattattgtccttaaggtggagactgcttgttggctggagattgtatttctctaagccaagcgtgcctctctaaggcaaggaacttatgttacaagtagatggtatgcccagccagtgctagatgctcaatagacatttgtttaatgaattaagaagaaaatacagtatatatactattcagccttaaaagaaagaagaaattctgtcatttgtgacaacatgaatggaattggagaccattatgctaagtgaaattagccaaacacagaaagacaaatacctcttatacatctatatcgagcctaaaacaatcgaactcatagaagcagggggtagaatggtggctacagaggcgggggagtgaaaggagtagggaggtaatagttgaagggtacaaagtttcaggaggaataagtttaatttatttttagatcaattgcacagcatagtgaatatagctaatcattgagttctgtacattttagtaccaccgagagtaaatttcttctaatgttctcatcaccaagaaatcgcaaatatatgaggtgatagagacattaatcttaatctttccacattgtattcaaaaatcataacatcactttttatcccataaataaatacaactataatttgtcaatttatgataacaattaaaataaaagaggattgaggatgttctgctctattatttctctctcttctctctgtccacttttccccctgcctttcatcccaccttactcttctccctcattctcagtgtaaagttggagggaagcagagtcaggcagtttgggtttaaaccacaagtatgccacctaggaaccttataaagagcataggtaatgacctctaccatgtcatgtggtaattatgaataataaatgagggactatccataaagttaccaggcaagtgcctggaatgtagtaacaactaaacacttgctcattttgctgctattatgattaatatcatctctattgctactgaaagcttgagctgttttttcttctgtgatgacttggctatctgagatactttttaacattttagttatttctattgcagtggagtttagtagaaaagaaaaataaagctatttaccatatatggagtatttgaaagggaaaaggatagtggataatctaatgtaaatgagaagataaaagcatataaaagtaagcatccttctgtaccatgtgttcatggcattctgtatttgcaaatagacagctgctacatgtatttgagctcttgctaacagaccctcatgtgatagagtcccttgtggacagcataattggtgacagaataacgaaaggaagaagaggcaataggcagtataattgttcgcctgcccagaggacagatttagcttttggaatctatctgacatctgacaaaaaagagaagctgctggataaattgggtggggtgggagggatacacattaacgattagctataataatgacatcttggagagatttttttggttggtttttttttttaatcataggctaggatcctaaacataaagatagccttcagagtaggattgcttaggagagatgctagtgctttgagccaaagaaacccaaattcaaatttttagaaatataaaacttctgaggaagcttatttacaggttgaatgaaaatggaaatgatacatgggtatttatacaatttgcaaaaatattttttaaatttaaatatattttattttaaaatatttaattgggaaataaaggtcaaatatattcaaggtatataatatgatgattagataaatgtatacattgtgtaattcttacaataatcaaattaattaaaacattcatcaccacccatcgtgtacattagagccccagaacttgttcatcttataactgaaagtttgtacccttgactatcatctcccatttcctccacccccagcccatggcacccactattgtactctctgcttctacgagttcaactttttcagattccacatgtaagtgagattgcacagtatttgtttttgtgtggggtggggggcaagaatagctttgaaatcttagtaagaggcaaaatgaaaagcttcatagtagtgaatagcaccattggattcctcttgttgatttgcacttgctaaggtctgctatcattcttgatcagtaagtaggaaggctatatgggtggcacaattgatccctgtttaatcactgttccctctaagagattgttatagttctcctcaggactttagtccaatccagcagcctgcacgtattaaatttgtgagagcagagatggtgcctatttcacatacccccaggtccaccgtggtgagcaaaatgcctgctgcaacacagacattcattaatatttgtgaattatttgtaagaaatgcataaccaacaatttcactgaagaaatataatcatatatataatttaatcaaacaaagcactgttgttatttatctgttgtttattaattaataatgttcgataaaatgtatggaggacatattacaagctgagtcctaccctctgtgatttatatacattgtcttcaatcattatgacaagccaacagaataaacagtttagagcagtggcgagaacataggctttgaggtcacacaagcccatgcttggctgtgcctccttctagctttatgaccttgagcaagttgttcaaattccctgtgcctcagtttccgcatctgcaaaggaaggataataatattacttctcataaagttgttttgagaattaaatgagattatgcctctgaaacacttatcctgatctcacctagtgataattgctcaatatttttagctatttttattattttccctattttttaagtgaagcaaatgaagctcagagatgtcagataactttctccaggttacattgtatgttaacagtagcaccagattagtgaacccaggtctatttcacttcatatttggtgattttttttcactttgttgtatatgcacctatgtcacctatgtatgtatttcagactacaaatatacaaatataattatagttagagcctgaatttgtatacatcttgaatatgatgttctgatgcttcaatatgtggtagtttaattgatttaatgcatttgatgtttccttggtagtctgaattatgaatgaatgactaatacacctccagaaaataatgttggcaatgaaaatcctagcctaagaatagttgatgtagtatttatgtatttagagatactttaaatacttcattggattatgatcaattaatttggaattgattatgtaagaattggtaatagtctttccaaaccggtcacctaaagtttggtttattctattaacatgtaaaaatatgaccttgagtagaagctggaacaaaggttcggtacgtatgagtatttccaataaaggctgggtcatcacctagcaacacttcagagtcccgcagagctctgtgattctgtctttcgcacttgggaataaagctgccctttgatgtgagctattcagtcaagcatcaccaccccgcactgtgctctccagaccctcttatcttctaatcagggctcctagctccaggtaaaatgtaaagattaagggccgggccctagaaatgagggacattgacataaggctctgtatttcataattcctcatactttttgcaaacatttttgggaaaataatgaaactgagaatcagataacttatagattagtagggttctcacatagctctgtactcatatgttaactctcaggtacatgcagacacctcaactacacatctaccagctcgaaagtcaaagcaaagtctattagaagtgattcatttaaaaaaagtgccctagcaatgaccttattgcaagaaatgtctcctccaccactgcaaaatatgtgggagaaacccatgagtgcaagttctgaatgtaatgatttttttaacaaaataaagaaaaataaattttctattttcatagtatgactttttttttctaaaatgcaaagcactttcacacccataaatgtgttacttttctgttaaaagcagaaaacggaaaattcttatctttacatagctgggtttatcagctgccacagaaacaaacagaaatttcagattcactttcctgagccctcaaaatggctcccaagggctgtcaaaggctcaaaaatcaggtcctgctccagatcctggagggcacacagcatagacttatcccaaaacgtggctgctaccttaagtgctttctgtaatgggcatctgtggttgtcatcccagccttcctttcctttctgttcctgcaatttaatcgtctactctgctccatctagatcccagagatatgtagcataagggttaagcttatgtatgattttgcagtcagattacctgggctcaaatccccattccacttactgtgcaatttgggtaacttaatttccccacctgtgaagtggaaataaaggcaatgcctctctcacagacttgttggaaaattaaatagatcatacacagaaactcttggaaaggtgcctggcccttaggaagttcttaataagtgttacctatttccattttttcatcctaatcctttttttcttttctttttttttttttttttttttttgagatggaatctcactttgtcgcccaggctggagtgcagtggcacaacctcggctcactgcaacctccacctgccgggttcaagcagttctcctgcctcagtctcgcaagtagctgggactacaggtgcgtgccaccatgcccggctaattttttgtatttttagtagagacggggtttcaccatgctggtcaggctggtctcgaactcctgacctcatgatctgcccacctcagcctcccaaagtgctgggattacaggcgtgagccaccgcgcccggccttttcatcctaattcttattcttatttggcgggactgtcaatcacaatgtcctggtgctgaatttttcacatggcagtgcccagaggtctgtccatgaccaccttactaagactccagagctgcactagtgtttgttctgcctttgccctggtcattcagcttttcttattgtttgcaaaccaataatcctagttgaaattctcgtgtgtcttggagttggtgctttgcgcccagccacctgacttgcccctctagatgtgtctccatctcaggacaggaaccaccaagcaacccttgttccaaccaaaagtttcagaggcttccacaactcttctctttctctagtaattccacatccaatctattagcagggcctgttggctccactgtcaaaacatcttcaaaacctagtcacttcttgctatttccaaaccttcaaccctaattaaagcctccttaatctggcacttagcatacagcaaaaatttccatattagagctattgaagacttcagaaaatcagtggcaaagatgatagagataagaaaatgcatttgatacttttggatatataattagcagatttggtaattaattggaagtgttaagtaagagagatgaaggcatttactgacgtggacatgtgcaaggttgtgtatgtttcagatttccagtttctgacttcagtaactagatggataatgaggctattaacttctttatggttatgaaagtgccttacatgtgaaaagcttgattttgttgtaatattggttacttttagttatgagagttctcctgtgaatatctgttgatctagtaataagtgatatttctgtgtttttcttaatattcaaaatcacacctaagttgttaaaaaatactgaaaaatgtaatagcctctatattatcaactctttatggccatgagaatattggtttagactttacaagaaaatattacagtaataacagtaaacaatcttattaaaagattattatgctgtgtgaggcataattttatttaatctgtataacaatattgcaaggaagatactgtcattgtcccaattttatttatgagtaatctgagacatagggaactcgtccaagggcatggagtgagtaaataggatttgtatccagattttcttctaaactaaaagtcttagcacttaaccaggatgcttcatttgctgtggctcatctctgtagcagaattgtgctgttgaaatctagaaataccaacatttccacatggagaatcctaaatgattcagtgtaatttaaaaaaaagacaaaagtatttgaaattattttggctatgttcctgttttaaggtggcatggtatgatggagagttggaactttaatctgccatttgttcattcactcattcctttatttgcttaatattttgtgagtgctctttaaatgccggagactgtgctagatggcgggaatacaaagacaaaagaatacatttactttagtatacatttacttggatgtgatcttagactaattcattaacctctctgagttcatttcctcattttttgaaaataggaataataagaattggcaggactactgggaagaaaaagccaagtaaatatagttaaagtcccaaggatgttgtttagaatattgtgagtaatcaaaacatgtcagttcccctttgccttcactaatttcttataggttctaaagatatgatttcttcacttgcgaactaaggaaggcagactataaaaaaactgagcccttacaaaattttacgttactaggaaaaattatatacttatgtaataaagggaactcacctttgatttttgcacatggatttgagaaaacttagtcaataaactctaaactcttagagatttgaggtggggtaaggggcatggtgttcggggacaacattgtcctctgggagctcagcatcttcttgatagatgagtcatgcacatggagaaaattgaatatttttcttttcttttttttttttcttttttttgagacagagtcttgctctgtctcccaggctggagcgcagtggtgcaatctcggctcaccgcaacctccacctcccaggttcaagagattctcctgcctccgcctcccgagtagctgggactacaggcgcttgccaccatgcccggctaattttttggggttttgttcagcagagacagggtttcactctgttagccaggatggtctcgatctcctgacctcatgatccacctgcctcggcctcccaaagtactgggattacaggcgtgagccactgcacctggcgaaaattgattaattttcaacatcaacgtcaacagcacaactctgctacagcgaagagctacagcaaatgaagcatcaataattttcaatgcgttcacaatgcaagaggcatcactaagccaaatgagtgagaaaacaccctaatgcattagagttctgaggaggaagaggtctctgggataggatggcctaggaaggcttatggactcattgtcctcaaataaatctccaaagatgaataaaaattcagatagctagcaaaaaagaaagatgattatcaattaggaccaattcagtttaagtgacagaaaactaattcagattaaagtaaaattgggaaattgttggctcctataattgaaaaaccccccaaatggtaaagctttgagtacagctttatctaggtgttcagaaattactctctttatctatctcctttcttgtctctacatctcaactttggtttgtgtctggttggtcttcctttcaggtaggctttcttatcaaggtggtgagatagtacctagaacccatcccaccagttcaacaggtcagaataaagagagaatttctcctttacattaattttagcaaaaatctcaagattttctctgatttatcaactagtcacatgcccatccttaaagcaacaactgagggtttggatgaagtggttttctaggcttagattatatacacacccccagagatgatgggtgcataaagctgcacctcaaatagagttggagagacagcagatgatctctcaagcaaaaatcagtgtttctaccaaaagaagagagaatagatgttgaccaggcaaaattaacagatgttcctcttttggagggtaaactagctgaaaaagcagtgattatccagtgagaatgcaggtatagaggaggggaaatgcaagcgattcgattatgtactgtactcctctttctacctctaatgcctgtgttaaaatatttaattttcatttaccagtgaaatttgtctacaaatggagtattcttcacgttgctaattttgaatctacatccgctacaaactaaatattcctccgacacgtttcatctgtcattctacgaaagcctgagtaaatagaagtgtttttttcttacttttctcctaggctcacataaaatgttattgttaattctccatggaaatgacattaaacggatttttttcactaaattaggagcacattctttctagccacgaaaactaatacacattcattccctcagaatgaagacagtttttttcattttcccagcacatttccaagtgacaaaaatattttgatgtaacaaatgagccttccccaaaaagtacctaaatatatgatgtcaagtcagtaacgagccaagcatttgactgaattatttatttttctacctgatatctgagcatttggttgattttaaactgagagcagctttaaagacccgcttccaggaatgggtctcgggaggcgtgctttccggcccctcatctgaatcatttaaccttgtcatatttcagtttccttaccctcctgaaaagacaaataagaagatgaaactacttcaagaaattattgtgactatagtcaataaaatttagactaaaagtacctcgcaaaataacagatcaaaatatacttacttgtggcagggcgcggtggctcacgcctgtaatcccagcactttgggaggcgaggcaggcggatcacgaggtcaggagtttgagaccatcctggctaacacggtgaaaccccgtctctactaaaaatacaaaaaattagccaggcgcggtggcgggtgcctgtagttccagctactcgggaggctgaggcaggagaatggcgggaacccgggaggcggagctttcagtgagctgagatcgtgccactgcactccaacctgggcgaaagagcgagactccgtctcaaaataataaataaattaaataaataaatatatatatatgtatatatacacacacacacacacacacacacacacacacacacacttgtataagcagtgacacatgaaacgaatttcatttctccaaataatctgtaaaatacatggagccagggtagaatgtctagagttaagaaactgaatctgttgagtctattactgagttaaatatatgttatatttcaatatctaatatgaataagtataactaattttgccatgttgataatgtagagtcagcttttaatatattttaatatgttaaaatattttaatgctacataattttcatgttttattattatcattattattttagagacaagatctcactctgtcacccaggctggagtgcaagtggcgtaatcatagctcactataaccttgaattcctgggttcaagtgatcctccttgtcagcctattgagtagctagtactacaggtgcacaccaccacacccagctaatttttaaattttttttgtagagacagggtctcactatgttgcccaggctggtctcaaactcctggcctcaagtgatccttctgccttggcctcccaaactaatttttcaaaaaagtttttgttttaaaagttttagatttacagaaaaattgtgaagctagtgtacagagttcccatataacccaaaaccaagtttcccttgttattaaacacattataattaattagtatggtacatttgttgtaactgataaatctatgttgataaattatttgtctactaaagtccacactttgttcagatttttcttagtttttgcctaatattctttttctgttccaagatcacatcaaagatactgagactgcattcagtcattatgtctccttaagctcctcttggttgaaacagtttctcagactttctttgatttgataatcttgacaagtttcaaggagtactaggtctgctattttgtagcatgcacttcatttgggatttgtctggtgtttttctcttaattagactggaattatgtgtttcggagagaaagaccacagaggtaaaatgccattacatcatatcaaggatacatatgatcaatatgatttaggatgctgatgttgatattgatcacctggctgaggtagcatttgtcagctttctccactggaaagtttactctttcacctcttttcatactttactctgtaggaaagtcactatgcccaacccacacccaaggagaggggagttatgctctacctctttgatggttgagtatttccatgaattatttagaacccttctgcatgggagatttgtctattttcttatttatttatttaacatttattcacaacattatggacacatggatatttattgtatactttggattataatccaatattactcaatttgttttgttcttcaaattttccctctttggccattgggagctcttttagttgactactgtgttcctttgacataccctcataattatgggtggggagtttttacattctggtattaacagatgcttcaggctcatcttttataatctctactccagtcctagaaaaaattatttctctgaggaactcaggtcttttttatcagagaatgttattagaaaccaaggtctggataattgtgctcattgttactgatgtgtcatcattgcttctaagccctttcagctaagaagcaaggaaatacatatgtgtatactaacccatgtatatgcacatatctataaatatttctgtatgtacccatgggtatctatactgagctaaacatgagtttatattaatgtctcagactctaatccattaccacatggatcgttctagactcctgtctttgcttgtccatatcctcttactcaatagtgagaaaactggctcctagcctcagccacctatttacataattgtttaatcccagtctacatgtgtaccagtatcagaatgtttaactcatagcctatggaaaaaaacttcatcgactacagcacagtcttatatacagtttcttttgcctttagcttatagacttcactattttacagttacttaagttagcaccactctccctcaatccctccagtgagattgttttgtacattcctaatacagttaaattgttttgtcacattctgcattctatcctgagattccctgaactcttaaattattttttaagattttgcatgcattaaagttcattctttgcacagtaaatttctataggttttggcaaatgcatgttatatatctatcatagcatgtcatacaaaatagtttacctaccttcaaaagtcctctgttcttgtcctattcacccctccctccaacctccccaaactcctgacaaccactgatctttttgctatctttataaatttgccctttccaaaagatcataaaattggaatcatatattatgtaacattttcagactagcttctttcagttagcaatatggatttaagattcattcaagtttttccatgacttcatagcacaactttttatcattgtataatatttcattgtgtggatgtatcaaattattttatccatgcgtctacttcagttgagctacttcagtagagacatgaataaaataatttgtttcccattttttgtgattatgaacaaagctgtgatatacattcacaggcaggtttttaagtggaaaaaattttcaaatgttggataaacacctaggaatgtgattgctagataagaatgtaccaaaatgtcttccaaagtggctaaattattttgcttttctaccagtaatgaatgtttccattgctccactttctagccaaaaattggtattatcagtttttttcaggttttgtatctcattactgtttaaattttcaattccctaatgaccatatggaacatctcaaatgcttgtttgtcatctgcatgtcttctttggtaaagtgtctgtttagatcttttgctgatttttagttggcttttgttttcttactgttgagttttaagagttctttgtatattatggatataagtccttattcagatatgggtttcgcaaatattttctcccagactgtggcttgtctttcattctcttaacagtttcccctcctcacagagcaaaagcttttcatttcaatgaagtccaatttattaatttttcttttatgatgttgtatccaaaagctcatcattcaaatcacggtcacttagattttctcctaatttttaattttaaatgtaggtctaatatccatttgaagttaattttcgctatctcaaaggtgttaggtctgtgtctagattaaattttcatacatggatatccagtgatttatgcactatttgttgaaaagatgatctatcctttcttcattgaagtgccttttctcctttgtcaacaatcagttgactatactagtgtgggtatacttctggactctaaattctgatcagtttatttatgcatgtattgttttacaatacaacactggttaaattactgtagctttacagtaaatcttgcaattgggaagtgtctgtcctcaaactttattcttcctcttcagtattgtgtttcctattctaggtcttttttggaatcaatttttaaacaccacagagtactttcctgggattttggttgaggtaacattgaatcaatagattaagttgggaaggattgacaccttaatgatattgagtttccaacccatggacgtagaatatctccttatttacttacttagatcctatttaatttctttcatcagagttttgtagttttctgcatttagaacctttacaattttgttggatctacaccaaactatttttcagcttcgattataaatggtattgttttaaatttctaattccaattgcttattgctgaaataagtaaagcaattgacttttgtatattaaccttgtatcgtatgactttggtatatttgctttttaactctagggtttttgttttgtgttttgctaatttgggagattttctacattgataattatgtcatcgtgaagaaatacaattttgtttctaccttcccaatctatataatatatatcctttatttctgcttcttgtcttagcagcaggtaggacttcctatatattattcaataggattggtgaaaaaggatacttcctaggatttcttctcaatcttaaggaaaaaaacatctgctttcccaccattaagtatgatgtcagctatagattttttttgtagttttttttatcaagttggagaagtttttttctattcccagtttgctgagagttattaatgggtgtatgatttttcaaatgcattttcttcatcagttgatataatatgattttttcctatttagcctgttgattttgtggattacattgattgattcttaaatatcaattcagccttccatacctgaattaaattccacttgatcttggtgtgtaatttttaagcattgttggatttgatttgctaatattttgttgagaatttttgcatttatgttcattagctatattgctctgttgttttcctttttgtaatgtttttatttggttttggtattaggctaatgctagcttcatagaatgaattagggagtgttatttatgcttcagttttctgaaaaagattatggagaattgctatcatttgttgcttacatgcttggtagaatttaccagtgaaaccatttggtctgtgctttattttttgtaaggttattaataactgattatttaatatatatcaatctacggagattaactatttctccttggcagttttgtgtctttcaatgaattgatccatttcaggtaaattatgaaattatggacatagagttgttcatagtactactttattatcctttcaatgtttgtgggaacaacaatgattaactcttccttcatttttgatattgataatgtgtgttttctctcacttttcttgcttaggctgattagaggtttatcaagtctatcaatcttttcaatcatattttagttctgtttattttctccatagttttcctattttgaatttcattgatttctgccctaatttttattatttattttcttctgcttattttgaattaaattatttttctctctttagtgtcctaaagttgaagctcagatattgattttggttctttcttcttttaacatttcttgcagagcaattctgctcacaattaatttgttcagttttatttgtttgagaaggactttatttcaccattacctttgaagagattatctagattgtgatgttttctttcaatactttaaatatttcactgcatattcttactgcttgcattgtttctgacaagaagtccactgtaactgcaattcttctccttagccctctatagcagagatgcttgttgttttcttcttgttctgtctacatttcctctttgtctttggtatgttgcagtttgaatctgatatattgaggtatgagtttggttttgggtgaggggagattgatcctctttggtactctctgagcttcctggatcagtggtttggtttctgtcatgaattttgtcttggccattattatttgaaatatttcttttgccctgtactctctttcttcttctggtattccaattacatgtaacactttttgaaatttcccagagttcttggatttttttaaattctctttttgctatgcattgttgtttcagaaagtcagtgttttaaaagtataataattttaaatgctcacaaaaactagattaaaattgtcacaggggaggagaaataccgacatttctattgacctatcctcaagttctttcattctttcttcagctgtgtcaagtccactgataagcccaacagaggtattcttcatttctgtaacagtttttatttatttctagtatttttttcattctctgttagaatttttatccgtctgtttacattacccatctctccttccatattgtttacttttttccagtagagccatattaatcatagttattttaaatttcttgtttcataattgtatgatttgtgtcatatctgaatctggttttaatgcatgttttgtctcttcagactgtgcttttccttgcattttagcatgatttgtgaatttttgtgtgtgtgaaagcctggcatgatgtatcaggtaatgggaactgagataaataggcctctagtatgaggatttatgtcaatctcactaggatgggctgtgtttaatgtttgctctagtggtagggccagaagcttcaaattccttttgtgtctttttgttttttctgttgactctgagtttccctaagtattccccctcaaaaggactaagtctggcagctctttcagctgtcattcaccaatatcatacaggagtccttctgtggtggtaaggagtggggaagcagacttgatctctaaacttatgattaaatctgagtctttttgtgggcgtgtgtgcctgggctgacacttttgcaggtgttttttagctgtccatgctcttagttgaggaagaaaggttagtataaactatggtgagaaaaatgcccgtcctctcaggtgggacagggctctggtaaagtctttgacctggagagtagatctttttttagggagaacatttggggtatatttcttgataactcttccccttcccctgccagagccacaaaggaatctttcttacctcctcactgtgagaaactggtgaagtttctggaggtaaaacccaccaaagtatggaggttccccaaaggctgcacccccagcagtttctccctctcatgctcatccacaatcagcctccagcaattcatcaaaactaccattaaagggtccctctcagtttatggctacagtagcttctgttccaaataagcaggtcttagctgtgattctctgcttttacctgtctttccagatttggggtagcagtttaccctgacttcagttgtccaatgaatcgaagaaaagtcattgaatttcaggtttttcagctttttgttgttttaaggacagaaatgacatctaaggcttaatgttggagctaaaatcagaagaggtattttattttcatttatatattgttagtaagttgttttaaaacaaatatatgacatgtaaaggtcagaataggagtaattaaattcagtaataatttctatgagttcatttggttctaaggattccattattattattgaacatgatgttttcattttgataaactacaatatttaaagtgttcaaaaatgctaaagtaatacataagtgaaaaaccagtgttttgagagcataatcattttaaatgctcacaaaaacaggattaaaattgctgtgggggaggggcaatactcagatcagagctctagttgttgtcatgtttgtggatgcagcttgaaggagacattaaattactgtttaaatagtctttttttttttttttaagaagcactagttttaagatttacaaacctgattacctaaaaaaaaagtctgtcattaaacataccttaaatacccattttctgtgtgtactcaataaatatttttcaaggaatagtagaaaatggaaattaaaaacacataaatgatcttcacttagcaagagtgaactagtaaatccatatctaccattgttgaactcttactatgtgctaggtgctgtgttaattgttttctatatagcctttctcttaatcctctcaatagccaggcatttacgaaatctgaaacttaaaggaattagttggtacttccaacattctttctggacccttttcttccttgttgtaggcattctccctgggagaactcactcacttctaagtcaattacttggtattggtaactcccaagcatacacctcaagcccccatcgcccattgacttttctagacccctgtgattctactactgtgcactagatgcctctacttactccacaggtacccccaatctcaacatatccagaagaacactcttggctcactccatgcttttgctcagtgttctttctagcaatgaatggtgataccatccatctgttgctcagtttggaaagcaagtcttatccacactaaggtttccaaaatatgactgtggctcctgagcactcttggggtaaattaaaatctctttatcacaattttgatggtttctcatatttcctcttcatatctaactctgactcttccttctatcctccaaatatataccctttggctaagtatagtgatttttcttttcagtttccaacccaagtcttttcttgcctcctagccttgtcatttgcattccctctgcctggagtactctttctctttaaagatcttccttcactaacccctatttttcatctgtgtctcatcacaagtgccacttcttctgggaaaccttccctatccctttatagctagacttttttttttcttttttcaaaatgctctcacatcgccctgtgtctcgtagaatcccccttattatatcgtaccatttactgtgtcataattataagatccataaaagcttgtctacctatgttcttaatacaaaacacagttttttggcacatactaggaccttgataaacatttgatgaaagagtggataaagtgccctactagcaaatggcaaaacgtgttaaaaactaaagatttttttatcccaagactgtggtctaagcaactgcactctgctgcctccatctcaaaaaattattggaatttggaacataaggccaggataatttttaagtaaagcagaggagggccaactattttcaggataaacttggacaaagcatgtaattccagttgaaaaagctgaaaaacctgtaccctttggtggtaaaagttcaaatttattaccataggaaatcagacctcacaagatttggctattctgtgagccaaaccagtataaatcaaaggttaactctgttgttccatttcaaaagaaaatatcaacaggaaagttgaagtttgaataaaatgtttctaatacaaatttataattgctttataaatacagaatcatactacaagggaatatttttccctttcctttaaaaaatgtaatacttttgtttaacattaaggctctagtctacaactcttcaaaagtaactctttgcaattgcttatttaaaagtgtggccacctaaagtgaagtctttcaggaatactgcatgtggtcacaacaggttttcaaagcatactttccacccttcaagccaagactataagctaatgcttcctttttctttttatatatttttttctaataagaggatttttttctaaataaaagtcttttagccccagagaatcatcagagcccttattaatcgatgcttttatttgatagaatgcacattattatttgaaatcacttacttatcataattataaagcagtattacaggggcccaccctatccacagggtgcacaggcaacccaagtgcagtaatagcctgtttccactcacctgagaaatattaaccattcaccaaggaaaacatattccatcatcaatgtattcgtattacattcactacatatcatagtgttggagatggaaatagcaggtcgatttctgttttttcttttttctttatttttttttttaaacagtacatgaaaaggtctttctttttcgctctttaacctcagtctgatttgtgtccagtttttcaacctggcaatacatttttcatcaaagcaaggagatacacagtagaaataccacactatgtcttgtctagcatatccatcaggttacatggggctaagtttaaaatagtcatatgaggcataaaactacctcattcaaaaacagaaacacaaaattaggaaattgatgagcctggggattgaacttcattttgcaatgggttgttatgtcacctgaatcgctaagctggcttggcccaggaggacccagaagatcgggtccctagatctgtgcttgattcagatctggatttattctacctctaaggctgtgtctgcccagttaaacgttagcaaaaattaactggaaaattagattattgtgccttttgtgttaaaaagcaaaatgaaatacaatttaaaaccttccaggactatttatacttatattttttgcaaataaggattttttaaaatgttgtagtctgtaagtccttatctgaaaaaaataagtaattctatgattaggcttattttatcctttataataaaaattcaaatttcttgtctacccacccctccatgccctctgtgagattctaattcgcttgtggggcctaggaatctgcatttcagcagtgctccaggcaatgtgtgggccatattttggggaaacaaaatgttctagatgaatctagaggagctctttctattaaatcaaacattcttctactcaaagacaaattccactttgttcagtatagagttgttggtagaagtacattataggagtttcgtgaccctggacaaattccatcctccttaaacctcagttttctcattgtagatggaagggatcttactatcttttacagttatttggcagcttatctgagataactgaaaaactagctccctgcacagagagaaagatgcttccctctcttttctcatccattcgtttctctaggtttgctgctgctgcattttgtacaaatcttttgcctgttattaatgtgtttcttccatctctgctgatctagattttacctgttgtccaaagtcaggggtgaatgctactaaaacccctcaggccctcaaatggaaagaatcttttgttacccaaactcccatacagttaaaatacctctgtctcttattgcattaaccgtattttactgtataaaatacttataatgtctgtatatattatctcttttatgatctcttttattatatgttatctctctgattgggtttcacctttgtgccctacagtaagtaaaatgtctttggctttaaaggtactcactgatttaaagggcataggaatggacatagtttgttagactataataacaactctgatatacatttattaaacacatcatatttatcctgcaatctgctaggtcctatatgtgtttggtaccatgaaggtaaaacatctaaataattgactctgtgttgagctctttatttggttatgtggacatctttcttgtatggcctgttaaatggttcattaaatgttaaatgtttgtcatgtgaataaatgaaccaaaaaatacctagaaccttgtagacttatattttattagagtgtacacatctgtgttctatgttatataaagatatattaaattatttttctttttaacaccttcagctgttctttctttttgagtacacgtgtgtacatgaacaagcgtttgggtgaagttttataaagcaaaaacagaacaatgtacaaaattaaaataatttgtgtctctttgttcttgccatttcagatgatggaaaattatcctttgaagaattcaaagcatattttgcagatggtgttctcagtggagaagaattacacgagcttttccataccattgatacacataatactaagtaagaaacttttttatcactggattccacaagtgaggcacagagagcgtgaatgcattcatgtccaggaagaagaaagggaagaacaatatagagggtatattttgccaagtttgcctatgcttaattctgagatacctctttagtaattaaaattgctctgaaaaattgactttgaatcagaaaataatgatcttttgtagaaagctcccctgaagtgtttttagattgttcccactttgcagaatgtaaaacaaagtataaattataaataaatatagttctgccattaatttaaaaagtagaattttaccttgttatttaggcttaatctcaatttgctttgtttaaaaattattcttaggccattcttacattaacacagtgaaaaggaagaattgtagcagttatctggacaattcaggtgtgctgaattccaaatcactgttacctgaggacataattatctctggagagccaatgtatatggtgatccattcttttacttattttgcctatatagatctctcttttgtattagcataacatttctgaagtttctatttatattctcactatgcttaaaaatataaaataatgaggactttagggtatagagcaatagaaatatgctgcttgttttgggcaattgaaccaaatcagattatttgtgacagtcacagttacaaaacgcttatatgaaaaaccaccatttcaaccatgtcttcagacctatcagtgtgtccattgcttgaaaaatcattatatttccttaggcaaagtgttgagatggctccaggcagtgagccaagatgccaagaaaatgctcttgggctacatctataaacagacatttttttgaagctaactattaagaaaaattaaaagattaaattcactttactcaagctgttgaatattttttaaacaaccaatttagaagtttcttgacttcattggggtttcaaattcttcatcaaacagcttaagtattttgttgacagaaacagtattcatgggtaactatactcaacaataactctagcatatcaagtccatagtaggtattggtggtacaacatggaaccagcttatggttttatggagaaatagaccaatcagctgatcgtatcaatataattcataaatgctgtaattgagctatgtacaggacacttttggaccataagtcccaaaagggaagaaattttagcccaattttttaggctcggggaatatttacaggatctgagtcattatgagagattacaaattccttaggtaaagaaaggggtggggagaagaatattctaatcagagggagaagcatgagaaaagtcctggaagaagaaggtgaagagcagcaacaagtagtttcttactactaaagtatcagctggaaggctgagagtgaaagatgaatctggagaggaaagaaaggaccagacaagatggaatttgcattctgtgtttgcaaaagtgcttcaactttatcctgaaggccagggaaaactattaaggaaattgagccaggctgcaacgtctttataggtaattgtggatctacttaaggacaggcttaaaggggtaatagttgactccttaaatcgctactggggaagaatgtttattcgtgaaagaaagaaagccatgttgcactttactgggatatgatgctttaaagaataaaagagcagaggctccccttgcggcttaggtgttggacgttgagatgctaatgctttgttatgtatgctgattatttcttcctcgttacaattagtattgaagtttaaacaacatttgggtttggaatatttattgaaagccataatagttccagaattgggtgttatgaagatttttaatatgttacatttaatttatattaatattaatatttattcatactaatgaaaaataaagttttcaatagatcttgttagcctgttttgctattttatttatataattattaatttggattacttggcatagctttaagactactaaatgttaaagaagtatatgtaatgatttatacagtaagtctaaaggaataattattactaccagtttctctcatatgcattagtaacaggtgttttctgatcataatgatgttcaactttaatttggagctaaagtgtatattaggtagagacttctgaattatattcatgaaattcctttttttcttaagaagggatatcagtgtcagtctttgatcttttactgagattaattcaaatgttggcacagaaattttggagctatatttgaagcaactgataacttttatctttgcatgatccaagttttaattattttaacaaatgcactatatatgccaattattttctccttccactcaccttctaagaagataagttttcctccaaatcctgcctctgttcatatccctgaccactctaatttaatcaagagtacagcctggcctgaaggagtcagtcatacataacctggaccaaaacagtcagactcactgtctcacactgtttgtggtaggctgtgagagtcagagtctatgaacatttgctgctgaggcccctgtggctacccagctcctgcctttccttatgtctggagttgtgacttcactttggagtccattaaattggtatctccctaatacactgcattttcttgaacttgtttaagattctgttccttgtgaaagaatgttctaagacagtgttacccaatcacagtcctgccatctctaaaaattcaagtctttttgctacaaatattatatttgccatgcttgaggagtgacttatccactttgagaatatttggaaagaaagaaggaaaataataagaacatatctggctacttaatttttttccttttatctcatgaaaatactcttaaaatattatgcttgattatgaaaagcaaatattgttcagaagcataattagagcttgtgtctatagtgcagtataattattttaaatgtcaaaattaagtacattattcctcataaaattacattaaaaaagcatcatgtaaacttatggactttaaaaggtcatgttttataagttgcttttaaatgaacaaatgataaatatagagtagtgtaattatttaaaaaaaagtcttaagaaaacaaaaatatattgccctcttcacacaaatttagatagcagtcataattcccaaatctaactctactggtttttctcttttgttttagtcacttatttctttaatctttcattttaagaaatcaatatgttcatttgagaaatttccttaagagtagttcactgcagtttttttttttttcttttgtatgccctggaattacttggatcttttcagtcaggttttctctcaggaatgcaaataaatcccagaaaaacaaaccccaaatacatttaacctcaaaataactatgcaaagatttctgcaaagatttttgtatatgaatattaccaaggttggagatatttcaggtcttaatcatagagaatgtttttagtgcatttcaaaaccaaactacctgtatcaaccacatgtccttatatgctaaggaaagtgtctagcagttgtaatcacctttcaagcctgcccaggcacaagcttaagctcagtgctcagtataatctcactctaatgagaattccatgaatcatcctacttgtttgttgctgtattagaatccttgtatagtgactgtttgccagaattcctaatctatatatcctgaagatttcattcagagcagcaactttagaagtgaaaagaaccctgagtaaaagtaagagaaatttgaaggcatgggaaacccagctttccatcaccttttaaattattaaattgatagatatttttcattatgttcagacatttggaaagttttcctgagtttttcttgcatatagtaattgattgagtgtagaacaaaagaccagcttctttctgttgatggtacttgggatattttgcatggcaaaggagaagaaagtcaaatatgtttttgtcatcagggcaaagtattgctgaaaactttgatttttctcaagctttaagagaagtgcatacaatttaatattctgaagtaacctgaaggatatcatgtccaccttataaaactttcataatttcccagatttttgtcaagcctcattttaactgtattatttctgggccaaatatgcttaatcttccattttcttttaaaaaattgttaatctctcaatcattgtagtgagccttattgcaccctttccagactcattaaagatgttttaaactcacgtttttctcaacttttataaagttactcttcagaaaagatacttagagcccttaaaatttgtttgtaaaagaaactaacctagcaaaaactaaatctatagcttggtagcttacaaattggaaccatcacaccagttaaagagcaagaataaatacaggaaagatcattaagaggaaacttccatggttcctcaaaagtgttcttattcatcagaaagttagtctgtctacattttgcagttagctataggaaactatgatgaatttagcataaatccttgtgatgttaattatagtagagaaaggggagagatcccctggagaccaaaaccaattttcccagcacactgcactttggagttccagattgttagggtacatcaaatggtagaccagatggacgtttcacttctgtgtcagagagtgaacatacagaaaagcatcccagggccctcagatgggagtctgtggctagagatagatgactgatatcttctgatcaagtgttctttattccaagctaaaacaattttttgggtgctgagcactgggatttcaacccagtacttgttaaatcactgaagcacaccagagtgacaaaaatatcaccacctactaaaagagcatagtccatcttgagctagctctgaaagtttaaaaagctcttttttaaaccaaactgaaatctgtctctcttaacttctacttggttctgctctgtagggccgttcagaatatgaatattttatgacaagtctttctaatatttgaagacagttttcatgtgccaatgagataaagtcccataataattggaaagtaatgatttcaaaggttttgtttcagatggcagaattttgctcctttggaaacagaaaaagtgcttcaccttgtatttgtgcaggcagatacattctaaagcttgatgagttaggtgatgaagcccctttctttcttgagttatcttttacactgcttaagtggacatacgctgtgggcagtagaaaaagaaggaagggtcagtgctcatggaataggcagtaagttggtccaaagagcatggagcacaatctgcatgacattgcaactacaaagcttattgcaattccaatagtggacaagagagatctcctgcttaacatagcttataccatcttcaactaagctgaagtcttggaaagcagtaccaagacttaagttcctggagaatagagcaggccacagtcccaggtactcagctaagcaagtgtggtatgactgagagatacacaggaaggaacaagaaaagagagagagatggtgtggctatatatcaagagaacaaagtaaagatcaaagtccagagtacatcagactaacatgcaatgaacaaaccgggcttgccaggcttgggtttcagcaatacaaatttggccaaggagccatggcagaactgtgctccaggtattcagacaagccctgaactggccatcagtaaactagcagagaacacagagtccagttagaacttctttctatccatgaaccgaggcttggctgtggaaactaggcagtgggctgatctttgtccaggctttaagtagctttcttggcataagcagatacaggccagcagatgtatgctttttttgagagagaggcatgattttcagaatactttgcatgccagatgagggatggagtcagaggaaccacaaagctgtggagagaataacatacttttgacagatttttctcaactcctcttaggccctacttgagagaagtcacagcagggcaaatgattttgtagtaggcaagaattattggatgtgagtgacagaaacaaattaagctgacttaaggaaataattgtctggctcacatgtcttataggtccagagatagatttcatgtgtgctggaggtagctactcaaatggtgttgctgaaaaatctgtctcccatcatctctcacctcttcttttgatggtgttagctgttctcttgggagggccctctcgctgagaggccaagatggttactagaagctcaaggttcatattgccactggcttagcaaatactcagagaaactgcttttatttcccaataactctcagcaattcctggttttgaattatgatagcctggcttagatctcatgcatatccctggacaaatcagcattttcaagaaaacataatgcaaaatagaaccaggatgctgtttcagaataaaggtgaatagatgccaggcaggcaaaacttgagtcccccgcagatcaaataactgcttattcagcctcaaggacttctctttaccctctcatattttagaggaagataatctccttccccaagagggcaaggggcatgaagtttaaactccagagagttcttactaattgtgggatcaatcaggaaaatctgcagctatctataatgggaaacactgaagtcagggagaattctgttgtcagacttcctggtcccactgagctgcccagggttctatcccctgacaccctcgcccttcctgaccatctgattgtttccattcccaggagtcctgctttcccattctcttcctagtacagccatgcctctgatgcccttcttttctcctaatggtcttgacagctctttgtattttcagcaacttccaaaacttagattttgtaacatctggttttcttctccttagcctttctctgtaatcacccccttagtatagatgttctgggaaattctcacatactgtgctacacttatttcttgagaatttaaaaattatgaagaattatgtacaaagctaagaaacactatttgattatatcctatacaggtgtgctttttaccacatttttagaggctgaaaattgaagtcttacacttttaccaggactcactctaaaccattactgggcctacgattattgattccatttggatattagaactaacctgtagccattggatttccttatcattcactgatttttaggtctgcttttcacttcaacaattactgaaacccatttacttgctttaactgaaacccatttacttgctttgagaatctttgataagctcacaaagatatggagagagaaaaaacccaaagtggttttaaaaactcttctttcctaggaaggcatttcactggcatcactaccatctccttctaaatcaggccactccacaacctgcagtgtggattggggcactgcattcttccctggaggaagagtgcagaatcaacaagccaaattctgcctcataattaaaagattagcaaagtttggagaatttataaaggagagaatgttaaagggattttttcaaatgacatggaaatggtttattcttagttataattttttggaaaaagaaaaactggttctaattttctccgacaaaaatggtagtcaagtcaaattttgtgtcaaggcagtttctatataatttctaaaaatatttaatttctaaaggaaatgcttaatttctaattgaataggaaaatgcatttatgaagtgattatgtaccaggcaattaacttgtatcatcttatttaatctttaaaaaaaccaaacaaacaaaataagaatgtattgtcattcatagcctacagttaagcaatctgatacaaaaagttaaataacttgcccaaagttacatcaatattatgattaagggtctggggttttctcaggtctgcctgaaaaccaaacccaagctctttccattgccatatcatctcaataaaatttcatgttttttgctttatatttcatgtatcagaaatcaaaatattccaaggcaatttttaaaaatcgctttcagtaatttatccttgataaaaagatggttaattctctctaacagtagaatatatttgatgtatactatagaggtaattgctttaattgctgcctttttctcttctctttttatatctattatgtagggtttttacagtgtgggagttgctacaatgtagaaatgttattcttcttttctgtggacattgtttccactctttgcacattttccctccttctatcctacctttatacttagaaatcatcatctacttttagacttagttcctgccatcctccatcccatcactttgcatttgccatattttctctattgctcttcagagtactcacagagttttactgtttcctttaatcgtttgtattaagggccttttcaaactttttcatatcttttttatattttcttatctagagaattttttttctggttttcatctattcctcccaaaaaaaagcttaaattctttttttttaattttactttaagttctgggatacatgtgcagaatgtgcaggtttgttacgtaggtatacatgtgccacggtggtttgctacatctagcatacatgtgtttaaattcttttttaaacttaattgaactctttctttccgccagccatgaaagagttgccattagtgaagtaaaatcaattactgctcaaaataaaaattgtctactgaggaagctagatgaatgatttattcacataaatgcagtttttttcttaagtcatcaatatccaccagatggatgaaatcaatgcagtaaaattgtaaccccaatctctctaaaatacatggtgctcacttcgtggacagtatttttcctccatttccaatgccccaaccaattctgtacatttttctcaagaatggtcagtttaagaaaacagttacagttgttctccatgaattcttaagatttcagaattctcagccaggcgtggtggctcacgcctgtaatcccagtactttggaaggctgaggcaggtggatcacttgagatcaagagttcgagaccagcctggccaacatggtgaaaccccacctctattaaaaatacaaaaattagctaggcatggtggcgcatgcctgtaatcccagctacttgggaggctaaggtatgagaattgattgaacccggcaggtggcggttgcagtgagctgagactgtgcaccactgtactccagcctaagagacagagtgaaactgtgtctcaaaaaaaaaaaaaaaaaaaaaaaagatttcagaattttagaaataaatgtagattacaaataaccaaaaagtcactgcttacttttgaagtgcaggttttttcaagagcaattttttaaggaaaatatttcccccactgctatggtctgaatgtatgtgtttcttggaaatttatatgttgaaacttaatatccacagtgatagtattaaaagagagggcctttggcaaatgactaggtcataaggattccaccctcatgaatgggatgagtgcccttttataaaagagccctgaaggagcttgtgtgtcccttccacttatgtaaggatacatagaaagtgccatcgatgagtaacaagccctcattaaacaccaaatctgttggtgtcttaatcttcgacttagcctccagaactgtgagcaataaatttctgttgcttataaattacccagtctgaagtatttgttagagaagcccaaaaggactaagacactcacaaaccaaataatataaacagtacataattattgtaaaaagagttgaaaatatagaaaattagaagaaagagcataaaatatctgaaacctcacaatcttgagataatcaccaatagcatttggttaccatagcttttatgtatgcattctattttaatcatggaaaactcttgcttttagatttcttttccttttctaccctctatccttatactatcccccataaccaatctttatcacctaaattggtcttgtgtattttttccatgtttatgtaatcatatacacatctatatgtctcatgaaagctttccctgactttcttttttttttttttaaaaaagagcccgcatcgactttctttattagtttaaaatttctattctgcattctcattgtaacatggactgctctttacagcccctatattatttacaattttatatttattagggtgtttatttgactgggatttactgctagcctaaattccacgaaggcagaggccataactatcttgcttttcattgattctcagcatagtgtttagcacatattgcaagctcaataaacatttgagatgataagagataaattcctgcttcctcaaatctcatgctatgcctgactagccttgctcttcttagcatagtaaagttttccaggcattagaggccactcaatgccataaaaagcagtattgctatgcagaaagaactcagacttgcgaggcttgggcttatgtccctccactatctgtctatgaggagtttgggtggtcatttcctttcattggaccacaatttcattggctttaaaagggagccaacataagaacccattttgcggaatttaggactaatataaaaatactcgccacaaaataataataataattattattattaagatgtattcactaacctttccttttcttttggatcatttgctttctccaaatttctgtaattatagtttgcaccttcaagaggtaccatttaattacataatatcttctgttatgtttgctaattgtttcattagcatgttaatcttgtctccaaatacaattgtaaattcctgtgaagcaaggaccattgttctctactacttccagcaattgctgtaatacattcaataagtgcttggttacttgactgatacagaaaaaggatattttgatttgatgtaagaaaggcgtgcaaaagcacattgctggtgacttttagagtctagaccctgcctgattgatcatagaaagagtaatgccattaacagatcttatcaaacacagaaggagaactgattccttttgtttgggaggaggataaatgataaatttgactttagactctcagttaaactcaagcacttttgaatgctattgctatattaaaatagttctctactcctgtgacttaaaggccgtgaaatataattttggatgtaaatgtggattattttcatattttaacagacacaaaatacgttcaaatgaggagtttctttttcctgatataattattggatcttcgtttatatgttaaaaaaagttttcattgcttaaaaagacgctccaacattgcttaaaaagaagctcctgctacaccgaatattatattttctgatctcttaaaaggtttctcactgggaaaaatagactaaatagcaaaagcttttagcagttaaaatataagaagaagaaaactgggcatgagaatcagctgaacgttattgttcttgtctcattcactaatgggtttaatagtttaattttattttaaggttctcctgggaacttatttttagtcaactttagattaaaaatggtagtttagaataattagaaatctacctgtggtgggccatagggttttatcatttacataactaacttttcctcaatcttccaccatcctcattgctgtcagattaaaataaattttgacttcagagtggcacaaagagtttttattttgtttgaattgtgaatagtttccaagtgaaaattcagtttgtcagacttgacaaccattattctagttgagtttgcagcttccaaaaaattagtcatttgttccctaattattcatttatttattcaacaagcatttattaatctgcagtgatatcatgtgccatgtattatgcataaatgaatgaatattactttatttttatgggatgcagacatactgatggatagaaaactattttccaaatatctcatggaggctgatgttttgccaaaatgaaggcaatggctcatatttactatgattgaggagcataagaagcactcttgttctttaacatttctatctctatgcttgtctttaactcaggatctttgcaatagttaattgttgataaaatgcactttaacacatttaagtcatcattttttacaaaaattaaactgtcaaaaattattaatgggaaattaacctttaaaaaatggttccaaaaagccagagatgcctgggtaatgtgctgatcgcagggaggtcacctgtgctactttggccgaaggccagccacctaaggaaataatatagatggggcagtaaaatcccattacagtacatttatctgccagggataagttccaagacccacagtggatgcttaaaactccagatagaacagaaccctatgtatactacgttttttcctatctgataaccaagagggctactaaatgactaatgggcaggtattgtatacagtgtggttaccttggacaaagggatggtttgcatcctgggtgcaactgcaaaaggcttctccacactatttagaacagtgagcaatttaaaatttatgaattgtttatttctaggattttccatttaatatttttggaccacagttgactgcaagtaactgaaactacgaaaagtgaaacattggagaagggaaaattactgtaattgaaaaatgattgatcagggtcccttctgtggattcatcaagaatcaaatagggacaattacaatttgacctttatttttaaaatacaagtggaaataatagaattgtgtctagtgtctctgagtctcttccactggcttctctctctctctgcctcttgttgctctcttgctgtgatccttttccaagcttgagcttgacaaatcattatgtctgtaccagacttgtttaaattagaatggactgtaagaggtttccagtcattgagtttttgttttactatttaatctaattgtttcttttcatttcaacttgtatgctgaattcctagccccaaatttttgccctttatattttacatttcaaaatctctttattgtgcgtagagctaattgtgtctatgtcctggttggctcataaaaattcatagggattgtgtctttaaaatagagcatagtcagagaaacatattccaatgaaaaaataagggtgtgtttttttaattaattttgttgaatgtacgaaaaattattatccttgttgtatttgattgaaactattcactagagtgaagaaagtacagtaagtcttcactttacatcattgataggttcttggaaactgagactttaagtgaaacaatatataacaaaaccaattttaccataggctaattgatgtaaataagagttaagttcccatagcatatttctagtcataaaagcatcataaaacctctaaataaagacccaaaacatttctaatactaaatattgaaataagtgtgagctatatatacatttaagaaacactaataaaaacaaataagacaattatttacccacttactccagttcagggttgcaggtggccagagcctattctggcagttcaggcaccaagtaggcaccagccttggacagtatgctgtcccatcacagggtgcatgcacactcacacccacagtcactcagcctggaaccattcagacaggccagtaaacataaggtgcacatctttggaggggtaagagaaaatctgagtatctggagaaaactcacatagacgtggagagaacatacaaactccacacaaacagtggcctctgtggggaatcaattttttcccttgtctatgttataacaaaacgaagttgaatgaaacaactctattcaaatacctgctataatctatatttccaaactcatgacagaaatctccctttcacagtcagctgctataatctatatttccaaacccatgtcagaaatttccctttcacagtcagactacatagaaaattctgtccttgatttgttacttaaagttgcttgcacaagatttcttaacctgggtaaaatcaacccctggaaacttaatataaaattaaatataaaatgttattgcatattgcctatttttattttgagaggaatagggaagggatgattgatacattttatcaggctttcagtgttctgtgccaaaacagcaaagaaccactactcatcttctctcttaacttctaaatcaaataattaatcaacttttaataaatcattttatatttatctttctataacaaaaacagtttaaatatcggaagaggctaccacaaaaggctagtgaagtttcttaggaattcctgggaagaggatccaggagattagggagagaggacaccgttaaatttgaactctgaagtcaacccaagtctaactcaatttgtgaagtcagttgtgtattgcctatacaaactgagcttgagcttgctattccctttcaatgaggagttcctggtgttctccatgtgcaagttattgtaccagctactaggaatatagtggtggtaaacaagggatttatagtttagcagagaaagtagacaagcaataacttgattaattatgacagggagatatagtgctttgagaggaacagggtgtgctaaccttatcttaatggttagccaggacctcttagagaagccatacagttttactaagaagaggtatgaataaggatggagatagagatgatgttttcagccagagagaatagcacatatggaagcctgtagacgagagagagtgtggcatgttagagaagctgaagggcattcagcatgcgcagagcactgaatcagggtggagagaggctagaaaagccaagaggggacctaactgtaaaaggcttgagaatcagtggggtaatcaaatttctatcctgaggtcagtgccaagccattgaagggtcttaaacctgggagtgactggattaggtttatgttttcaaaagatagatctccccaaggcaaagagaattggtgggagaggacaagtctggagacagcaaaaccaggtaagaggtgcttcagctgtgctttaaaaaatgttagctggattttgaaagatctgaatctctagtctttctgattttgcctaaatctttctgatctggaaagcttttgaataagaataccctgatgttgcaaaacaataataataacaacaacaataataatggttaacatatatggctcagtttgcataggcaatacagaattgacttcacggattgagttagacgtgacttgacttcagaattcaaatttaacagtcagggagactccctaatctccataataacatttatggattactaacaataataacggttaacgtttaccatgtgccagacctaagcactttccattcatgaacttacttaatctttacaacagatctatgattgaccacattttgcacataaggaacctgagccacagtgagattgggtcactttctcaacattgcccagagagtacgcactaaggcaagccactctggctcttaagtgttattctatgcagcttcttactaaattcaactttgttcactgcctttggaatctgtcagagtggtaatcttcattctgtttctgaaggccctggccgagcaaattttttattgctttactatccctcaatattaagtggagctaataatattttctggcaagaaaattgtaaaaacgtatgagcaaatttttaaaagcagtgtagactgctagccaggggaggtgatatgtcaatatatgaggtttgtttgactgcggtcttagagtgcagaaccacataacgcacagtcattgctcattgccggctcttgggttcacaacgggaaaattgcagtaccagcgaagccagaccattcatttagttctctgcacattgtcctaactcttctttgggggatgttgctgctatttgtggtgggggacacagatatcttcaatcaatagaaatctaatatttcaggaggaagaacaaaatggtagtggtaaatctattcaaaaaaaaaaaaaaaaaagtgaccaaagccgggcgcagtggctcacgcctgtaatcccagcactttgggaggccgaggcgggcggatcacgaggtcaggagatcgaaagcatcctggctaacatgtgaaaccctgcctctactaaaaatacaaaaaaaaaattagccgggcatggtggcaggcgcctgtagtcccaggtacttgggaggctgaggcagcagaatggtgtgaacctgggaggcggagcttgcagtgagccgagatcgcatcactgcactccagcctaggtgacagagcgagactctgtctcaaaaaaaataaaaaaaaaaaagggaccaagtagttgaggtagttcattggaaaatagtgcatagaagtgacctatcttgggcagagagcccttcaagattaatatctccctttctgaagaggcttagaaatgtgcacttcagttgacaggaattaatttttccctcactatgtcttcaagatgcaatagtaccttgtaaaatgggttttctttgaaaacagagattaacatagtatcgagatgcatgagggtcaaaagcaacttcacatttttaataataggagaatattggaggccacttaggcttgtgggtatcacctaagaaaggaagctaagaactgtcatacctgctggggactctgcctgcctctctcctccttagggtttacttcagcaacagtgaaaatgacctggggatttattttcagggacaacaaggaaagggggaactgagcattctgggtttcagtattgagagaaaagaatcctcttgatgaaaaatggggaggcgacagctctgagaattacagaaaagcaatctgaatccttgcatgaaaatggcatgaggaggcatctcaggcctgagaaataaaatttggaggctttaacagtcaggagcccatgcagttctctaaaaggtggaccctgaattatccttagcaaactaacacaggaacagaaaaccaaatactgcatgttctcatttataagtgggagcaacatgatgagaacacatggacacatggtggggaacagcatacactgggcctgtgggagggtgagggtgagaggagaaagagcatgaggaataaaagctaatggatgctgggcttaatgcctgggtgatgggataattggtgcagtaaaccaccatggcacacatttacatatataacaaacctgtatatcctgcacatgtacccttaaacttaaaataaaaggtggaaaataataaaaaggtggagcctggggagtattacatcatagaccattggaagcctcctaaaaggtccatccaccttcaacctcaaaggtcaactttcatctttgggcttgaagttgtatacactacaaatctatatgcctaacgaagagatgtgatgttgccttttttttgaaattttccattgtttctcattccttaaagataggtggagggtaggagtgagggttggttaagctgcatctcacatgatagaagctgtctgcaggggaacatcatcagcaggctttcaaggacctggctgtgtgggtgggcttattggttgctgtgagctgtttgtttcatgtgggctgcctgctagagcagcttgtctgcagagatccttgctcttcaaatgaatgctgggctgtctggcctgccattgtgcaccattagagttttgtgaccacactcagagacgtttccaatgtaaggcattttctgtaacaacacaaactgccaagaaaatgctgtcatttagatggccagagatttttcctttgttgtctgttttaatggatgtcagaacattatgcatgatttttatggtgtgtgccttgagtttcactaaagttgctaaggcctttatgggtagtgctaatggtacgtgattataagttctagaaaggttgcctcagaaagtggcaggtagggatagatggaaacatgtaaggtttacctcactattctgtgtccctttcacattgtattaggccattttcatactgctatgaagaaatacctgagactgggtaatttataaagaaaaatgaactcacagttccacatggctggggaggcctcccagtcatggcagaaggcaaaggaggagcaaaggcacatcctacatggcagcaggcaagaaagtgtgtgcaggggaacttctttataaaaccatcagatcttgtgaagaaattattcactatcatgaaaacaggaaggggaaaaacccacccccgtgattcgattacctcccactggatccctcccatagcacatggggattatgggagctacaattcaagatgagatttgggtgaggacacagccaaaccatatcacacaccatttctttggttgaatgagtgtataattgctggtctctttccccccatcatatataagagagttacgagtaaacatctcccctagcaaaagaaagagaaggatctttttatgctttctccttctgttctttttctttaagttctgaagcaactatgatatgcagggtcatgaatagaagatctttaatattgcttagcgtgtagcagagaatgaatttgttgacttttccttggctgtattgtctattgttagagacaactgactattatacgctcatccgccagaacagtgagacaaagtaggtggcaagatcccaaagataattcaacactgaactctgagatttgcttcatttcgcttaaacagatatttattgagcactggctgtgggctagaaactgtgcaaatgcaaaatctagtatcatttttggacagcagtacttccttttaagctggatcttcctcttgtatttttagatcactgacaatgtacatcaaggaaaagaaaaaatccttgcttctggcagagaacttctagtctaaattcttcatcttgcatttgaggaaactgagttcagcagagctaagggacttcccaaaattatgactgatgaatgctagcttggaacccatgtcttctgaatccatccctccatctttcctctattctatactgcctttttccttacaggtataacagatcatgaaactcaggtgggtagaaaaggaaaatggaactttttttttcctgtaactcaatttccattttaagtcttaatcctaccagatgttagaaatttaatttcagtcaacttggggtcactttcctccatgccttggggttgtatacaaatctggggtgttacctagtgcaaagtcatgagagaggagaggcatctctttctctctgcttagttctccatgatgcatcagcaggggtgtcttcattcccacttgacctttggttagtagttgaggtaggtccctgcacttcctcctttcttcttaacctccagcccttttcaagtctgccagctccctctgtgatgttaccactgctctcagatcctaagggtccctatagtgttttcaaaccagtctctagtgcaagtaattcttcaaaattatctcagtccttctggccagacatatcatgcagatatgtctgctgctccccaccaggctgatggaagagagcattctttctatctgcagatgggtcacagatcctccctattgtcagatcctccctactgtccttatgtctaaacttctgtagggctctcccacccgcaacatcatttccaccactgttttcatcttacaggcttgacctacaggggaaaacagcatagataacacctgctccggattcacctgaatctaagctctcttcactttcactttctcccttgttctagggaatctttatccagttgggagatgaaaaggcttgacttagttattactgagctacgttcttctaaatcttttctcttacacctgggtctagacttttttaattgaaaagttaaaaatttggcccattgtttgagtcagagttctctagagaaacagaaacaataggatgtgtatctataagaagagagatttattgtaagaaattggtttacacgattatgaagtctggcaagtttaaaatctgcagggtgggtcatcagggtgaagaccaaggaagaactgatgttccggttcacgtccaaaagcaacctgctggaaaattccctgttgctaatggaaggtcagtcttttttcctagtaatgccttcaactgattggataaggcttgcccacattgcagagggcaatctactttgtccatattcctttgatttaaatatttacctcatccaaaacaccttcactgaaacaaccagaataatgtttgaccacatgtgtgggcacagtgaccaagccaagctgacacataaaattatcacatccctctcctgtctgttgcctgccttgtcattgcttctctaagataacagcagcctactcagtacaaggaaataatagcaggtgctgtggggtaaaagcagatggagagaatttggtttatattttttaaaatacctagcatgcatacttatattatgtatttatttattttcacttgtgctaattagaactacccagtatgctacttcatgttttcatttttgcagaggttttaatctttggttttcaaaaaaaataaagcctcttaaaagtaggtattggttcatctcccattgattgcagtattttgtataaatagacagtaagttccattaattgaaaatatttcattttaaacctcaaggtacaacacagtattaagtgaaagctatgcaactttcaagtaatatttgtcaccagaaaaaaatcaaagtgtaaatgctttcattgaacttgattttcaaaaaaacaatgttttgagacttgtattttttgcctttatgcaaaatcaaaggtcagtagtcaggtaaaaattatagaaaaaattttccaaagtgaggaatggtttttgctttaaacagcagggtggtttttcttctttgaatatcatctgtgttcttaattttaaaagtagattttctctgagtgatttttgaaagccaacagagtaatacttacatcttcctttaagttgctgggagaccacagagttttctagcctgaagtgccacctggtacatcttaaattatctgaagcagagctcaagctgggctaaggaacaaaaagtggcatatccttaattaccacaaatgatacctaattaccttcatgccagctttaatgtaatgccgaacacagctgagatggtgtttgattttaaagtgagttacacaagattacctttccgaaccaaactgactttaccaattttgccaacttgcattttaatattgcatttcaataggtacccttttggtcactggtatttaatactttcctaggcttcttataacaaaatagcttttggtttaacattgaaattgcagaagtaattatttcactgtgaatgtgcttaaagcagctcttgatacttcaagtagaaacagaaaataacatttattgccatcaaaatggaaatgcagtaattatgtcataatagattgaatctatgaactttgcttgatctctgtttagataaaactgcaatagttgtacaagcctcaaaaagctaccttagtaagtgttttagagttttcttattgtaagagactagctatgactggtctgcagtcttttgtagcaaaagatttaagatagtgtattagtccattctcatgctgctaataaagaaatacccaaactgggtaatttataaagaaaaagaggtttaatggattcacagttccacaaggctggggaagcctcacaatcatggcagaaggcaaaagaggagcaagtcatgtcttacatggcattacgcaagaaagcatgtgcaggggaactcccctttataaaaccatcagatcgcaagactattcagtatcatgagaacagcatgggaaaaacctgcccccaatgattcaattacctcccaccctggatccctcccatgacatatggggattatgggagctacaattcaagatgagatttgggtggggacacagccaaaccatatcattgtgccctggcccctctcaaatctaatgttcccacattttaaaacacaatggtacccttccaacagtcccccaaagtcttaactcattccagtattaattcaaaagctcaagtccaaagtctcatctgagacaagacaagtcccttccacctatgagcctgtaaaatgaaaagcaagttagttacttcctagataaaatgggggtacaggcattgggtaagtatacccatttcaaatgggagaaattggccaaaacaaaggggccacaggccccatgcaagttcaaatccaatatggcagtcattaaatcttaaagttccaaactgatctcctttgactctgtgtctcacatccaggtcacgctgatccaagagggggtttcccatggtcttgggcagctctgcccctgtggctttgcagggtacagccccctcccagctgccttcaggggctggcattgtctgtagcttttccaggtgcacagtgtaagctgttggtggatttaccattctggggtctggaggatggtggccctcttctcacagctccactaggcagtgcctcaggtggggactttgtgtgggggctacaaccccacatttctcttgtgcactgccctagcagaagttctctatgagggctctgctcctgcagcaaacttctgcctagacatccaggtgttttcttacctcttctgaaatctaggcagaggatcccaaacctcagttcttgacttctctgcacccacaggcccaacaccacatgtaagccaccaaggcttggggcttgcaccctcaaaagccatggcatgaactgtatcttggccccttttagccacagctggagcagctgggacacagaacaccaagtccgtaggctgcacacagcaggggcctctgggtccagcccacagtaccatttttttcgccttggcctccaggcctgtgatgggaggggctgccgcaaaattctctgacatgccctggaaacatttttcccattgtcttggtgattaacatttggctccttgttacttatgcaaatttctgtagcaggcttgaatttctccccagaaaatgggtttgtcttttctattgcattgtcaggctgcaaattttccaaacttttatggtttgcttcctcttgaatgctttgctccttagaaatttctccatcagataccctaaatcatctctctcaagttcaaaattccacatatctctagggcaggggcaaaatgccagcagtctatttgctaaagcataataagagtcacctttgctacagttcccagcaagttcctcatctccctctaagaccacctcagcctggacttactgtccatatcactatcagcattttgagaaaagccattcaacaactctctagtttgggaaattccaaactttcccacattttcctgtcttcctctgagccatccaaactcttacaacttctgcctgttccccagttccaaagtcacttccacatttttgggtatctttacagcagcaccccactactgggtaccaatttattgtgttagttcattttcacactactaataaagaaatacccaagactgggtaatttatgaagaaaaagaggtttaatgtactcacagttccacatggttagggaggcctcacaatcatggcagaaggcaaaggaggagcaaaggcacttcttacatggtagcaggcaagacagcttgtgcagggaactgccctttataaaaccatcagatcagtccaagtgcaatggctcatgtctgtaatcccagcactttgggaggctgaggtgggcggatcacttgaggtaaggagtttgagactagcttggccaacatggtgaaaccctgtctctactaaaacaaatacaaaaataagctgggtgtggtggcaggaaaattgcttgaacccaggaggtggaggttgcagtgagccaagatcacaccactgcactccggtctgtgtgacaagagtgagactccatctcaatcaatcaataagatcatcagatctcatgagacgtattcactaccacaagaacagcacacaaaaacccacccccaatgattcaattacctcccaccccatgtccctcccatgacatatggggattatggaagctacaattcaaggtgagatttggatggggacacagctaaaccatatcagacaggaaatttagtgcatccagtaaggagactgcatcaatctaatcaagtacaggcctgggtatagtggctcatgcctgtaatcccagtactgtgggaagccacagaagggagtcacttgaagccatgagttcaaaaccagactgggcaacatagcaagaccctgtctctacagaaaattaaataattaggtgagtgcggcaatgggtgcctgtagttccagctgcttgggaggctgaggtgggaggatcacttgagcccaggagttcaggacagcaatgagctatgattgggccactgaactctatcctggacaacagagcaaaaccctatctcaaaaaagaaaaatgctttttttttttttttttttctgtttttgccatgtcctactcatttgttctatagttgagtgcttcctatatgccaaactgtccagataagattgacttataggttaatatagcagaataatttgaattgttattttttagatatagtattattatagcagaagacctaaaaaactagtttttttatgtttaaagtttccagtaatttttttttttttttttttttttttggaatggagtcttgctctgtctcccaggcaggagtgcagtggcgtgatctcggctcaccgcaagctctgccttccaggttcacgccattctcctgcctcagcctcccgagtacactattacatatttttaacaagactattaacaaaacggccatagttgatcattgtgtttggttataatttccatttttgtaataaaattatctgcttttgcacttgaactcttcaaagcagaaagataagggactgtggtctagcattaatttaatatgccagaattggtaaaaggaaagaataattcaatatactctgtcaaacagagtagtcaccaattaacttcaaatcatttaaattacttctagctgtcagcaaggaaatttcaaatcacttaaacttcttccagttgtcagcaaggaacagagagagagataaaagtagagatgtggaaaatagctagagggacaaaaggagcataaataaggtggagataggaaaagacaattacttgtttaattttaaggcccattttcataaatgaaatgatttaacacgactgatgaagttgctgtggaagaagaaaaattatcttctttgatagtaatgccccttgatcataatctcagtaacttaaagatggtcctgtgcataaaggagcacattttcccactaggatattgagtaaggaatcagtaaaattaatgaacaacagaaagaagatttaggcttgaaaagatctggtgtaatgtcagagaggcctggggaaccagcagtctggaacaaatagcaaaccctggagagggagggaagatgaatcatgtaaagtattgtttgtcataaatacagcgagctgataaatgtgtagcatgtgatacaagaacaccatgcaaatcagaatgtatgcgctattggacagctgagaggaaagagtactggattagtcactaggaaaactaggggtttggtgctttgtctatatatcttcttactggggttcaagcctctttgtttccattgaaattattacatttcatatgatattgtgatataattaaaatatatagttgatctttgtccctggtttctggcatagagcttctaaatgccttggaatttcctgagtgttagggatgagaggaacatcttttgttatttatggtaagcccctttcaaccatacctgagtttatgctaataaggtgagtcttgaaggatgggggctggtttgccagaggaaccaaccaagtgattagaggatcggaactttcagcccaaactctcaacctccagggaggatagaggggctagagattgactcagtcaccaagggtcaatgatttactcaactgcctatataatgaggcctccatgaaaacactaaatgatggggttaagacagcatccaggtttgtgaacacatgcaggttctgggaaagtggtatacccgaagagggcatggaagctccatgcaccactgccctcaataccttgtcttgggcatctattccatttggctgttcctgggttgtatcctttataataaaccagtaatagtaagtaaagtgttttcctgagttctgtgaatcattctagcaaattatcaaacctgaggagggagtgcgggatcctccggacaggacagaagttgtgggaaacctgaggacactctaccagcaattggcatctgcagtgggctaggggcagacttgtggacgaagcctataacctgtggagtttgcctaaactcccagtattaaggatcataattgaattgtaggacactcaattgatatccagactgttggagaattgcttgatgtaaggaaaaaccccatacatttggtgtcataagtattttgtgggtatagaaaaaaaagggggcatcttttatttccatttttaaatagattttagtttttagagcaggtttaggttcacagcaaaatggagtgaaagatacagagatttcccatataccccctgcatccacatatgcacatcctgccccattattaacatccccatcagagagtacttttgtcacaactgatgaacttacattgacacatcattatctccccaaatccaaagtttacattagagcttactcttcatgttgtacactctatgggtttagacaaatttataataacatgtacccataattagagtatcataaagagtaatttcactgccctaagttcgtctgtggtccacctgtgcatccctccccacccccaaccccattttgtttttaagtgtttctttacttccccagtacacaggctccaatgtcaccttcactaaaatgagttaaaatgaatcaatataattttgttgttgttatttttaattttatttagaaagtgggtattgtttttgaagagatgcatcagtagaagcctctcctcgatatgctgcatgctcactcattgggataaatacctgatttcacattatatgaatgtccattaagaagggtgcaagctaacatctgcagaattcctactttgtacaaagtactgttctaaacattctatactgtcacctcctttaaaattaccaccactcatcgaggccctgaaaagttcagtaacttgcccattatcacatcacttgtaaaggatggatcagggatcacaccaggacatcatagcttcaaggtttgtatttctccatcataatattttgtacatacacactggttgtaccagtgatagggacaggaggcagagtaattctaggcagaagaggcaggtccctgacaaaaccccaccctcaagccaaaggcctgaaactgtggcccaaaatgagaacctacatccttgttttcccattcaaatgttgccttttcctaaaccacccatggcccaccctgccctccatcctctgcctgtaaagaccccagactcagccagcagagaggagaagcggtgggatgttgggctggatatcagagagaagtggcttgacttcagagggacagcttgacagtgtaactttggagaagaatctggccaaagacagtcagactttggggaaagattatgtgtctgccctgtctccttttcaactccccttcccactgagagccactttcatcagcaataaaatcccgttcatttaccatccttcaattcattcgtgcaacctcatttttcctgaacactggacaagagcttgagagccacaagtgtggatgcaaaaggctatcacactggccctttgccctcgctgatggagggcagccacctcatgcgaaaaggcagaggacccactgagctgttaacacttaagctgtccttggatgccagagctaaaagagcactgtaacacacattctggggcttcaggggtcaaaggcagcccccttgaggctgccatggggcctgcatggagtttgcttctgctggtgcgcaaagcacttgccctggctcctgtaaccgctcacctgcatgctgcctcctgtgaggggtggagtgcagcgggtctgagtgagtggaggtaactcctgccagtgcagaagcagccagctggttccagcactcgtggactccagttcctgcctctttctctcacatgctctctcccacaaggagttgaaagctgcgggctgggtaaatgaggcaacactgcagtgagtcccatgaatgggacaggaaaatgtcctgcttcagcagaaataagtggaatgttagaaggagcatattttgagggttttacatgttttcccactcatcctaaacttggttacacccattttaaatagaaaaaaactgaacttgagaatgattgagtaacttgcttaaatcttgtttttttcatttatagcagctcactaatacttcttagagtatttgtttatttattagtgagctccattagcagctcactaatacttcttagagtatttgtttgtttatttggagagaatacaatattaaaatctatattcaattttatcttttcaacttcatctttatataaagacattaagaaactagtattgttgccaaacaacaggggtttggtcaaggtccagttgcttgctgtgaagaaagccagtcattgagacgacaaatattgccagggaagaaggctttaagatgggtggtatcagccaggagatgggagataagtctcaaatctgtccccctaacccactaaaaatagggatttatgtagtgggtaaggaatgtagctacataagggaaaacaggaattagggagagtaaggaaaaggaattggttaacaggaagcagatcgttggttaggcaatcataggggatgaggggtttagtgtctcactgtctagatgctattatctggtgagtttcaggtccttgatactatctgggaggcctgaagattagtttcctgacaaaggaactcagataagacacatgtaagtttcaagctttatgatggggagagtcaatttctatatttattcaaaaaatcttgaacattagttctattggaaaattgggctggttttagtcccccctttctattattggttcatcaatcatgaggaatcttggtgttgatcttttgactgcttaatgctgagaaagggagtgttgggataatgaggaatgaaaacgctatgtctgtaattgaagtactcatgagtacctggtcagcattgggcttgttggagcactgtgatctgggtactctcattaacagttttagaacaacattttaagccacatttaaatataagactaagcatgatgtgtaaaaccaagataattaataacgtagatgacccaactttaaaaataccaaggaatcctgaaaacctgtcccctaatccaggtctgttctcctttacatgttataactgggagacttcaatatgtactcctacttcaactgatgtattaatgtaggtacagcaagatgaattggcaattacatatacccctgccttgttcagtgagcaaatactccaaagctatgtggttatctaaaactactctagccaaggagtctagagactttttttgggcaacaatagcagtcactgtttcacttgctataatccacagggtaatggagagctttctaagtacatgttaatgagctgctactccccaccatgggagtgtaaccaaaaaatatctggttctgtcaagaatgctcccaggcaaatactccttggggacaccctaattgggatctctctccaagagtcctctagttaccctggagaataatttcaaagaactagtccaatgtctgaccaagctctcattatctactgtaaaaggggtgacagagtatcctaatagacagtgccctttgtctcctttcctaggcatctatatgcccaaggcctattctcttgtttgcaaacaaacatgtagccctcaggagcacaggtcactgtatcttgggcagaagcagtcattcaggctatcttttctaaccagagatcagttagattattaccaaatccagacaaagccaagcctgctcaaaagtcttcctgattccttatatcctgatcaaatggagttctgtctgggtcaccatcaaagaaaaaaagtgcttgactttttatttatttattttaggaagagtaaggaatagcctttctgggatgacaaatagaaacaggaggtcttcctggtccctaaaagggtccatgtaaggcatactcattacactattcttttaggagtctttggatgttcaaatgtgcagatagagatatgcaaaaaggcatgaactggttggattaaggagtcattatggtccagaacagattggaactttgggtcacatatccaacagtgggataaggttgcttatgaagcaatagcttgtgaaatatgaattagtgaattatccttccatctataatcaggaaggatctagagaacaataacagcctggaaagcacatgttcctttatgatttcttatgtaaggtctttggctggactttgaatattaatttaaagttgtaggagggctcacaataccatgactgtttcctctggagggatatttgagggactagttttacccaattttggtgaatccatggcttaacttgtctgatgagtgggtggtcagttgtggtcacagttggtcttcagcctggtgggatttccaggttttcagcaggacttggtccctcagtttcaaatagtagaaaggcacattggtagggacctggagcctattggaagcaaacttagatggactacttaatatattttctatttgttttatatatgtttgggggtaggtaaaatcttcaagtgatagggagtccggggggtaagagaaatggttcctgttacttaggatgcacattctcctgaccttactccaagcataatagaaacacagttaccacccctagactgcagagcttgaggaatcttctggaattaaatacaaagtaaacatttggcaaaatctagactagttttggagactctgttcaaggtaacagtttcagtcacttgttaacacattttcaaattttttaaagggaggaggaataactggtttccaatctactgacttcattgccatagtaacaaatgtattgttcatataggtaccagaatgcatagaagaatttttctttttttaaaaaaaagtgtatttaatttctaaaaactaagtctgagtctgagaaatgatatcccgaagtctaatccaatcaccctcaaagcaccccagagctagaaaggatttcaaaggaggattaaaaacaagatcagctttaacattaggcaaagatccatgggcaaccttctttaaacaataacaaaaagagcttactaaagttgatacttaaatatctgaagtaatggaatagtttatatagttcaatagtaatggaacagaaattgaataatctaaacattttaaatccactcatgaattttatttggaacgtgttttggtctgatcaatgcacatgagtgtgttattgtggaaattcctttgaaaacaaaactttaaaagaactacaggtctatccagcatccctaagtctgccagtatccttacctctagcctatactttgacccagagtgctgacaaagtgcagcacttgctaccatgcacgtatcaaggtagcttagtaaaactgcctcctaaagatgatcacctcccttgtaagatgaccgatttcctctgaactaagtaacgcggcaacttttagaatgaacaaaagacttaatgaaacagaaagttgtctaatctctaaaggtcttaaaagtaggacttgccatgactaattaagtgctgacaacagaagaaattccaactccaacaaaaggaatgatacactattgtgaaagcattccctagggtaagcacaaaataaactttttatcagaaaatatttcataaatttttacttttttttcagagcaggagtggaggtttatttaaaaaggctttagaacaggaaagaaaggaaggtatacctggaagagacccaagcaggtgacttgaagaacaagtgcctaaatttctatgtttttactgtatgtttgggtaacataaggcatctaagaggattaaataaatattactcctatttggcacatggatgcaaagaatattatgatactatatataattatctatcccactcctacagaaaacaatgttcagacacagtgcgaaacagccaagttatattttaagaactaaaacagatgccacttctaattcaaaactaagaagaaaaactgtatattgtggaacaaaggattttcccttgtgaaattaattttagtggctaacctctcaaaaatttgtaaatgtatgactttgtaaaatgctttactcaatatacttaactagtatatatatgctttttcatgtgaaacacaggaacataatttctatcagcaaagttaaaaatgtaattaaagaaaaagaaatcaaatttaacataaaagataggcaatagagaaatgtcattttaaccttggtaccaagctacaattcttccttggtcaacctctcctatattatcccagatattcaatttattttcaatctttcatgaaattggacctcttagtcatttaaagagcaggagaatttacaataattagtgaaaattattcaattctcatacattagttatttgcatttgtggatataaagtggtgactcagtactttatcaaaatataggtttatgaaaatattgggaatataagattgaaatttaacaattacatttttaaaactaaactaagaatttttattttaagcatgaagcataattgttatagaaagtcttctgaaacatcacttgattttcaataaaaacagcttcacacaatgcagaaactataatgtatcatcctgcaacaatatatttacttgtcaatcctaatctaaaatgtacttaaacaacaatgaaaatctcctttaataaatccataaagtcttatttttaaccactactgctctgtagcaataattgaagtcccaatatgagcactgagaatgtgataataaaatatcaaaggctgtatcaatctttaaataaagacactgaagcctgttgccaactggcatcaggtgtagtaagtacatcagagaaatgtgagtaatccaaggaagtcccctgaaatcagcagtaccatctgccacaatttaaaacattaagtgtaaaactctgttctaattattttatagaagttctatttcacacttaatattgttaacatatttgcaaacttataaaattctctatataaagggttttgaacttcttcagctaaacacttcctcattgccagaaaaacatttctaatgaaagaaagagagtatatccatgaatatctgagactgaagaataaattacttcttatggtcatagccaattacaatacaagaaaaaaaaattcacaatttgaagaaaaaaaaaaaacagcaaatgtaattcctcagaaagacccctggaagggccaaacttctctagattccgaagaatattggggccaaacagcattacaaaagaatatcattttcttttcattccattggctcgtaactatattcagaccagttttgaagaatgcacccaagtggaggcattcctagatcaaatcctgtgttcccttgatcacattgacacacacacacataagcaaataaacaattatcaaaatacaatctaactgcagcagtgactaacaagccacgagagttcaaactcaaacagttggggtgttttttactctcatgccagtcaattgggcttttccaacctgcaaaaaaatggaaattcctttggaattccccaaattgaggagtagctcccactgtctagtacccataaaagacactcaccttgatggatacagatgtcaaatttcaaagcctgtccttcataagtaatcaagaatatggttggggccagcagcagtgagggaagagagagaaacaaaaacccgcctctggatgaatatagctgggcagctgctgggagggtttccagatctctctagcctgtggccactgagccacaagcactgcaatccaagtcacagcaccagaattttattgctgaatgcctgggtgttggccaagctgtggtttctcactgtatcgaaagctatccattgaaacaacgagtattgctagggaagaaggttttaatgtggatgatgtcagccaggagatgggagataagtctcaaatccacctgactaaaattagagttttgtagagtggggaaagaatgtaactatgtgtgccaaaacaggaattagggagggataaggaagaggagtaggtcaacaagaagcaagtggttggttagtcagttatgatggttgaggggtctgctgtctcaccatctggatgcagggatctggtgaatttcagtcccttgatgctatctgagaggactgatagttggttttctgacaaaggaactcaggtaagacaaatgtaagtttcaagctttattattgggagggccaatttctatatttatccaaaaaatcgtaaacattagttgtgtgggaaaattgagctggtttcagcactactcagccaattgaaacagagctcaccattttttctaatgtaataaatatatatttaatatatctttttttactttttcaaatttacagtaatcctaaaataaagatagtattatcagaagctgagaaaaacatagttacacatagattattgctgcaccaaaatgtttacagggaaatattctctcctgaagccaaactcccacagcaactttacaagtgagcctcagagcaagaaaataacttggttaagaccatgcagctagaggacaagagttgggattcaaacctgataaatctgactttgaaaatttcactaccggccacccaccaattgttctcaacttttcgtgcatgttaaaataatctgggaccttaaaaaatatcactaggccaaggctgtacccagaaacaattaaatgagaattctcaggagggtcatggccctggcatcagtgtttttctgtttcttttttttcttttttttttttttttaacgttctaggtgattctaatgggcagccagttttgaggatcactgcacaatgactcatcgctattcctggtacactcctaactcctagaaggcaactgtatttaagaagtatttatagagctctaaaaatgatgccaatacatttaaaaacttattatccatgtcttcaagaacttactaaactagtatgaagataacagatgtatttatcagctaaataacaatacaaggttgtgctgtgttggttgatttggagacaaatgctgtagaacctgagggtttcaaggatagatttaggacatcctcagatcaccaagctagtttttctgcgtaagtatatattcagttccaagactgattgatggatagatgaataaaaagattattcatagcttttgtcagattctcagtatcaacattgatgcagaaaaggctaagaattactgctgagggttcagaagagggaaagctgcaaatgatgcagtggtcagagagataattgcaaagaagatagaacacatgcagggcattgaaggaacccaatatgatgatatgagaggaaggaaggaagatccagagtggagcaggaacaaagctatgaaggcaaaaatattccccctagttttagggtattgtgagggaaggttagccttgaggctccttgggaaattcgtaagttaaatgtcaggggtgatattttcttccttctagatctctcactaattaatagattgcttttataagactgtgagtgaaaggctcagtgctctaagtagatgctctaagaagacagaagacacttttgcagattgctttattttctattcaatataacattcggtaacagtcaagtatcacctccagtggctcctctgatttctgtgatgaggcctttattacaattgtttccatgtccaaggagaattaaaggcatcctctacaatgtctcccttgtccatcttaggagggccagccaaggagaggttgacccacaggcaagctctgtaaatagggacttctgtctctcaaggtaacctgatgtgactggcagggatgacacataattccacatttcccttcctcttttgagcttctttcaaagaagcatgcatggaaaatttccctgacatagggcaagatataaatattaaagagcatctcatgcatttattatctttaccttgtcatatatataaattatcacgagaaatggaataggctaggctttgcaacaccgtcctctcctgatgaaaagtaatcaattccatatggttaagagtaaaggaaatgctgtcacatggcaaatgaccaggagtctcttacccctttggtctgctgaagcataattatctaagtgtctcttggaataagagctaccactttagtggatactaattatgtattaagcactgggctaaagacattgaatatattaggttattcgatcttcacaaacaatgttgtgaaaaaaatattattaaccttaatttctacttgagggaattctggcttagaaatgtaagtaacctgcctaagatcacacatctggtaaatgggagagccagggcaaacccagatctcttgattctctgccgctacaggatacagccttctggtacagatttaagtccaagtttgaaacatgatagtaataccttgagaataagatgtcatctaatagcgatgaatggaggatgtattggagagggaattgcctgggcttaggaggaatagttaggaacacactaatacagtactcttttccgtatcagatacttttcaattagtttggaagtgacctgttttaacagttatattcattcaatagagattctataaattatggtagaaaacaatgtagctattaaaaacaatgaagcaatactctatatggataaagacagatgtctgagatatgttttcaagtaaatcaaacaaaatatagaatatcctgtacagttttctactttctgatgaaacggatatatgcataaattcgttaggaaatataaaaatattcatggaaagacacacatgaaactggaaataatagctgtccttgtgtggctaggtaatgaagtgggagggaaacagaagtttcattggagatacctttttaccttttggatgttgggcagtgagcatgtattacccatttaaacacagaggtattctacctgtatgatgacacagatggagttctcaatggcaaggttgatatttgaaataaacttgcaaattttagttttagaaaccttagtaaaatgaggtattttatgaagcaaaccaatgacataagttcatttattggtcctgaagggacatatgcaggctattgaaggaatatattgttcagcatatgtacacagacttttgtacttgtttatgtttgaattaatatgttttttctttgagactgaatttttaaaatataagatcactaacaagccatattttgaggggataaattaataagtagattggaagaaattctattgaatgttggaaatataaagtatatgaaaagtctaaaatgtttttacaaagtatttcccttattttcccatctccaactcacatacaaagttcagaataccagaaaactcgctatgagtacatgagaaaactgaaatagatcccaagtgttttgttcccacacaataatcttccttctctttcacttataattaacattttacatttttaaactttatatattgcttaatttttgcaaaatcttccccttccagtaacatcagtatatgtaaaccccagaaaaatcgattgtccccctttgtccatctcaagcgcttgaatggattttggtgaaaacccaatactgatttgaaagaagaagaataataaaaaaaagaacgtacttttcactcccaatctttctctgctatattgagcaattttctggtatgtttctacttgcctttcttatactgtctgcctggtgacaaagactgatttctcaaaagcaaaccaatatttgaaataagcccacaacattcggttttagaatactagtagaaagatcaagcatgcattttatgaggcatgccaggttcagaattatgcaaaacaatttttcattgcataaaaataaaagtataaacatgccctaaacccatcatttttcctattctctaaagtaacattcttatttctctgagttcttttcaatttttcaaaagattaagacattcttagtcataccaagctttcttaagttaggacaattttctgatgcttttgtatacttacaaaaatatgtgcatgagttttctgaaatttaaacccacttatttggtggaacccccttattagcaaaaacaatttatatatgccaaaacaagccattttatatagaaattccactaagtaataaggagatgagagagtgttattatatttaatactttctttacattatttcctaagttttaaaatctagaattatttcttttttttagttaaaattgggctaaattggattttctaaattccagttattttaagagatcagacaatggaaactacttactaatggcagaacaagaagcagttctaccagaaatagaagctagtttttattccatattgtgctaatgtttctgacacaacccacatttcttggaaataaattctgaaaattaaaacagaagtattagaacccatttgaactgtagcagctatttatattagtgtgactcaaagtgcgggtcacagactgatgctggtcctcaaagtgttacttgttcatattgagataggaagaaaacttgagttgtttagaaacgtttatagcaatttgatattgctacaacatccaagcacacaatttagtaattagtttttatacttttcgaaaaaatgtcaatctggcaggaattggaaatgtaaaaatcttattctttaccacagagagtctgagaagcactgctctggagaacatttgtgagactctggaagagtttcaggtagagaaggaaatggataagaaacaactctggtggaaaaaaaaaacgaggaaggaagggaggaaggaagcaaaggtggaaggaaggaaacaaggaagagagggagggagggggagggagtggggggaaggatggagggagggagggacttaaactactcagcaacaaacacaaatgaacacagtagaagactggaaatgtatgtcccatgtgagggaaagattaattttccccttcaagtgttctcattgattgtgacttctctgtttaagtcagcctctttccagcctcaggtgacagaacccaactcaacacagcgtaaacagaatgagataacccattgacttgcataagtggagactctcggtataaagcttatcacagggattctaaagatttggggtcattattattatttattcatttatgctgtcccactccttctcctacccctctctcccatcatttctctgtcaggattgtcctatactgttttactgtagatgggattctaccatgtagtggggaagaggggatagcttttgatggcgcatggcttatgtcatcttaccttagccacttcagaggtaagggggagcctaagagagcagacataaaatacccaaggagtattctaacggccccacttattcagtgtgctcaattttgtaccatttctcacagccaaggagagaggagaatacatctatgcacatgtctgtggccagggtgggttagactggggtggggcgcaaatggagaactatgatcaacagccccactggaagcacattgttaagggcaagttccccagtgatagggagatgatgttatagaagaatggaagaagggcggagcagaacaagcatggaatccaacaaatatgagaagtagcaggtggtagaagacataagaaaaaattcaatcaggaaaatgaaaagggaagaagtgctcatccccagcaacttgagaaaaataagatgatatgtttttccaattccgttttctctctcatacatgaggtactgtgtttatatatgaaaatagtctgaccctaatttgccccagaattagagaggttcagagtcttgcttatgggacctcctatagactggactcctatagactcctgatagaggggtgtgtgatgatcactataccctctgtaagacagacttcaagccaactgggtgccaaatgctctctgatacaagtcttcatagccctctatatatttaggctctgacccactcagggttctaggaataattgtggtcttaagcagaagggatttgaagagcactatgttgacagccttaccttatgtatcatcttgcttctgacaactgagtatttatcttgattataggaaccagtctccacttctaccctggtatggctttctcagctcactgcacagttcaagcccctatttaataacccatacaatatccttgttcctctagaagcaaggcctgtgtttgtgctaggccctagtgttcagatatgggctcagtactctggtgactgaaacaattggcccctgcctattgggctatcagaataacatctgttcctgatatccctttggttgcatctattatgtcaccacattcttctaggttaaattcacccagttcatagatctcaactcagtttagttggtatctgcagcacctgatctatttcaggaggcacatctatttctaggttagtgtttcctacagtctttactgtccctttgctgttaacctgatttttatatgaccaattacaaatataattcatggaattaagaacaactcaaaaatatttgcaaggtcagatatttgatcattcttctaatctcccaattctgcatctgttgatttccattggtgccattctgttagttagtgtgccagaaccagctcaacacatttgccctgttgataatggaaacataatctgctcaaattatctttatgaattgagagattataatattactttgtaaaatggaaaacacaatgatggctgagcatatttgttacttgcttagtctgccaataaaccaatgggtgcatctacttccatcagagtagctcagcatattgcttattgggtcagattctcctgcctcaaatactgttgcaaatgtctttgtaagccccaattaacacttttaggctattaaggggtatagcagtgtttagcagactattttgctgactgaaaaatattcttctgcactggtaatattcagactgatgggtgaagaagagaaaactcagtaaaacatgagttaggactcagaatttaaagattcataattaggttcacagtgtatggaaattttagttttgaagcaaaggaagctaaaaataaacttaaatataatcaggaaaagcaaaggaggagtttaaaagtcacaatcctttgttcttatttataaattgaagtgatactggtcattagagaaatacaaatcaacgccagttagaatggcaatcattaaacagtcaggaaacagaagatgctggagaggatttggagaaataggaacacttttacactgtcggtgggaatgtaaattagttcaaccattgtggaagacagtgtgcgattcctcaaggatctagaaccagaaatatcatttgacccagcaatctgattactgggtatataccgaaaggattgtaaatcattctactataaagatacgtgcacatgtatgtttattgcaacactgttcacaatagcaaagacttggaaccaacccaaatgcccatcaataatagactggataaagaaaacgtggcacatctactagaattcatccatgtaagccttctgcaacagtgttttgctacccactactaacaatgtagcacagaaacagctgaataaaggaatatgtgaagccacaaacactatagtattttacaaaccttgtctcttattaaggaacaagtagaactaatgtcatgcagattattctaaactgctatgttgtatgatatattccaagtaattccattttcaataatggattagggctgtttattcttttggaaattcaaaataaatctcattatgaagctgcaaaccattctgaggaaaacaaatataaaaacaagatgaacttttatgtccttttcaagtctgaactgctatgaaaacactacgattaggaaatgacatgttttaatgaccaaaatgttttcaatgatgctattaaaaatttctaagctatctaatctgaatctaatacattttcaagttttgttggtttttacctcagaatcctttacatctatctattcatttctatctatcattccgagacttctaaactgttactgatcaaactcccttattaggtattgctttttagcttgcagtcgagatataggtaaatagatttatttgtttatcaattatacaaatgcaccactgtattaacatttatacattgtaaaattatacaatgataaatgcaaaacgtttaaaagtaaatataaatacaaatagaagttcaaatatttcttcttgcccattcagtggctggccttgtatgccacttgggttatattccccactctgagaactggcctggactgtaacttgcaaactgttctcttgccccctttctcaccctttttctgtctgatatggtttggctctatgtccccactcaaatctcatgttgaattataatccccaatgttgggagagaaacctggggagaggtgattggatcatgggggtggatttcccccttgctgttcttgtgattgtgagtgagttttcataagatctggttgtttgaaattgtgtagcacttcccccttcactctctctctttctcctgctcctgccatataagatgtgtttgcttcctgtttcccttctaccataattgtaagtttcctggggcctctccagccatgcatcctgtatagcctgcaaaaccttgagtcaattaaatctgttttctttataaattatgcagtctcaggtagttctttatagcaatcccagaatggatcaatactgaaaattggtaatagagaagtgggacattgctataaagataactgaaaatgtggaagcaactttggagctgagtaacgggcagaggttggaactgtttggagggctcagaagaagacaggaagatgagggaaagtgggacttgttaaatggttgttaccaaaatgtccatagtgatatgggcagtgaagtccagtctgaggtggtttcagatggagatgggaactggataaaggtcattctcactatactttagccaagttactgacagcattgtgcccctgttctaaggatctgtggaactttgaatttgagagagatgatttgggatatctggcggaagaaatttctaagcagcaaagcattcaagatgtggcctggttgcttcgaacagcatatgctcatatatgtgaacaaagagattatctgaaactgaaacttatatttaaaagggaagcagagcataaaagtttagaaaattctcagcccatccatgtggtagaaaagaaaaacccattttctggagaggaattcaacactgcaggaatttgcataagtatagaggagctgaatgttaataggtaacacaatggggaaaatgtctccagggtatttcagagacctttgtggcagcccctcccatcataggcctggaggcctaggagggaaaaatcatttcatggacaaggcctagggccctgctgctctgtgcagcctcaggacatggagccctgcatcttggccgcagctgctccagctccagccacggctaaaagggacaaaggtacagctcttgttgttacttcagagggtgcaagccctaagcctttgcaacttccacatggtgttgagcctacaggtgtgcagaaggcaagagctgagggttgggagcttctgcctagatttcagaggatgaatggaaatgcctggatatccactcagaagtctgctgcaggggtagaaccctcatggagaatctctactagggcagagcagagaggaaatgtgtggttggagcctccacatagagtccccactggggcactgcctactagagttgtgagaagagggccatcatcgtccagaccccagaatggtaaatccactgacgagtttcactgtgtaactggaaaagccacaagtactcaatgtcagcccatgaaagcagctacaggggctggaccctgcagaaccacagggctgaagctgtccaaggccttgggaggccacccctcacatcagtgtggcctggatgtgagatatggattcaaaggagattatttgggagctttaagatttaataactgccctgctgaagttcaaacttgcgtgggacctgtagccctttttgtgttggccgatttctcctttttggaataggagtatttagccagtgcctgtacccccattgtatcttggaagtaagtaatttgtttttgattttacaggctcagaggtggaagggacttgccttgtctcagatgagactttggacttggacatttgagttaacactgaaatgagttaagacttgggggactgttagaagggatgatagaattttgcaatgtgagaaggacatgagatttgggaggcataggggaggaatgatatggtttggctttctgtctccacccaaatctcatgttgaatttctaatccccagtgttggggaggtacctggtgggacgtgattgggtcatgggggcttatttccttcttgctgttcttgtgatagtgagtaaggtctcacaagatctggttctttgaaagtgtgtagcacttccctcttcactctctctctcttcctcctgctcccaccatgtaagaggtgttcacttcccctttgccttctgccacgattgtaagtttcctgagtcctccccagccatgcttcctgacagtctgtggaatcatgaaccgattaaacctcttgtctttgtaaattacccagtctcaggtagttctttatagcaatgtgagaacagactaatacattgtccaacctcaacccatctgtcaggggcctgtttaaagtgcaaatatgaccatgttattcaccatttaaaaagtattctataattccaaattgacagaaaggtaaagtagaaacttcttaggttatcatataaggccttttattatctagttccattctctcattattgatctatgttctaactaaaaaaactactcggttttctgaaattgaatgctcttcatactttcaatttttattacagtgtttcttttaaccagaatgtgtttcctttggctgcctcctctactactatttagagatttagctcaacaatttaacatttgagatttagcttgacaattttatcttctatgatatatttccggacaccttttgccaattctctatttccctcgtaacaactattttattgcattaaaattgtttatgtgctgtgtgagtctacctctaagttgagattctagagacaagtaatctgacagagtcatgtttgtagatgttgcaacctcatacatctgtggcagttggaataatgcctggcacatagcaataaatgtttgtggaattaatgaatgaatgggagtgcataccaaaattactggagaacacttaacatattctacctggtggcaaatattactttgcaaaaatattcatttagttatgaagatataatttatctaagatcaagtatttagtgtctagaatgaaatactgagtttaaaataacttttaaaaatgagtgacagagttcataaaagtacccaatgtttggaatgtttataccaatgcctctcctggttagcaaacctggctactaattaaaggacaactggattaggaagaatatttacattgagcattgacatgtgacaactatataaagtcaagattttcagttaactaattttccattgctctttaatagccttcagcatctttacaaggttgagttctatttctatttcatttaaactttctaaaacttatgaattactgttaaatttttaggaaattcccattcagcatttgctaatatgatcatttttctcctttaagttatggtgtaataagttataatgatttattacctgatattgaaccatctgcattcctgtaccatacctttcttggtaaaggacattattcttctgatagtcatgtattatatttgctaatatttcatcttgatgtttggcatttgccttcataagagtaataggtttatattgttgatgagtaatttgatttcttattttgttttagaaatcatatgaaataagcattgaatcaaacttacctcaaaggctgaatttaggaaggaaattctagcatttctatcaagtcaggacttatgatagctaacattcatcaagtgcttattttgtgccaattacagttcagtgctttatgtattaattcatttaaaccctacagcatcccatgaaccagaaatttttattactatcctcatcttgggtcagacgaattgagacacagagatgtaaagtagccagagtcatatagaagttaaattgcagagtcaggatttgaactcaggcattctggatccagagcctacattctttaccaatatgcattcttttccccatcatgttgcagaggaaaatataaatctcaggaattatttgtccgaagaatctgacataatcattgttaattgacctaagactatttaaataatgtagaatttataagagaaataccttaactacataccatcaattaataatatagcttggagactaactgtatttaactatttaaaaacgtagttaaaaatattaccaaagtaataacactgtttttttttgtttcatcttttcagtaatcttgacacagaagagctatgtggtaagtgtttctttaagatcagtcaaacctattacttgcttaagaaggaaaaagagtattgtctgatatatatcaaccttggaattaatgttgtatattaggagttcacaaaggaaaaattaatcgagatctcaagggatttatctttacccgtgaattttgctcaagtatgtatttcactccagaaagagttgggcctcattagttcgttcatagaagaagaattgttgttacaatcagtacattagtttcgcaagagcaaattctccacaagtttgaatatatttttaaattgatgtttaatacaacttcattattctctgcatgatatattgtgcagagccttttgttactaccttacaaagctctcttcttgaaatgtaaaaataactttgtctcatacctgcctaaaccattctggagttgtaaatgtcacttgcaaaacaagtgattcaatggggacagatacatctttacaaatgcctggtttaatagcctcttcatttattttcttcatctttatggttggaacaatagttaaagattagaaatatggaaaggtaaaattttaaaattttattattttatgaaaaaatagaacattatgagactattccatttgaaagagctatctttctctgaatactggaaggtttaatgttttatgttttaagataaatgtttaagataatacttttatttaagttcgatcttattgtctaggctgctcaaaacatttttggtagttagagttgagttttgtctgagaactcctcattgaaactatcagcatttcctgaacatcttctaattcttacagtttcagaatttaccaaaaccataaaaaaaggccattttcttatattcaagagtggttattttccatttcatcaaagtggtagagcaacaccaaaagatgttatacgagaacaaaatatcagaatacagggtttcaaggcaataactgaacaaaatgagcataatctccaacaacgacctttcagattttccaatgattgtaaaaaaactcatgcttcttatcctagcatagtgtccatctcaggttcagggaggaaaatccaattgaaattcaagatatgtttatggaggagcaaggtactccggtaccaaagcaggacatgcttttgttagttatgaaataccaacagggaaaatcatgccattctttcagacacagtcagatagtagcattgtgcacacatggttaagtacctgaaagtgcccatatggaccattgccgtgaggctttatgatgaatagcagtcaccataaaggccaagttgtggtccactctcatctatgtgcacacagtcctggtcagtgaagtgaaaagataaaatggagaacacaagattatcttgataatttcattaaggtagcagacccatttccctaaaatgtctagctatgtcaggccaaagtaattatttccacaaatcattcatttatatctattttttgtttttcacttaactttgcctgggtaggccacagctgatgacaaagcaaactgttataagggcttttaagataaaaacactaagtggttcttctttatttgctatgttgcctgcctattgtcattaaggaatattgtgttatcctctgtttttccttgaaagtacttcaagttctaaagtatgatagcatatctccacttactcctctactgaaaaaaatattttaaaaatatgccttttttctataatggaactagttaggtccctatcctgtatttatggaaaaagctttggctatgattttccccctatagctttagttagggaactggtatgtggggctttaattcaacaggaattgttctgtgttttttaaatccagtgattgtattcagtcatgtgttataatcctccccctctctgttcaagaatatgcattttaatctccagagtgtcatttcatttctcattattttgtgaatataaagtaaatatttaagttggattctaatcaaagccaaatgcttcagtgttagcaagtgaaatatgtcaattcacacccagcacaaattcccccttgtgcgtgggaggggcagaacttgattggcatgaaaagtagatttcatatgttctttcctagaagccaattagaagttgcaggtatgtaaaactttaattctgaggcttttacttaatttgtcagttactaagttaaggacctagaatttaaaatatttattttgaaaaaaatgtgtttgtaattttaattgtgaaagtaatacataactactatttttaaaatttaacagaattatgtaggcgtataagctaacatgtcaatcttctgtgccactcattgtcgtccccaatactgagctctactatttacttggaacatattcttccagacattattatgtgtatattgacattgatatatatgtgtacgtgttgttgttttttccaacagtgagattatactatatgattagtgcagttgcatccccttttccttcattttatttaaaggctgcatagtgtctcatgaaccttaatttttttcaatcaagttccttttaatggattttcaatttgaatccaaccttccatgggaaaaacaggattgaaataaatattctcatatacattattctcacactcacgttcaagtaattctgaattctgaatggtagattcccaaacatgtaattcctcaatcaaggcttctctaaggtgcacacccaccagcagtttatagaagtgccaaaattatccactcttcacatacaattgtgaaggccttcctaaatgcattttttttttgccgtatcttatcacgatcagtcaatacataactcagttttaattaggcaattgtgtttgaactctggcattaaagctttgattttgtatttctaccataattagctataatctaaagcttcaggagtataattactacctttcctggccctaccctgtttatgactgttttcataaccttactcatttttactgaaccgttttgcagatcttgaagttggtagttaagaatagatagttgaggccgggcgcggtggctcacgcctgtaatcccagcactttgggaggccgaggcgggtggatcatgaggtcaggagatcgagaccatcctggctaacaaggtgaaaccccgtctctactaaaaatacaaaaaattagccgggcgcggtggcgggcgcctgtagtcccagctactcgggaggctgagacaggagaatggtgtgaacccgggaagcggagcttgcagtgagccgagattgcgccactgcagtccgcagtccggcctgggcgacagagcgagactccgtctcaaaaaaaaaaaaaaaaaaaaaaaaaaagaataggtagttgaaatatttacagatgagcgaagaataattgcaatgaatgtgcttgatctgaaagcctttctgtaagaaagctttgtgaggaaggttgaatatatttaatagtgtaatttctcatctagtcgggtgttatctacaaaatattaaactattttaaaagttatatgaagtctataaataagatggataaaaactgagggtacgggggccgggcgcggtggctcacgcctgtaatcccagcactttgggaggctgaggcgggtggatcacgagatcaggagatcaagaccacggtgaaaccccatctctactaaaaatacaaaaaaaaaaaaaaaaaattagccgggcgtggtggcaggcgcctgtagtcccagctactctggaggctgaggcaggagaatggcgtgaacccgggaggcggagcttgcagtgagctgagatcaggccactgcactccagcctgggcgacagagcaagactctgtctcaaaaaataataataataaataaagtaaagtaaaataaaataactgagcgtacgggaaactccagaataaaagcttattcccttcatacccaaggttcctttcggtagctgtgcactaagcacccaggctgcagagattggcagagcctggacagtgctcagagacctgtgccagcaagtctgagtgctaggaaatcagaaggctctatgccctcctccagactgctgtgtcctcctccagtggcacatgtcactgatgattgagatgtaagagagtttgcgtgtcgcttatctgcatcccctcaaaatagcccacatttctagatctgactgacctccctattcagaacatgcgggttttaacactctctctcatctcaattactttcttttctacctagtctactacttgagaaagtctaactgcttgagaagtttagatgagagtcatctaaactcatgagaatactttgtaagaccagtttccactgagacttttgtggcagctgtgggtcctttgcttctgacagaattattaagctgacctgaaaactcaacaacttgaaagactaaggtgcaggatagaaaaacagaacaaaactgtagtttggtaatgcaacaccactgattaagtacagaaaggcaggtagaaactaattttttgttagcattttagtagagaagatggcacactggatatccatgagaatatagcctgcttcctgacagataacaggcttactacatctgcttataaactgtgctctactttttcatcatacctaatattcagactctacttttcaatgatacttcatttaaactgatgagaattggttttcacacatttccataagtgcaatatgactctgttttgctcaagttcatgaaacccacatacaggtttcaacaaaataggtcttttcttcaggaagttcttctagttaccaaaggaaagcattttaaggaatcaatatttgttccaagtcattctttctaatgccatgacttaaggacaatatacatttgccctactcacactggtattgtgattcaaatgagaaatatcagtcacaaacatgagaaacttggaataaaactttagtccaagctcagccacttccaaatatgtcactgtccttccctcctgcctaccacatcttggagtttgcagatctgctgaaattctggactccaccgctcattccacttcaaagctttggcatggctcatagtcctagttgtgtgatgaaatccctcctggcagttgatacctcccttctctcttgatggtgtcaccaacattcccaaatcatccttagtgcatcccttccttttctgataggagaatttgaggatgtcactctcctttccatggcttcccattgcccatagtggtctcgaatttactctgcatcataatctcctagggaacctcgccctcaacccaaagattgtgatttactagatgagaccttctcagttatcttcatgtctaacaagtaccctagagtagtgtttctcaaacttaaataagcctacaaatcacctgggggtcttattaaaatgcagaatgtgattcaacaggactggaagtgggcctgagacactgagttctaacaagctcctaggtgaaactaatgctgctggtccacaaaacaaactttggacagtgaagtactagaggattctgatgcaggtggtcaaaaacacttacctagacttgaggatcaaagagcatctggcaaggactgtttccaacacatacagctttatctcccaacactgacttttaggatttgtttccttgctgcctcccattctcaaatatgttccagccctgttctttatgtcttggcagtgctgaactacacatactcctgcaaacatgacaggaaaacagctgcttccatgcccttcctctgagtatccagcaggttaagtcctattcatctgttaactgagccattgctggtgtttctcctatgaagccctctctgactcacccaggcagacttgggcattctttttcttttttttttttcaaagacaggatctcgttctgtcacccaggctggagtgcagtggcacaatctcggctcactgcaaccttggtatccctggttcaagcaattctcctgccttatcctctatttggattgcaccttgtatctgggcccttcaaccattgtctttaacaatgattatgtgtattgcagttgttacttggaatgtttctctctcctctctgactttagggcttctgtcttttcacctttgtattccaagctcctatgatagcacctggcacataaaaggccctaagtaaaggtttgttaggccacagaatgagtaagtgaacactcgctatgatgaagtggaggggagttatctctctttatctatgttggatgtgtctggctctttcatctaacttccctctttgagtttattggagcccccttgccttgactgcctgacccatatccctcagtgagtaagttataaaagagccttagtgacactgagctgcaccacctcaaaataatccttacacttagatttccaacttaagctcctatccatgacttaagtattgtaattctcttccttctcagtcattttctttactatctagtgattgttctttttttctaacttggagagttgagatgaataaatggatgaatgaaggacagaaagaatgaagtctagataggtgtcagctctgaagcttctagtcattgtttttcttatatgctttatcagcatatgcctgcatctgtgtgcataggtccaattttaaagtggaaagacaacttaaattctctccaggaacctttactaattaagccaaatgtccatgaatgaaatatttattttaaaaagaggctttacctctctctctctatatatatatatagtaagtattttcttatttatcttctaactaatcactgtctctctctctctctacatatattatatatagatatctatattatatataatatatattatatttattatttattatttatataatatatatcttatatataatatatattatatatattatatatataatataggtatctatatatagatatctatatataatatatatatatcgagagagagagtgttgcttttttagcaacaatttttttgttttcactttctttttttttttttttagacaatgtctcatctgtagcccaggctggagtgcagtggcactatcacggctcactgcagcctcgacttcccaggctcaagcaatcctcccacctcagcctcccaagtagctgggatcagaggcacataccaccatgctgtgtggcccaggctggtcacgaattcctgggctcaagtgatccttctgccttagcttcccaaaatactgagattatacgcacgagcctccatgcccaacctgttttcactttatatttttgtctatttgcatttaaaacccctgtcacaatcctctttgaggcattatatatacaagttttaaaataaaaatgaagtaacagcttcactttttggcatttttcttatgctttttgcttgtttcaacatagtatagactcagttctgatattcattatttttccaacttacgaatattctacggccacattaactgctcgctggttgatgaagagtgttcatttgttataaataattgcacaaataaagttagacatatttgtcaaccttatcaaaaagtcaacattataaccacaaattaaaatgttattttgaagcaggtatttaaggagtaaatattttatttatcttccaactaatcactttctaaagaatctttataagagatagtttacaccacattgtttttaaggaatgcattttactttttgtcaaaaatatgttatttgtttttaacctaagtgtatacagactgtattttgacaaccatgatctggaattgatttagtgtccacctgtgtttattttcttctcaaaagaagtctgtacactaactaatatatcagtcaatggcaatttccagttgttattaatatcaatataaacaaatatttcctagagtattaaataaattaatcaaggcggtttccatcaaacatgctgaaatgtattcccataatctcgagtggcttatatgtgataatatttatcattttaatttagttccacaaatactgtggcacattaaagagagatggcaataaactacagttcatccaaggaagggttcacaggaatggtgaggactattcatgttttagtgtctgaaaaccctagatcttctcaatatataaatttatgttaagctagtttgctttcattatagaaatgcatagatttctataagtaaatataagattttgcatttataaatatttcaacttactagtttaggatcagttcatgttccatacttttaattttaatcacaaatccactatattatttattcctagcaactgaaaagagtgatagactttactttttctctgcccaaattgttggaaaaaaaaaaaaaagattgtgacagggacagttacatagaaggtgccacagaagaccctctcatgttttgcatcactgactcttaaccttgagaagagcttaacttccttaaatgtttcctccaagaaacaataaaatgtaacttaacttttttctaaaattactatcccagtgagatctataatactacattgtcaaaaataattttttattgaaacatccttgtcagtagattcagatttattttttcctacttttgtaggaaggaacatttcttcaaggataatggtaatcattcagatttccttttcttttttcttgatgtcttagtgaaatgagcagattgtcaccttatttagtcttatttggaaaccttccagttttcacttatagctgacattttgttttactcatttaaggagtaaataattagttgatttttttgttttatggttacctaaactcaaatatgaatttatttcaatattttcatttttcagaatatttttctcagcacttgggcgagtatgagaatgtactagcagcacttgaagacctgaatctttccatcctgaaggcaatgggcaaaacaaagaaagtaagaaaatgttaatgtttattttctataaaaatctcttctttgaaaaagatttttcttgaaaatcatacctattttcaactatagattctttattatcactgatagtttatttttcttcatactaaatgagctatgttattcatttgtaacataattataaacactatatgctaaagactgtgctttgtgttgaggatacaaagatacaaagagctgttagaatagctctcagcctggtggtgatacaagtgtgttaactaagtagtatgttttggatcttgtccctccccaaatcccatgtcgaattgtaatccccagtgctggaggtggggcctggtgggagatgattggatcatggatcaccaatcccccagtgctgttctcctgatgttgaatgagtgagttatcatgcaatctggttgtttaaaagtgtatggcgcttcctccgcccctctccttcctcctctggccatgtgacatgccttgcttctcctttgccttccaccatgattgaaagctccctgaggcctccctagaaacagaagccactatgcttcctgtacagcctgcagaactgtgagccaattaaacctcctttctttataaattacccagcctcaggtatttctttatagcaatgagggaactgactaatgtgctaagcattacagtatagcccaatgagaagcacaagataagacatctaattcatgctggagatgagatgacacctgaacactgagagataaaggaagttggtagagctggacaaaggagacaaacacagggaacagcacgtgcagaggctctgagtcaagagggtcacaggacactctaggaaatgaagctggacagtaaggataaagtaccaaagagtggcatgatgtaagatgaaactggagtgctagggagggcccacatctttcatgatgtcagcaaagctaaggatttaggcctgtatcctaagtgcaaataaatcagcaaataatttaagcagaaataaaaacaaaaaacctcatgcagtctttcaaaaagaccatacaagaattaacttgggattggggtggataatatagaggaataggatcagaaagatgagtgagtaggctagttcattagtctgggtaagaaatgttgatatttggaaaacaataaagactcaactgaattttgaaaaataaagttcagaaagtcccctaaaacttcaaggaaaacagaaaatataagaaaattggagcaccagcctagtgtatcctatatccaaataacaaattccaaaaagagagagagagaaaaaaaaaaaggaaaacaggtaaaaggtggaatcagaatacattttctttagacctcttcaggaatatttggaaactgtataataacttcatcccttggaaacttctctccagaaatggccattaaaaaattatctgctttgtgtgtctagcttcttgttgctcttcaagtctcatcttaaataccatggcctcagaaaggtcttctctgaccactctatctaaaaaaaaagaaaaggtcatctcaattagagtagatcacctgttccttgctggcaatttatcataatcagtgagtaactgtgcaatgttttcgttgttgtttatttgttgtctgtaaagagagagaagggcagtgtctggttttttgtttttttaggtttttttgttttgtttttggcttaccgtgtttactctgaacctagcataggacctgacaattaaaatcatactcaaaaatttattgatggattaaattaattgattggttaaatgaacacacatatagctccaaaagctaaatacttttgctcctgaaagaaaaattgctcctaagttaatttaagaagcttccagattgcctctaataggaagaaaaaaacaagttatataatcttctttatttcctcagaaatatgcactaaaatcatgctgttttccttgtattaagacaatgagattttgtgggatttaaattgaggtcaacctgttgttttggtttcttaagttacaaaatctttttcttggcactgacccttaaaaatgcatgtgattcatattatactgtttaaccaagaaaaacatatgtctctgatttaaattaaaaaggaaaaagaaaaaaaagaaatagtcaaaattaaaattagaaaaagcccctttgtgtaatagctcaaagatgagtaaaatgcaagagttttgacgtttctcaagccactgttgaatagacatcttcacgctgtctagcacatggacccttcagaatgagaaatctagcatttttctctatatttctacccagataaaaagtcctgtctcagtaggaagatctgattgttctagggttttatgaaaaatgaaatacaagccttttgtgatctatcttgactggcagtacctctgtttgcagtgtcagagaatggataaaatgggatttagctgcctaccttaaactccaggaagtgactgaggacagatacaatccgtcattattttccctcctcctccttctcccttaaccccagccttttgtcatatcctcaagggctacatggattattttactttgcttgttattctggaacaaaacaccataggtcaaattccaaatggccatttgaaagtcccagaggtaactgaaaccagaaccctctgtctgaatttggaatgtctcacatacacacaaaaaaatagctttgtcaattagtttttcttctttctacagggtagaggtgataagctaacttgcagcattagtatgtgaagtgcttgtaatctcaaaagcaaatgtagaattctgatgctacggctgaattcatcacgtgctatgttatataaacacaaatgggattccctgtttattagtagggcttaaaaggagattatcataagctaaagtgaagaatggcattcttaaaataattatttggggtttgttagttactttaatgagtgcagccgtgaaattttccaaaattaaaatgtatatatattttttcttctgacagttatttttcaaacaaacacagcctacaatacattttcaataattctaagaaagaaatagacttgaatcctagcactgccgggcctctgcctctctcttactctcctacatctgtcttcaggatctgtgttgattttagcatctacagatccctttatctcaatcttttcatctctcctctatctctagtttttttatgttgagcatctgggcctcccagggctccatagtcctttcactaaagatcacaatcattttatttgagtcttactatgaaaaagatgaaatagcaataggacacagaatttctatttgggacaaacatcattactataattttatgtaggacttattattaaaattttcccttgttttaggcaaaatatccaagctgaaatgataccatatgtggcatagtaaaatacccttgtaggcttacagaaggcaagcattttaattattcatgatagtttcattgcaatcctttacgtattcaatccttaagtatttaaaaataaaatgaaaaaattatccttggacttcagagcaaccacaaaaaatactttttaaaccgtttatttgacatcttcttttttccttgaaattatctgtcaaaatgagtttgcttaggggagaggaagtagagactaggaggatggaaaataggagagaagtgtcttgaggttgcaagtttggttcaataggacagaagccctgagtcaggcccaagccttggaatcctccatgcaaccctggccagacttctgcccaacacctggcaaaggggaactcaatgcctctggaaaggttgctcaatgaagtaaggaggaacatattctctcatatcagaccctagttatcctgaaggactctgcagtacctacttcctggacagagaaacctccacctctaactgggtaaggaggagatagaactgagatgagagccctaacccttctaattcatgtgagcatgactttgggtataatttaaaggtgataaaataccactttgaggttattgatagagttcacacagtggcgtagatgagtagttcaggcaaagatcatcaacaaggtggtggctaaggtggatatgctaggaggatggaggacagagtacatagtaatgtctgggcaggctcaagacttgcactggcacctacctggcaatcatgtcactggttctttctagccattgctgcagccccaccagactcttggtgactgatctgacttctccaagccaagttgccagatgatgcctaatgactcttctttcctgccagactagggcttccgtggctatgaccaaaaagagaatgaggaatagctgtcaatgccaactagcattcatatagcaccttggagttttcaacatgttttcatatacagtatttcagttactcttcatcacatcttagtaaggaatgttagtcaaaaggtaatatacacatttcaaaaatgaggaaactgagtcacaatgtggctagttgatttatcaatatcctaaagataatgagatttaaaccaagtgattctcgtttaatttttttttatttaaggtttatgtggttccatatgcacatactataaatatgcagctgtaggttctatcatgacacaaaacatttctggtattaggtacctttggtctttgaaacaatcaaagtctttagagttcagctgtggctcagcaaaggcataaagatttttagcttctctgttaaaaatattttcagttttgtttttgacaaatgaataagtaggtgtccagagctcagtgtaatatgtgaagaaaatatgaaagaaattatagacagaagcagatgataattaaatgctgaaatcataattaaatcctgaaatcaaaagatgaaggtgcataagcaaagttctaggcaaggaagttcatattttttatcatagtttgttgtcattagagaaatgaaatttaattagaaaataagagaagttacatacccatgtcaaacaatggatatttagctttttacttactagaatgaaatatatccaaaggaaaggctactgtagttgagagaagtaagcaaaaatattggtcttctgggctctggatgaatttataaaggatccgaaagcattccaataggagtcctactgatttttttttttcaaataggtaactgtactatttcttgattgacacttaaaatgccaggtttactatttgctaaatacttataatgtactcagttttgtgtcagagctcactattctgttcccgtggtaaactgtcttttctagtattaagtattattaacacgttatcttaattcttgtatacttagatatatttgaaaatgtaaaagtgcaggtcttctctgttctctctctctcttttgtttttgttttttgtatgtttgttttgtttttttggtggagatagggtttcactgtgttgcccaggctggtttcaaactcctgagctcaggtgatccatccactttagccttccaaagtgctgggattacaggcgagagccacagcacctgtcttgattgttcttctttagcagagatttttgcccttagtttgccgtgtttgcataagttttataattgtttttttcaattctgggaaaaacttttattggaattttcattaaatttataaagtaattttgagagaattgtcatcttggtaatatttttccttcccatgcaggcacaaatatattttttcatttattcaagcttatttttatgtctcattaaatatttttatgatacctcatataggttcaaaacatttcttgttaaatcaggtcatatatattttatatttttgttgttttataaatggccaccctctctaacttcctaacataatgttggtggtatattggaaaatgattaatttttgtatacacatttggtaactagattagctaccatcttgagtagctgttctgtccgtgacatgccatttatcatcctttactgatattacagcttgaacatcgagaacctctgcactgtaagaaacaacccacctaatctctcttttagggaagttgaccagtctgtatatagtctttaatgccctgactatcttctcccattttttttatctgaactttgaagctatgctttacacctattgttgttacataagatttcaaattatacttcattaccacaaggcagtaataaactatgacttacactttagaacttgtgtctgaagggaacaagatcattttccacaaaaccaaacatagttttaaaaagcttgagtagcaaaattccataaatacaaacatgtaaaacattagcctattcttacgtatttttaacagaaaagacacaaacaagtaagtaaataatgtatttaattaattggcagtacattgatataggccagaaataaacttgatgttcagaaaagggagaggtcagtgctcactgagtaatcagataaaacatcagcgagaaggtgagactcaaatgagtctcaaagaatgggcaattttaataaaggaaaaagagaagagaagaacctgcagataatgaccctactttgactttttaaggaggcagctatgaagcctagttccatcagaggccctctttcatgtccagaagaggctgtggtttacagatggaggggtcaggtcatgctgactgcagttggtatttcaccttatttacagtttctcgaatgaatgtataaatagcaaactgtgatcttgcaaataatcttgaatcaaggggacttaaaaaaaattcttaacagattgctagagctgtggtaggtagaagctccaggtcaactgctggtgtaccccaaatccacagaggtccctattagtaatcattttttttcatgattgttttctattttcagacagtcctaccaatccttcctccccatcccaaccagaaataaggtatagtgataaattatttttattttgtttcacgtacctataatttcaaatagccatttttttcctttgtagggattttcttttatttatcttacttagattgctagcgggaacatttatattcctaatagaaagtgggagttaattttctgcctaatgaaaggacgagtacaaagtacactgttctatttaaaaagaaaagctgttttactttgcccaaaaatatagttctgaactacagttgcctgagtgaacatacagccccatttctgaagaactgaactttgaaattctaaaagctagataagggagagaagttaatgcagacattcatgggggataaacagcacagtatgtgattccttctgtcacgagaattaaatttgatatgactcatttcttttgcctgaagtggaaaagtgcagagggagagattaaaaattggtctgtgttgtgtttctcagatctgataggcatcagttattatcatgttgaagttgttctttcccatttttatttacaaaaaggaaatactaaatattgcaaaccagaaatactaaatgttatttgagaattaattagttttggcaaagttcttattttcaaaataagtacatccaaaagaatgtactttcaaaaagaaaatgaatatgtgcaaaaaaagctattataggtgcttccccttggctgcaggacaagagagctcagggccacatggtattgtgtgacatccctttggaatgatttatcccgtgacctgtcagttgtgtaataacacatggaatgtagttctaacagccgtgcagggttattgaattgactgagatctctgggaaactttcctacaatttctttggatttcagtttgaatttctgttatggatcatactcactttttaggactaccaattatgccacaagcagcctagtttctgacagtatgggaaggagatgttttcatcagttgtacatgcaggtttcagaatactggctgtgtattattactctgtaagactgaatgtctatctgggagaccacttagctttattttatgaaccaaaataataataataataatgtaataacatagctaacatctatggagccattaccagtttccaggtacaatcctaagtacttttattttagtaatgtattttatcctaatcttcttggggtagattcagtgattatcactgtaagtgtaacaggaaacgaagacaaaaaatgtcagctaacgccctcaaggtcacacagctgagatgtggatagcgatcttaagttgatccctgtgaattgctttctggtcctccttggcatgaagctattatagtttctagtcaatttcttgagaagatgacaaaaattatggctgagaagacagaaaatatattgaaggatttgttagttgtaatcgttatctactgtggaagtttctgtgggtcaggaatccaagggtggcttaagtgggtgattcctattcagagattatcatgagattgtagtcattttaaggtccttgaggagttgcttttgagctcacttacatggctgctgacacattccaaggaaatagagtcagctatgtggcttccatttgtcaccacatgggcctctccatagggctgctcctatgatatagtagctggctttctctaaagaagtgattgtaaagagagagatgggctgggcgtggtggctcacgcctgtaatcccagcactttgggaggcctaagtgggcagatcacttctgccatgttctattactagaagtaagtcaataagtccagcccacactcagtgggagcggaattaaactccacttgtgtgtatgtatctttaaaactaccatagtggtcaacttttaactgtgtgtgtgtgagtgtgtgtgtgtgtgtttgtgtgtggtggagtggtggaagaaaatctttatctgttttttccctccatttatatctaccccattaaaagaaatcaaattgatttttgaaactctgacatacatgcctatcccttatattagttgaatgcttctaatgtggtttggctgtgccctcacccaaaatctcactttgaattgtaatccctacaatccccataatccccttgtgtcaaggatgggaccaggtggaggtaatgggatcatagggactgtttcctccatgctgttctcgtgatagtgaatgtgtctcacgagatctgatggttttataagcatctggcatttccccttcttgcactccatcctgccaccctgtgaagaaggtgcctgattgtcctttgccttctgccatgattgtaagtttcctgaggcctccccagcaatgtggaactgtgagtcaattaaatgtcttttctttataaatgacttaatcttgggtatttcttcatagcaatgtgagaacagactaatacagtaaaaattctgaaagataatgagaatcaattatgttttatctttagaactaagccacatatacaaatgtatatataatgaatatatatcaatagagccaaaacacatataacaagatgaaaaatacattttcctgagtttgagttaatattaaatatggtcaccctaaaacaagtttttaaagaagtatttttaaactatcagctttcaaacaaagagggttccagattttaatgtctgaaaatccatgtccctgaaaaacaactcagtttattcacgggttcagcagaaattccattctaggaaatgaaaggaatctaagttttgcaacacaatgccctcaagagtctcaccataaagcaaaatgggtaatttaggactatctgccatccaaaactttaagtagatttcataagaaaggtttaaacaacatgtggtaagactaataaataggaaagcatcgctttgtccagtaaatctggaaagttatcatggagtaaacagtattgaagataaacttcaaagagtggaaggtttatggccgaagattgctgggaaataatgagaatgaaagtcacttcaaggaaaagaagtaatagaaacaaaagtgtgagaaacacaatgcattttcatagaaatttggggaatacagagtgtttgaagcattaagcaattttggacattgtgagtgtccaggctgacaggcaaattggctgagaaatttagcatttaatcattaagtagcagaggtatattggaagtttttgaataatggaaataaagttggtcacatgagggtcacttaggaaagctttacttctctcatatctacttatttgtttcccaactgtcacctctaaaatgaggataatgtttagtcataatattgatctttattgtttatttgtaagtttcctacttacataatatgtagctattctacatattatgccattttgtgtatatttttatatattctaggtatttctatgaattctagagggtttttcacaattttcaacaaatattacctattcccatatataaaaaaatgtaatagaaccaagaatttttctcattttaaaaaatgtcattcttgatctgattttttttttggttgttgacagtcacagaaggaattaagaaagacaaagtttaggttattagtactgaatgctgtcctagtcaagactttttttctttttctttttttttttagataggctttcactcctgttgcgcaggctagagtgcagtggtgggatctcagctcattgcaacctccacctcccaggttcaagcgattctcctgcctcagcctcccaagtagctgggaccacaggaacacaccactgtgcctggctaatttttgtatttttagtagagacagggtttcaccatattgcccaggctggtctcgaacttctgggctcaagcaatccagctgccttggcctcccacattgctaggattacaggcatgagccaccacacccagcctcaagtatacttttatacttgataaagttttatgtttatccaaacatagcagctaaaggccaagaatttttggtttataatgacaggcaaaatggcaattatgcaaaatgttcagaaaatatttgtaaggatttttcctggttttctcaggagcatcagaagacatagcttatcactctcttccttacatggtcatgtagtttttctatattactttgaatatcagcatttcaatgaaataaaattgaggtgggtgaggggttaatacataggttttttctctattgtgggagagaaatgtcccttgattttcttcatcattcagtcaaatatgagcattaatagctataatagctatctaactataataaacattgatagcatcataatttccattttcataaaaaacattggctaagtatcacatctatcaaattttctttgtaacatacaatatttaaaatgatgttttaacagtaaataaatattttaaatgaaaaagaaatgacctatgtgattattaacccccgcaaaaggtgattgtcatatttgtaccccctttagatctttgttgccttgtgctctttgctttattctctacgatcaagtcagtcacctactcctaatgattttgtccttaatgttggtcacgtccatcttcttccctcgcaacccactgtctgggccacatgaggcagagcctccttgactcgcacagggattccttgtcacagcaccgaagtcattatttttcatccagtgttgtctacagaccatgctccatcctgctggatgagacatctttccaaaaaataagactgtccctcacctccttaaaaccttacattggctcctcattgacctcaggacaaagtctagactctttgcccagagcacacaggcccacccaaatctgagccttccctgctcatctggtaccctccccatctctctagttccacctcgtgccagtccttaccagatgattttctctccagctatgctcagccatttgcacttctctgagttccccaccatctctgtctcccaactggatcttgccatatagtgatccttgcttgtggatgacatcattctgccctccctaggtccttcctcagggctcctccagttacctacttgctcttcatctggctggtcctctaatattcctggtgatactacgggacttagcttaactgtcacttcccctaggaatcctttcttgatcctccaagtggggtgtcggtgggggtagaggggagattaggtgttttcaaaccgcctcttgcacatccccatggtagctccttttactttttacttgtctgtcatcccaactgtcttgaagtgtcttctctctcactgtatcaccgacagctactagttaaggcactcagttaatttttaaaaatatatatcggctcccaggggagctgcggatgtgatgaagatcactgatgatcatgaatcaatcacccggaaaggaagagcgacttggcgaccacaatccaattctggacagatggacagcccagatgggtgtcccttccaagggactagggagaacgtgaaaagggagcagatttcttgaatacacatccccagactgtttctaaaatttggaaggattgcttgtccagagcaacacaatactctttctgaactcaccaactcatggggtgaaaactgtctatctccatcctgcctgaattccagcagtgcaggaggcaatcagggccccctgcaatgggccagatggaatttatggctagctggggaggtctggggaaaagaaagggattagcagttttaatcctagtgctcatacagttttgcattttgtaaagaatgctattttttttttaattatagtcaacatcaactattctcatggttggatttttttcttcagttcattatgttgaatttgccttttaaatgattttacctatgacacatctttagttcatgatctgctctgacattttgagagctgtaaccaagattataatgtggcaggacatgataggcataggtgagtaatatttttagaatttcttagaaacagaggctgattttcatgctgataacctaaaaagcaaggaggagaaatagacacatatagcataaatatcatataaagtggacaaataacatatttaattgtatatttctaacagttccagacacattttttctcacataaatatttttaataatggttatgctaaacagagaccaattcttccttaatatataaggaaatacatgatattagaagaataaaactattttcacttccttgttaattctgcctttgagttctgcataggtcatttatatacattaaaatatggaaaactacctctcactccccaaactatacaaatcagaatatgtgggataaatggagagatgtctccagaaataacaatttcatacttaggaaaaacttgatatgattcctagctctgctacttgctagcatatgcccaagttaatctttttgccttcatttctttcattgtcagatgttgggaggataaaatgatataatgcatgtagggggtctagtactgcaagtggcccataataggcacaatataggcataatagtcatgggactagttatctttctacttccaaggtcattctcaagtttcatactttgttattggaaacaattgctaaacatgtggcttggtgctttatatggatatgatggattctttcttacaacaacaaccaaaatattttatttctataaggtagaggggagaattcaacagagcagctaactaataatctaagtaaaaatttggaatgttgacccttcagagaaaattttaaccttaagtcagaattttacatgctgatttttttagataaacagataataagtgtaagtgcttcatgagacttcccttcattttaaggatatacatttcagctgatctatgacaaccaactcaatagtttaatgaagcacaggggcttgtttctgggagaacttcagtctggtgaatgcatagagatgcatgtatttccctgagtgattgactaagctgctgcttatgggaacagacacatatgattgcatagaggcacaaatgtctgttaagaaaattatcaaaagtaaacagaaattaattcataaaaatataaaggaacaactaaaagggaagcacagcacctagtcagccatctccttgttaatatgatgaaaacagatcatctgcagtgacagaacatatactcctacaacactcttggaagcacaaaggaggtatgtgagacctagctaccaaaactataaataactccaggagcagaactcagtgtctctgaatcccagagaaagaaaacagaaaaagtagtctcaacactgaggaagcataggaatcttttgaaaagcaaaaaagaaacaaaccaaaggcatgtatgtacagagcaggtgccacctcaaatccagtttaatagacacaaaaagcacctactgtgttcagagtgttgccatgtgctagtaatcaaaaggaatataataggaaacaaaaattagcctttgctctccaatcaaataatataataacagcattttctactgtcttgatcattttgttgcaggtttatttttcagcagatagaaaaagtgattatgtatttgataaagagaaacagattaggaaattctgtgaagcccccttccttgccccatgaagttaaatgaaaattagtcagatttgtggcctcttcaaagagaggagtgctgagtggaactggcctgtggccatagaggaagtattccatagagaagtattctgtacaatagatctgtggcagtagctgaaagggactgttttccttcctttaattgtaactttctactcccttttatgttttctcatgtaaatcagaggcacaattaaagctcaacgagctgatgtcagtaggagaataattttttcaagttactcattttagaccaagttttgtgcaaagtctgtattttatgcagcctaagagacattctgcagatgagtcttaagaatttacctcacacccgtaataggtatacttattcttgtcgggtgctgtgtcataccatgcatccgtaagtcgatgcagaggttcataaaaacggcacttactaaaacctcccttagctatcctccaccttatccagagaagcttcttcttttggaaaatcaagcaaaacaactaagctaagacatgtttaaaaagtttgaaaagaaagctgtaaggaaatacaagaggaagagttgttaggtatgagttctaaatttcttttcaaagaattaatatgtcggccgggcgaggtggttcacgcctgtaatcccagcactttgggaggccgaggcaggcggatcacaaggtcaggagatcgagaccatcctggctaacatggtgaaaccccgtctctactaaaaatacaaaaaaattagccgggcgtggtggcgggtgcctgtagtcccagctactcaggaggctgaggcagaagaatggcgggaacccgggaggcggagcttgcagtgaaccgagatcgtgccactgcactccagcctgggcgacagagcgagactccgtctcaaaaaaaaacaaaaacaaaaacaaaaacaaaaaaaacaaacaaactaatacgtcagtatgttcaattctctgccttctacttttaaacttaacttcctcgtaaagcaatctttttcgattatctactccaccctgactcatcctgattacctactccaccctgactcattccgattacctactccactctaactcattcggatcacctgctccaccctaactcattctgattacctgctacctgctctgccctgactcccgccaaagcactcaccacttcattctctttaaattagccaattagaattagtttagcctgtgaggtctaaccctagccaataggggaacgacacagcagcaggggtgacgtgcgtcagggataagaaccccttgccctcccttctccaagtgtgcactccattgttccttctatatagaagtaccttgctttgctgagaaaaagaaaatttaaaaaaaaataattaaaaaaaagaatttagcaggtagaaagcagcaataaaattttcttcttcaattacaagccaaattattggcaactcttcctcttcggttcccacaatccttaagaggatcctttgaggggcacagatttactataggtccaccacttatctgcgattccaaaatccaaaagcttctgaaaatggaatgttttggttttgttgttgttgtttggtaaacttagcaccaaagtccatttggtagcaaaatctattttaatattaagaattttgctgcaaaactaccaatatggtcattacagggtactgctctagaccctgctgtgggtattatataattacatgacatatgctaggtgttacctctctagaccctgaaaaattctgaactttgaaatgtatctggctcaatggtttcaataaaaaattaagatggctatgtcattatatatgttatggaaatggatgttctaattattttttcagactatcagattgcatgcttcagcaatgctgaaatgtaatactatcttatgtttaaaaaacaaagtaaaacaaaaaactatcaattctttgaaaagtttattgcatttcaaagagcagtcaaataatatgcatagacaagtgaaaattgacccccagtggtctggggaaaatgtaaatgaacttattaacgtttcaaaaatgacactttaggagactcaactgataatgcttgtggcaagtgtattggcgtgaaataaatgaagaatgccttcatttgtaggcttaatttactaaaagaaatcaggacttacctcctgtaagtcactgttggcagatgatttaaatggctgtgagagtaatcatttgatttaaagaataattcctttttatgttttactattgctacagaataagattatcatctctttataagctttttatcctctgtcattttctgtagtagctttcctacttatagcctgtatcttctttggaggtaatatgacctcaaatttgttccttgcctatagaacatctctgtaatcaaattacagttgagaaaagcccatgattacacacctcactatcaggctgcattttgagtgatagtggaaaaaagaactaccaagcctggctgctcccatgagaataagtttagataggaagtcaaggctcaccccaatgctctctctcaagtctcacctcccctcttccatcactaccaccactcagtgccccaaatccaaatttaaaatatagccttgtctttagacttagagtagcacaacttttgtatttaaatcaatattgtcccatttcactgagattagacatcatattaactatttgggaatctgtaaaaccacaggaccctaaaaaattaacacatttgatatttggggccacctagaactgacagtctccagaaggcctaaaacttcaacagaagtagcagctccaagtgagtttgaagcctagttgctgcttggactgtgcttcctattccaatacccctgtcttcttctcttgcctggctcattgcatcttctataatgcccagtatctcatgcccatctgtccttttcacacttaattcagtgtttattgagaaagagacagctactatttattgagcataatacatgttgaccacagtgcatacattatctcaattagtcttttagcccaactgcactgagtcactctcacagtcaggcacctggtacatggtaggtacacaatctactttcctcagctctctcttcaccttcctaatagttcatttgtctcatcccaactgagattcgttcatgtggcacaagtatttatggaatactgtgtctgctcaaatcctctagaaacagaagccaagtgcaagagatatgttgggagaaatgcccttggaaggtaaaggggagagggaacaagagcagtgggaagatccttcaggctgccctgcaggtctggcacctgtgaaaagaggaggaaatggaagttgggctggcagagagcctctgacaaagttttggctatgccagtgggacgcccgagggcaaagactgctcataagaggagtcccccctgacttacaccatccttagtccttggcaaggaatactggagaggatgtggcttcagcatgaacactgctgatccccaaggtgtggcagctggagatgggtagttaagcatacttaaaacagtttctctctgtggtcccttggtgactgccatagtgtataccaggatgtgatttgaggaacatgggcaaaaattcaagaatctgtgaaaattcagctttaaagatccacttctcttactctcaaaggtttttcagtctttaagagtctagtctttacaagtttttaaaagtaaatatccctgggaatagaaagatctaaagtcctagttactgaataacttagcagagggtagttaaaagctcactaaaagtaaagagatgggacccaaaatttatttgagctggagcaagtttagaaactctggaacagagagatgtgcagaaagaaatagtgatgaaccaaaaaccaattccctaggtttagctttgccatagtttaaaatatgttgatgctcaaatcttgtccctcatgtgtgtgatattgtacagtacatttgatttttgtatgtgtttattatacctttgattcagaaaggtttacaatgcttccttctttgtcataagaaactcataattcaggtgggtgcttgtttcttataccagcatgaagctaaacataatagtttgaaactactgaaaatattgaaacagaatagttctgaaaatattattttcagaatattctgggaccttaactgcacagtatgtaggaagaaaggaaacattccttcctccctacagtctgatacactagtgagaataataagcattactaaaacaacaatgagcactcaatggggagccttgaagagtaccttagtgtttaatacagtgctgtaaaggcatgaacctttcccctgcctttctctatgagtaaacttagtgttgctgcattttccttattagaattattttcatttcattagtaaaataggcagttgttcgggagtagagcaactgaccttagtctttatataccaatatgggatgattcaagggtcatgtgaaatgtcaagctacacacaacagaacaagcataattctgtgtactctgaatcttcccacattgatcacttttgaggccagaaagtaacaacagaagggtagagtaggcatgacagaattgcttcaccaatggaacaaagaggaaaaatggttcttttcttcttcaactctagatgaaccagtgaacacagacttagccagttccaggatggaaactgagccccatgttctcatttcatatatttgagaaaacaaacacaaaggggttagtagacttgcctaaaatcatagtatgagtcaatggcaaagcccataacccagtgtagaatcttatcctctataagggtaggaaaagtattattcagaattgggtagaattagttctttcccttccaatcactaaactgttaacacaatgcctcttgggagcataattaagactatcactataaccttccaggtacaggattctttatctgttgccatggcaaaggagcaaaatctaagcccctgattaaaatgaatgcttttgtaagaaataatcaagatccctgtcagggtttcatcacgctcttatactctttgtcatttttttatatgaccccaagcctggggctcaaagtgcctacttgaaatttctttttgttgtttgtataataactgaattagttttgctccagcagtttcttgatgatttttcagtaagataaaggtactttaatcagtctaaatacttgaacatttttatttcagtggtaaaaaatagactgaggcagagtgaagttataaattagaatctaaaaatttacccttcaacattaatattttttagtgctctaatataaaacacagaaaacctatctcaaatataaaagatgaatataaaattattaattaaacaactggcagcctggagatattcattccagcataggctttgataaatcttttcctgaaggcagttaaacctttttgagaaaaaccttctgaggctgatatgatttaagtctctctgttaaaaaaaaaaaaaaaaatggtgtttataaattatgctgcctttttgctactctcagcttaaatagatgatgtttcctttccttttttaattgctggttttcagctctgaaaagctttccttccagcggtgccctcaagggcacagttttataatcaagagcctttgacccttgtagcctcatgagactagaacccactgtttctctccaggtatgtttaacacagacctgggaacaatcgaaaagcttttcgtgttttgtgctttaaacatcttttgataaaatggtgcaggaaaatgacaccagtattctagtctagccgaggagagctatgtggtcttcagcaagtctccttaatttatctggccttccttttgaaaatgagcaatttgtattcagtggttccttctagctctatgtctttagtgggtttgctgattgcctgtgaaatttgtatagtacgaccatttgaccctgaattttgtttttcgcttcaacagactatgtatactctgttcttgtcattaattgaatagtatcgctctctcacactaacttgagccttgtagttacacacatttaatggaggaatgagaatgttccttcattagcaaaccctatctatatttagtgtttggctaaaacctcgtttgcactctctgtatttgtgtgtgtgtgtgtgtgtgtgttaatgttacataagtatttgttgaagcattttaatctatactgcaaaaggatgttttatttccttctttaatgtactttgcacagttatatttacaaaggaatattctataaataatagaggtactaatccacatattttattctttctcttaaaaataagaaaagcctattttttgaaacttctcagattgttctgttatgaaacatcactactggctgggtgtggtggttcacacctgtaatcccagcactttgggaggccgaggagggtggatcacttgaggtcaggagtttgagaccagcctggacaacagggtgaaaccctgcctctagtaaaaatacaaaaattagccaagcacaatggcacatgcctgtagtcccaactattcgggtggctgaggtaggagaatcgcttgaacccaggaggcagaagttgcagtgagccaagatccactgccactgcactccagcctgggagacagagtgagactctaaaaaaacaaacgaacaaacaattattactattaagttacatacgtagaaaaggagtcaattgaattacgttgtacttactaatgcaaaggggctctctgtctctcttcatgtgtgtataacacacacataaattatatatataatgtacctgtacacacattttacagtttatattctataaatgttcaagtttatcaatagttaaataaatataaattaaattgacaataaaacatacttctatcaattaaaaatgtttaaaataataatgccaattgttcaaaaacacaggaaaacgaagactcttaaacatgataatgggactttaaattagtactacctgtaggagggcaaacttagtgaccttctacctgtaggagggcaaatgtgagaaaatatgtctcacattttcaatttaggtattattctacctagtaatttcatttctagaacattaactcggaaataatttagtatgtatacaaggaatattcaccatataaatgtttatactaagaaaaattagacaactatctttagtttatattcaacaatatgagattgatgaataaattataaatataaaatatactatttggctattaaaaactatatcatatatgaatacaattgacatggaaagatgtatgtatttttatgtgcaaataactgatttaaaatgtacatgtagttggttttgaaaaaacaatatattatagatatttcaatagctttattgagttataatttatataccataaaattaaccaagtgtaagcatacaattaaatatttttattaaatttatagagttatacaacgaccactgcaatcccattttagaacaattttttaaaaatattttatgttgccaatctgtattttctaatttataacattgctacttcaaaagtgaaagttatttatatttttaatttaaaattttcatacagctttatctgcagaaaaaaacatgtcacatatcttttcaaccactttagtctgtaattgtaggtttgttataataaaagtcagtagagttttaaggtagttactaaaaacagttgctttttatttgttaattttttctatggatcaatgattacttactcatgaacaaaaaagtcaaaacttacctgttagctatctgactttaggcagattactttatctcttatgacaagtttgggaggtccaaataaatgaatccatagaaaatacttagcaacttctgtttatagcagtttgggggaagagattctttcaacaattctgttgctgaaacaaactaaaaataatggatagaatatatttttacatttctgaaatgtatccaagccctggcaagaaagcaaagacttctcagaggccaaaatgtaagtgaaagagggaacacaaagaaataagcagtaggaagcggctttaattcattgaccttacatttcagttttgaagactttcagcactggggcaagagaaagcgtagccaccagcaccccgcaaggtaaggattctgataacaaccttctgcaaaaacttggaacccaaaagcctttactgttcctcgaaaggaaagttacccctagtgatccagggcaccaaataaacaaagggggaaagaagtctgccctgagaatttataactgcaagtcagccctcatgtaaatgtgcaggccaaatcaatttcctgggtggaggggaaagcctcaagccaagaatttaatttaaaattattccaagatgatggtgcccccagatactggacaaaagcaaaatcaaattctctcttaatctagatctggtaaaatttccacagattaatcctgcaaggaatatgtactgaaagcaaaaaaaaaaatctcaaaacatacttcagacagtattaaaagactttatatattgaaatcatcagctaaataataagtatgttaatatatttatataaatatatgtgggattaaaaataggagaaatgagcaagatataaaaaagacaaaacaaatttgagaaagcacaaaaagatttgctaaacatttaaaaaatacaataattgaaatgaaaacatcaggaaaccagttttacggtagattaaatagagtagaaaagagaattagtgaactagaggacacaactgaagataccacagagaatgtgacttagagagacaaagatttagaaaatagaaaagaagttaagagacctagaagattgagtgggaaggtccaatatacctctaagcaaatttccaaaagaattaatgagaaaattagcagagaagacaaataataaaaaaaattgtatatctataaaccaacaatagttagaacatgtatagaaacctaatttatgatggatctggcaaaaatgtatagaaatcttacttgtgaaagagctgacatgacatatcagtgccaaaaaaaatactggactgttcaataaatggtgctagaaaaatgacttatctatatgaaaacaaaagagttaaattctgaatccatacacaaaaatcaatcccagtttaagacttacatgtgtaaaaatttaagttttagtatagaagaaaatagtttaatgactagagtaagaaggatttcttaaacaagatgcaaaatataaactatacctttagaacatagtatggcataactttcactttattaagttgtatatcaaaagacagcacttacaaattgaaaaaacaaacaaaccaagagaatttgcaaaacttaactaccaagggctggtgttaaaaacatttaaacaaatgctataaatcaataaggaaaaattagaatacataatagcaaatgatttggcaaaatacaggaacaggaacttcagaaagaagccagggaaagtccaatatagctatgaagaattactgaaactcttgtttgcagagagttgtaatgtgcagtgttgggcaattgtgacttatcttaagccaagttagtgcagtggttcaagaggtccgtgcagataatttagcacttgtaccctagagtttaagtgtctggtggaagacagaagagcaagcctgcacagttaatagccacaggttcataggcagttggaacaaggattcatacatattgttttagctgtggatttcaagaaaggagagaaagaaaaaaaattgcagattaattgttctattattttctaaggttttactatattgcatctgggtgctaatttcatctgtgctgctgggcatctgctgtgatttctgactctgaagagtcatacctttgtttaatactgcaaaattatcagcaattgtctcttttctgttctctttgttctcctcttagaactccttatatgtaagttaaatactctcgttctcttctctgtcacttctatttcatattgttcatctctctgcttcagtttggataattacttcagattaatattctagttcctaattattcttcatctgtatctaatctatttcacatatccattggatgtttattttttggaagttcttactgcctcttttgaaaactgcccggtttcttgcaatagtctctcactcctttctcctgcttttcattaccctttttatgtctttgaacatttgaagcatattatcgctgactcttttttatgatactttttttctttgtgtgatatggatatgtgcgggtagattggcatttttccactattagtttatacttggctgattaaatcattggggatttgatgtatttctttacggagaatatgtttttgtttatgccagctgcctcaacatactaccaatacagaactgaggtgagttaatctctcagttttgggcttccctgaatatgcaggtataggagttcgaacctcagactgctgagtggactgaatcttgattttaggttttcaggagagagttttgcacccagaattaagactgagaagacttatttgtcatcttcctttgttcacgcatagagtttttttcccagctctcttttagtaaaaatgtggtcctttgagtgttccagcttcaaccccctaccttgactcatcctctgttcttccaaaagttgttaaaatctggaacttaagagtctccagttaaagaaaatgcctacagtagagcaaggccttcaatgcaagattactgtcagtctctttgtctcctgttcattgttgacgctcttggttttctcttatgttcttagaagctttgttgtacattcaaataatatttgccacactttaccttttatagtgcattctatagaaggagtattttaggatacttaactaatcctaatgccaaaattggaactttcagaaattttgtttaatgtaaatattaccttccaatttatcaataagacattcagaactaattttaagtagtctgtatagtcatctagaaacctttttcagaaaggaggatgcaggtagatttgaataatccaccttttccttacatatgatatacactatatatatatatatatatatatatatatatatatcttctcactttattgctctggctggagtgcagtggtgcaaacatggctcactgcagcctcgacctcctggactcaagcgatcatcccatctcagcctcctgagtagctgggaccacaggcacatgccaccatgcctggctaatttcccatatcatatatatttttaataatgaaaatttgagggtctttacttcttataatccacccaattttgtgtgtgtgtgtgtgtgtgtgtgtgtgtgagagagagagagagagagagagagagagagagagagaattagtagactgcattgttttagctagctaatactatgaactcttggcttatttttccagatgaccattaaaattccagttagcttctgagcctgtctagatactcctaaaatgccaggagaccttgacacaaactcaatgctaagaaaggcaagcccaggctatgatttcaggctatagccagtctcttatgttacccagtcattttcttgaacatgtgtgagaaatagtgctgtctttcaatcctgatttctaaatgtgggatatagaacacaataaagttacaggtacagacagatcatccacaccccttgctttcagtcacaggccatattgaaatgtaataaaaaatacaatgtatttcactatttctaggatacatatgtttcctttttctgacagctatgaaattgggatatatctatcaattgatggtgcataaaagttaactggtgatattgttatttccttgtggtgtataaaataccaaaatagtggtgcatcttataattaatggcactttatatttgatgaagtacagtattttggtttttaaatcccactggaaaaaaaagtcttacctgtttgttattctgagcaagttatctattcccaaaggttattttttcctgaataaaaaattaccagaatattttggtattctttcatagtgagccacaagggaaaattaaatccagaaatgtgtcagttttcacatatttataaactactattttccatacactatgctgtttagaaatgctcataatattttaatgttcaattattcttctgtcacaaaatttgtttagatcaaaagcaaggataattcgcctttgaaagcacagagatcatatatgatattttgaaaaatgtatttgtgtctgacaaatttagtaacttaggcctattaactcaacatattataggactgtggttaaaatagaactatccatctgacacatatactgtttaggaacagtaacattacaaatgagtgttatcctttgagtatcatttatgtcaactttgtctcatgtgtattccataagcttaaaaatgatattcaaagaaaagtgtgtgagcaataaggtggaaagcagtgtatttatggggaagaaattttggtgatattttatcatcaatatcaacaaacataaattgaatccaatttatgtacgaacatagttctgtgctcttcatacttaaaaacgtaacatttggttctacgttacactccagaaaaatgcatgctagcagttgagaagatggcatataagaggtgttaaaaattactaatttggaagtgtttacagattttcttgtcctactgcctgccaaagagtcctgtattttacagcccctatctgtctactccacagctcctcaaacatatgaatatagtatatttctactagactggttcctacacataccttaacctttttattgtaaaacaaaacaaaaaggaaagccacacaaatcaaatgtagaacttcatgatcataaggcaaacactcttgaatccatcaccaagattttagaaacctgacctaccagttaccccagaagtctttccacatgctctgtcccaattatgattcctccttcccctgaaaataactaccaatggatccttctagtagtcacttccttgtgttttattatggttttattacacagattttcattcccagaaactgtagttaaattgtactcattttctctgtattgcatttcttttaatttataggctatcttgcaatcgcttttatttatatatttttacagtttatccgttacagagcccagagaggtgcttatgctcatggtttaggctttactgattgccaatcatggtacaagtaagcacgttcttctgaactctatctttgctagaaattgtcagctaaatccagaggctaatttgacaaaactatagtggatagtgtgttctcctgtcaaggatcacatcttttagttgtttttatttttgaggttggcagcctttgatactcagtgactgaaatagtgatcagcaaactccagccattggccaaattctgccagtcatatattttatatggtctatgaacatagtccaactaattcagttatatctatggctgctttcatgtgatctcttgttcacaaaatctaaaatatttactgtctaggcctctacgaaaaaaaaaaaaatgttgcctggatctggtctagatcaccagtatttatgttgaagtctccctggttgttttggttgtctgcagctcattttctaagattcctgaggaagggctcacaagaacaatattacctgagttttagcatgttcacaattttcggggaccgtttatacttaaaagacaatttttcctgatacaaaattcttggctctattttaaatatcttaaaatatgttactacgtttttttctggaataaaagtgttggttttggaaaaccttgtggtaatctagattttattttgttttgttttttactccataagtcatttgctctatatgtctccatgcatgaagaattcttgctttgtcagtccagcaattttatgaaaatatgtcttgatgtgtttgttctgagtcgatattctcatacatatggcatactttcagtgtttaatatcaaatcattttattttaggaaaacattcttgaataatagtttctagtgttattttcctttgttagtttctatccttccttagaaattctattatcagtatattgtatattctttgtatattcaacatttgtcacttcctctcaaatcccttttatttgttttctttgttatttttgattttaaaagctttctttcctttcattttctcttattaaggtattacatgtaatgtttatttgtttttatgttccttctaattttgacttaatttcggaaataatacttttcttccattactaattcttttctgaatcctatcacttcatttctgagttaatctaactctgatttatgtttttgttcatttcttgaaatctttttcttaatatcttctagcttatttttaaatacttggttgcacttgggtctgttttgtcatcttgtctttctggtatgctttcattgtctgcagggatgttattgtgcttcttatttttctttttcttattataaccttgcataggatttgaccttaataattttttgctgcttttaagaattcagttttcctgaattttttcaaaggaagttgtgttcaaaattgtttttctaacttcacagggcttcctcttaagtggtttgtcttatagtactgaaaaaataaggcagcttttcttccaaggctttctggctctgtttctctccccaactttttatctgaatctccctttttatttcttgtctctgtgaccatccctctcaattttgagtccactcctagctaattcctcagtgtaggtccctcctgacatagcccttggagtgaccgattttaagagttcacaggggctacacagttccaatccctttaggacttactaagatttttgtgctctctcatttttgtactcaaccacttttggataaaatgactgccagtttcagttgctattctcaaattagccattgttattctagtgaacatttgttggctactttggagttctcttgctctcaggtttgtctcataacccattgtgttcctttgtttctgcctacacatccagcaacaccatgcaatgcatctcttgtggctgtcagtgattttgtccttacccacctgcaattgtaggttgatgatgacaccttgtcatctagttttgttgcattcattgtctattggagctttttgttgttgctgttttctagttgtttgctctgtttttatgtgaagattccaagggttttataaactatgccaccaacatggccatcttccccaaatcctcctgttactattttgtggtttctacacaactgtgatacagaacaagaactgggcctagatgagtaaaaccagactcatacaaatttgaggagaaaggaagaaatcttagccaatatacatataaagatataggagagaaaggaagaaagaggagtaaaatcaaagactaagaaagaattttggaaagattctagaaaacaagatgttctataggaggatatggctcatagaattcagaggagagagaggggaatgcaagaagtactgtttataaattgtatctgattgtatatattataaattgtgtctaatttactatatctaatttactaatttactatacttgaggcgaatcaagtcaagaatggaaaaatttttgataaattttgcacttgaactctacatattaaacttgacactcctcaaacaccaaattccatggatcacagcttcaatctggtaacaagtatgtatataaaaggtgtacatttttgaataagcaaggtagcagatatgcagtagaaaatatgtgtcaaaaataactcaggaaaattaatatttgtgaagagcctgctatgtgccaaacactagctacatatttgtcctagcaataattctgaggtgaagtattatcacagcaaacaaacccaggtcttgtgaagtttgagccaatgatctgtccattacactttataatatcctttctccaatgggttaatagcaataatgagcatttatcaaaaattatgagctagataccctactgtgtgtgccacatgctgtatttaattttaatacttgcaacaaacttatgataactattcttatccatagttaaggaaatagggattttaaaaggttgaatactttccaaagttcacacagctgtcaagtggcataaacacagaacgtaagtgtgactgtcttcagagccagcttcttaaccactacattatgttattagacacctatgaatgtgacctgggtcctcatctagtagttaatctcagatttgggctgactctctagatgtccccatcctcatacccatgtgcatttttctaaaattcctaatgtttgaagaggattacttcccagcagaatgggattgtcctttaggcaaagacatccaagtagtcttatgttcttgttagggtctcctgatatgagacagaacaataggaggagccagaggaaagaatcctacacaaaataagttcttgatgactttaagatgagccctttaaagtggagtttgtcaacgtaaaggtcttaatataattcatctctaaagtatcaacttatttcaaactacagaatatctggttaagatagggctcagaatttatttcaatttattaattgtttaataatatttaatccaaaattataattttgtctcctcgttcactaatctgagaatctatcatttccttaatccttgggaatctgtagtctgaaattattttgatatcttgttttgccatctaaggtttgcaaagactagctggaattaacctctgtccattattaggacaagtaagagccagttctttatttttgtatttttataaggcttaaatttgatatagtggtctcccagtttggaaaaaaaaaatgtgccatttaaaataaaagcctgagaatatttaaaagaagtgggacatagataatgtgtgtagcccacttagtattttaaaaagtaataattgtggatagagtagaaaagagcaaaagacaaccttatctttgtaaagttatttttttttctgttatagaagctgctgcagatgtcttacacaagaatggcgagagctgcagggagttaatccaaaagacagtcagaagcagtgccccttgctaaatgtgattgttatctgacctcataaacaagaatacactaaccctagatgtcactgacttgattgattttcaaacagggaagactgatgctctaattttcctaattaactcagatgattctatcaacctgatgggcagagcttgcttactgagaaatgatgtgaaaattaagatgcacagacggttttctaagaaacctgattcaaagcactatgcttccaatgctaggatttttactcaaatgaattctagccctgttccagctccaccaaaggaaatgtgtagattgaaatgtttacattttggctttccgcagacaaaaatggaggtattaatactactttgttgacaatttccacttaatgatttgtgtaactaataattatcatgacacgaatgaacattattaggatctgagaagtataacgttaacttttactttcccatattctttctgatagacatggaggattaaactgcgtttgaaaaaaaaaagaagcaaaatctgaataatgagtataatctgtacatttttaaactactttattttgtctgtaggagttctttctgccagtctctcaaatacaggttttgctcaaaggaatgcatgccttatgccaacataccagtcttttggggaattaggaatgcaaaaaatctctttttgtaccttcgctaccaacacatttgctgagaattaaaagggccaggatttgacattttccagcttgttatctatttaattttccatctgcttcttttgccactgccttccaaaggaacatctgctgcatatctgagaaaagggaaggaagattggatctgtgccacccgggtctgcagtctcaaaccttgagatccagaataagggaagggaaggagactaacaaatggtccagaaaataaaatgaggacaaacagtctgttagaacaaagctgtatttttctttattgcagagcccacatgactgggcaagtcgggtggtaatgtctacaaccagcaagggctggatgcagggggaggcaggtggtgaccagccagtggcaagagtacttcccagagcttggacactccctctggtgcctgactctccatgtgggacccggtttctcacacatttcttaagcatttatggggcagctgctatgaggcaattttgttctgagtactctggaggcagagatgaataagacataatccctgtgcttaaagagctagcctaaaatggggaagatagacaaatgaacaacagatcacaacatcacaatgaaaaattctacatcctatgaaaaattctatatcctaggtagggaagaaatgtcacaaaaatacatagaagtggaaagatgtattcctaatcctatgaagagaagtggtggttcaaggaaaggaacatctgtacagagacagtgttacaagctgagtctggaaggataagtaggaatattagaaaacaaggtttttttcctccttatcaatgaggggtagtataaaacagcaaaccttcataattgactcaaaaaatttaatcctccaaaccttaaacccacccaccacccctctcaatttcaaggcatcaacatttatatcaaagaaatgtatcaaccaactgggttctgccacttttcaatgttacctacagagtcactagtaaggttatcaaactctcatcagagtgagataagagggttagcctaatcataactttctgatttgctatggtggagcaatgatgagtggccagttgtctgactttaacttttcttaattatctaactttaacatcatcaaaatatttgtatgtaagatcacaatagcaaatgcaataaattcttagagttaggagtgtatctgcaaactatcaggtatgaatgaacctctactccaccataagggatacagaaataaaagacatgacctttctgtcaaagaagctgaaacctaattgcaatgactggaatgtttaaaatgactaactataattttttaatctcttttctataattctgacatggcaaatatttaacatttaaatgagaaaagagtaaggacaatgctatgctttattgctcagtaaatgtttgctttcttcatttttcaatgcagtctacaaataagtataaaactttttatcatttgctttatattagtcatagtatatactgagatgcgaaaatagttggtataatccctgactttgcaattatactttatcttcattttaataaattttatttttttaaatatccattggtgatatggaaataactgtgggaaaagactcaaacacacctttttttctatcatcacattttctttcaacctcaaagaaaagccttcctcaattttaaaaactcattcagagagaattttttgaagtttttttttaaccaataaatagcaagctatgagatcaaattaaatatttggaatatttttagcttgatttaactcacccaaaactcttaagattattataagcatgtaatggttatgtttagtttacggttagtttcttaaatggagtttaaagacattgcaatttttaatttttaaataggactattatatatggtagatgtattggtcagggttctctagagggacagaaataataggatagatgtttatatgaagggagtttattaaggataattgattcacaccacatgatcacacagtaaagtcccacataggccctctgcaagttgaggagcaaggaagccagtggtggatcagtctgagtcccaaaacctcagaagtagggaagccaacagtccagccttcagtctgtggccaaaggcctgacagcccctggcaaactactggtgtaagtccaagagtccaaaagccaaagaacttggagtctgatatttgagggcagaaagcatccagcacagaagaaagatgaaggccagaagactcagcaagtctgctcttccatcttctcctgcctgctttattctagccattctggcagctgtagtagttggtacccacccagattgagggtgggtctgcccctcctagtccactgactcaaatgttaatctcctttggcaacaccctcacagacacacccaaggacgatactttgcatccttcaatccaatcaagtttacactcaatattaaccatctcagtagataagaaaatttcctgtgttgttcacctgtaatgaatgagcttaaaaagaggctgatgattgaaactttttactatttcaaattgagaaagaaatgagattttctatgctattacattattcttctattagaaaaacttccaaagtaaactatatcaggaggccatagtccaattcttcctaaattaaagttgatagaagcacagaatatttttgagttggaatgtatgccagagttacttagtgatttataagtgggaaaactgagaaccaggaaggttagatacctaaatcttacttgtttgggtttataactatgccctaagcttcttcagcatatcaggatccgtggtattgtgttatcaccctcagtcgttttgtgttttgtcttttcagccataaaaaaattttgtttagggacagagacaaataaatcttttccttggctgaacttgaatgtaccatttccactcaagattctagaaaatcagatttcactggctggtcccatgatctgaaagagtggccctgtcaccatcttattccacaccaacctggtttttgttgttggttctccctgagactttagggagacaagcacagcaggtggtaccatccacagctcacccatctaccttgagtaagcttggcaagtacacttattcagtctgcagtgacctctgcagtgaccctggggctgtttcagtgaatgctgcttttgtggctcaggtgttgtcctagaagttaattgtcaatgagcctcaggtaaagttactgaaggaaagacataagcagatttagtaaaccatttaaatactccaatcctaacattttctgaattttaaataactacacataattttctttgtcttcagcataatacggatcaagcataataaatacatcaagagtgaattaagccaattgctgaaacatggttgcattttgttggtaatagtgaaaatatatgatggcgtggtcaacattcaaatgagacatagaacaaaccctgagttagtcacattctgatcttccccctccgccaccggatatttattttttcttttctacagatgtctattttgcaactctgctggttttgtcctttttcttaatcttgaggcaggtatattgggaggcaagatattccagtcatttctgcagcttttttattcatctcctggtgggtggatgagagtgatgctgtagcctccagggctcgacagatcttttcccttctctccaccctctctctctaggatcaatctgggattgatgggtacatggtaaaagaaaaaaaaaaaatcctgggtatttttttctaccatacttctaattgcatttgttttgtcacccttaggactaccaagaagcctccaatttggaacaattcgtaactagatttttattgaaggaaaccctgaatcagctgcagtctctccagaattccctggaatgtgccatggaaactactgaggagcaaacccgtcaagaaaggcaatttacatgttttcatctgatgtctatttagtgactctatgttcatgaaaaaacaattgagaggcattgtacttacactagcaaaaactaaaaaagagaattgatatatttaaaaagaatgacagtgacctccactggttgcttgccttattatttgcctctaaaaagaccattctactttttcttttactgtcagtcatttagtaaactatatatatatatatatatatatatatatatatgtgtgtgtgtgcgtgtatatatatgtctgtgtgtatatatatacacacacacacatatatgtgtatgtgtgtatatatatacacacacacatatgtgtgtgtgtgtatatatatacatatatgtgtgtgtgtatatatatatatttctttttttttgagatggagtctcactttgtcacccaggcttgagtgcagtggcacgatcttggctcactgcaaactctgcctcccgggttcaagcaattcttgtgcctcagcctcccaaataggtgggattacaggcacacaccaccacgtccagctaatttattgtattttttagaagagacggggtttcactatgttgatcaggctggtcttgaactcctaacctcagatgatccacccatcttggcctcccaaagtgctgggattacaggtgtaagccactgagcccagctgagtcaacaaattttaattgaaaatttagtagatggagaagactttaaagtattatgaataatataaagatacatttaacataatgtcaatccttaaggaagcctaagtctatcatataaataagacatgaacacaaaaactatactgcaaagaacaaagtgataataaataccgtagagaagaggaaatacattgccaattgttttcagaatattaaaagattaaatatggatagagggatggaaggatgagaaagtcaatttcatggagtttctctatttgagcttgtcttgcaaaatcaagagatcagtgaaaaagcctggtgggaagacaagacttgaactggacctgtaggatgaatttgaatggcagaatgagagtctctctagagggatccgtctcacccacctcctgttacccacctctcatgtggctcacttctctttggttgtctggtcactgattggacagtaatttctctgggaagccttcactgctcattcatacctcccacttcactaccgtgtattcctatagtgccccctatttatatctacttatctcaaccccttccttgttaatttggtgtaattttgaaaatgtggaaatgatgggaaagacccttacagactacatgaacctggatatacttgggagacctgataattcagtaagcctaattatttcaggaaatggagaaaagtgaatgatggaaattatttcaaaattcaatgccaccaataggtatcactgagaaaataagtagtcatattgcaatagctatataaataaaggcactaatgcttaagagacacctatactaaaaatgtgtagggcacacatcaaggtgatcccagccaacagttgatatttttctgagttgtcattgcttatactttgcaagctagagaagcttgcaaaactcttgctcctggggcatattttggcagatgtgttactttaaacttatagatgtgctttatctaacttttacatcttaaattagagagaaggaaacagtaagttttctgaacaggctgataatagactaccctgcaggaccaattttcctgaacaaattaactgatacataattattaggacatctccaaaatagtggaattttcaaccatgtgtttacaatgtcaaaatgagtgagcaccaccaacttctaacaaaaaatcctgtaattccagaatctaatgagcccatgcagctgactgtcacagggaagtactctttagcagatctgtgaagcatcctctacatcataaacttcctgttttcactgcgttgggtgattctataccaaatggcaaagtataacaattcactttagaaaagcaaaacccacctcctcagctttgagcagaggataactgaatgtcttgaagcacagtgaaatggatttcatgttcctaatgagaaaaatgaggcctcctgtgttgtttcttttgtttggactttctggaaataaaatgggaactccctttttagaatcagtcatctgccacctgagaagaggcttgaaaaagtgctctactccccttcttcacctgcgcttttgtttttttctacagtcatcccctgaaaacttgtgctctgcatttaccaccatgctgtgaatgtttaatgaacaactgttttctgtgttaggccacaggctagccttgaactcttgtgactgctgccagcagctgcctagcagctgtgcttaatgagaaggagcatgacaatatagactttaaggaaagtagaaggcactagaggattaacgaaccttttacttctggatttctcactcaaaaacagcttcaaataatgggaaatgttacacgtctgactgcagtttaaggggtgctgttgtatggcatttgactaagacacccaggaatgacaaaatcccaccccaaatctgtgatattccccctgagaggtttataaagaaatgcataaacaagcaaacagaaaataaggtaccactatggatttatgcccgtaatatctgatgaaccagactgaagcacgtgaattatgcccaaacctaaagggactgtgtctcctctcccaaggctatatcttcctatcagctggccaccaaaagtgaggagagccctgggaccttcatcagtgaggaaaagatagagagagaaaaactatacctttcctatgatgtcaatcaagagaccagtgaaaacgcctgatgggaagacaagacttgaagtggaactttaggatgaattttaatggcagaatgagattctctctagagggatccgtctcacccatctcatgttacccatctctcatctggctcacttctcctcgtctgtcttgtcactgattggacagtactttctctgggaagccttcactgctcatttatacttcccacctcattaccatgtattcccatagtgccctctatttatatctacttatctcagccccttccttgtttatctcccccattagacattgagtttttagatggcagagactttgcataagtcccctctacttactacaactgcatggtaaacatatgaaagtgaatgaatgaaaggaattctaggtgaaaggagtgctacacaggagcagttggtgaggacccagaacactgaggagaccaatctaacagtcatctggggttcagaaagatcttaaaagctagaaagatgcaaacaaaaattcaccagttttttgtttgtttgtttgttttgagacaaagtctcactctgtagcccaggatggagtgcagtgatgcaatctcagctcactgcaacttccgcttcccgggttcaagcaattctcctgtcttagcctcccgagtaactgggactacagtcatctgccaccatgcccagctaatttttgtatttttagtagagacagggtttcaccatattagccaggctggacgcgaactcctgacctcaggtgatctacccacctcagcctccaacgtgtgggattacaggcttgaaccaccactcccagccaattcatcagtttttttatgttgtaaaggaagattttgtgatgcccttcacagtcaagagttgcaacctgcaggtcaggcatggtggctcacacctgtgattcctgcactttgggaggccaaggcaggtggatcacctgaggtcaggagttcgagaccagcctggccaacatgatgaaatcctgtctctactcaaaatacaaagaaattagcccggcatggtggtggcagatacctgcaatcccagctactctggaggctgaagcagaagaatcacttgaacccaggaggcggaggttgcagtaagcagagatcgcgccactacactccatcctgggcaacaaaagcgaaactccatctcaaaaaaaaaacaaaaaaacaagagttacaacctgcaggtatcattaaaatctctaggattgtgataatttgctttcccttcagcatcaacattactttgggatttaatatttgtgaaacctagggatacaaagactccttggaatatagcaaatttagggaagtcatctattccatctatcagccccggggagaatcacacagtatcattcatcctgcagtaatgaggtagacatgccatgttgggcaaaatgtctgtgtctattcatgtaaaaatggatatttgagagagaaaggatgtgtacagctggaatgccacagaggtggaattttcagatggcatgctacaacactctttgtatctgccctggcaaactgactaaatgtgaattacattaattccatgtgttcagaaagtacgtaatagctaatgacaagaataataagtatgttatatggaagtttccccctaggggtcccctattctcttacataaaactctcttcctcacaaactaaatttctaggaacacagttttcattatatgtggatttcctttttataatggaatccacaagtttgctctatttcccaaagtttttctatatccaggaacgtaattaattccttcttgacttgaaagttatttttctccttttgatagttgtctattatagaagtgaggaaaagctttaatttcacaaacaggtggttataaaagtttagacagcttagatttccttagcttgaacatagaggaggattgctctaatcacctactcccctgaccaccaaagctgccaaaaacttggattttttttttttttttttttttttgagatggagtctcactctgtagcccacgatggagtgcaggggcacaatctctgctcactgcaacctccgcctcccgggttcaagcaattctcctgcgtcagactcccaagtagctgggattacaggcgcctgccaccatgcccagctaatttttgtgtttttagtagagacggggtttcaccatgttggccaagctggttttgaactcctgacctcaggtgatccacctgcctgagcctcccaaagtgctgggattataggcgtgagccaccacgcctggccaaaaacttggatttttttataccataggaaaattcatagggagatttagttaaagattgatgattaaatgtatgatttcttttgctctctctctaaacccttcaaaacatgacataaaagtacctggataaaaggaggcattaacctgcaaaaataagaatagaagaagagccaaagggacagaaacttggaaggtggagagaaggtgaatctagtggaaattgatttagaagctctgagaaagctgaaactgaagcaggcaatgtaagaagccaagatacaatatatttggtatcacagaacctcagaaaagctcaagacttggctgtaccatgtggaactgaaaatgagggtgaaggtagggctgatatattgttggaagctccacccagtgctatatagtgactgctcctacccgatccttgaagaaccccagacataagctgtctggagaaggtgagcatatgtatacctggcacagctgataggacacaatactaacaaaggagatactaactgaaagtcaccatactgaagagtgagatgtgaaatctccttcatatattttactcccagagtactaacaacagggctcagaccctccagttggggcgtgcttctttgagggatctgattaatcccagagaaaagacttaacaatgccaatggtcaaggttccctgaagaataggcccagccaggccactgtacagtgaagactgcaagttggcaatccctgccacaaacaaagaggttccagtcagacttgtagttcctccttctaaaatgtatggggtcaaccaaaaggacaaatcaaacacaagaaaagaaactcgaaagaaacagataatccagagagcagacaaaaaatttcaaaagaaagttttcaataccttcaaaaactaaataaaagatattgcatttatgaattaaggatagaatgctttaaaaataatattcaaagcacacaaaagaggtcttggaaattatgattgcaaaaattacattctctgaggaaggttgaaatataaaagtgtgaggaaatctccacaaagaggtgaaatataagagataaggaaactagaggctcagtccaagaggtctactgtttgtaaaacagcaattccagaaagagaacaaagcagaaaaattatcaaaggaagaatttaagaaaaatagtcagaattggaatatgtgtccagtttgatagaacagatcaagagctcattataatgctaataaaagtccaacacaaaatacatcattatgaagtttcacaatactggaaacaaagacaagtgtctaaaaactcccagagagaaaaaccaggccatatgcaaataatcaagaaaacactagatttttcactagtgactctgggatatagaacacaatggagcaaatttttcaaaacaattggcaatctagaaatctgtatgccataaaaccatcaataaagtaaggaagatgtttattcatgcaatgtttcaagaattttacctttcattatgcaccttttcttatgaagcaattaggggatattttccaccaaaacaaaggagtcaggtaagaaaaaaaatgaaatctagtaaaagggggatcagaggtcatccaacacaggagaaaggctaaaggaatcttccctagctgatagataatgaaaatttttggatgagtacattaatcttagatttgtcttaaacacagaaggattatatcttacacacaagggattatatctcctataaagaaatcttgttggaggcagcttaagtattatgtccttacagatttatcatagacactctttctttttcacatattaagtgcatattaatataataaactattgccaagtttgcctcatagaccaagatgtttgttggcgatccagctaccatgttcacattccaaccaggaaagaagattaaggaaagacaaaagggatcccttctagctgaatctgtacttttaagcagccttcctggaaattccttacaacatttccatttgtatatcattggcctgagcttttcatattgtgaagttaatagataaagcctaaaactaaaaattaaagacatagcaatttaagcatgttatatactgataatttagaaggtgtttactttcatatcagtatataacatatactgtatatagtatataagatatactgtatataatatatattttaacatatgctactttcatatcataacatatactcatatgaaagtaaacacctgctaaaaagtgttgcctttttgaaagaggagtgggaatatgatatgggggtgaagcgagggagctcctgtttgttgaaataagatttatagaatcatttgactcctaaaaatatatggatgtatagctttgatccaaaaaattaaaaactgaattacagaaaaaactccataagtgttttcaaattaaacaaaatacaatagctgcatacacgtttttccactgaaagttgaccaacaaaggaaaaaagcctaccttaaattacaatttttactcagaattttaagaataaagaaagctcagaattctctttcttaggttcacatactgtagtaccaaattacattgggtttctagagcatttacaagcagtcattctcataagttttcattttgctgcactagaaaacctttatgactgacgcatgaagatctcttccctgaaggaagagactgaagcactaacattaaggttaaatgttatctctgttgatcaaggcaagggccagccaagccagaagtcctgtcgattcaatggcctggaaaacgatcaagccgccgagtccagagacacaacagcttctccccaaacagccctcagtttaatgtcagcggtccaggtaacatacccttcatttgtttttatttgtcaaagtctatttatcttgcgttttccaattgattattttaacaaacaacagataagacaatagtaatggaacactttccttataccaagtaagtttgagacagaagcagtgaagagtgtagtatgaagaactggggtggtgagcctaaaatcagcatggtcagaatcctagcagttgtgcctggaaagcacacagagagatggtgaatagggaaggcagtagcttcatcagctaacatctaaaagacttgacgtctataaggaccccccatgatcttgaaataaagggactctaccctaatatgctctagatctccaagcctccctaagcctatcctaagttcatctggggaaaggatccttgttttcataataggattagtcatagctggtgtttttgaagtttgtaatgtgatataagatttactgggctaaaccatacccataattgttaggttattaaattttaactgtgtcacttataaccattttaaaatcaatttgaaatatgcaaactcatgttgctaaatattggagtaatttttataaagcatgcatatatacatgcacatatgtcacttgaacgtgtcattttaacacgagtctttatctaatattcagaaaatcaaggtataagctatattctatattttcaccaactgtacttgaaagatttcagagtatttttatgaataaagtcttattttatcttgacacctgataaaatagatgttaatttccctatttctccatttcacaggtaaggaaacaagcctgggaagttaagtgatttgtccaaggtcatatggaatattagtccatttttattgtgaagcgaccttaaaatcttgatggttacacctgtagatacttgtttttctctctcatgagtctatggttggtgatttgggcaatttcagttggatgtggttccaggctgtatgtaggttgagtttggccccactcctcatgtagcctccttctggaataagcaacagctggatcattttcttctcctagtgggtgtcagaagcacatgcagccagcccaaaattatacatgcatattaaaaaccattgttttatgtactgtgtgcatcttgtctggtacctctccattggccaaacaaatcacatgtcaagcacagtaacaatggggagggaaatgtgcttcattcattataacaggagatactgcaaagttgtggtgcaagggtatatacagatacttctatagcaggaagaaattgaagaattgggaaaaataatatgatctaccacatggaactagaaaatgacaatgctaagctcctgaagcaacatatagattgttctttccattttaaccatttagaaaatagtccaaaatatcttttcttgggtctctgatgtgacagccaccttaaattattttgggaataacccagattagaaatattgtattagaatttaaaaaaaacataaattttattagtatatttgtaatattttctccaatcagcccctttcttttctctctctctttttttttttttttttttgtagccacttctttgtggcagtgccagtgctcatttttacatcataatttggtgggccttgaaaggtgcttcctccaagaaggcaggtggagaaggaaattctgatgacatcactctccctttataatttaggtcttgtctttattgcattcaaagctaacacaaggctttatagtcttgaattcaatcacattctgatttcaagaaatattaaacaatactacttcagcaaatgcctatgaaaacatttttattaagctgcaatcagtatatacaaatatgccaggatatttgtgcacaggctcagatcataactcttccctttgcataacaatgttaataaaaacaataatagtagcagaacttctataacgtttaacttggtgctagatacacacacacacacacacacacacacacacactacatacctacaaatacatatgtatgtatatattatatatatgaatatagatcaacaggctccagtctgcactcttaaccactatgccatgattatagagtccatgtatatatactcaagttagatcctgggaaaggagacaccaactatcttgcccttatggtttttttttttatcgtagcaatttacaccttgctatggtcaggggtatgatttcactagctcttgccactgacctacaagtaagtttagaattgttgattgatgctttcctgtttgcaaaagaaaaccaactacatcacggggttttgtaaatggctcagcaggatcttttctttgaatatcaaaggccaaataggcaattacattaaaaaacaggcctgtggaagtgaacccctgggatgcatggatctatggaaatcaataccttagaaagcactcgtgaatacattttaaaaaaatgaccagtcagtgacactgcatctttccttcagggttgaaggaaagctctgatataaccaagcatttcttctctgtctaaagtttaacatattgccctcatgattccccctggccccaggcttattagaagaagacaaccagtggatgacccagataaatagactccagaaattaattgatagactggaaaagaaggtaggtgctttcttttctttattctctcttccactcttcaagatattgttacctaatattccccattgctttatatccatgactgccccatagatagaataacagccaggatcccaatgattctatgaatggctgcttggtagttatttgaggtttttgttgtcattgctaaatacagaagcttacattaattctccccctacctcccactcccaattatatttaaaatagaatgtggagttgagagttaaataaatctactgcactgcctggctcttacattttcaaatgaactaggtgacagtgtgcttgaatgatgctaatgacagctcttagggataatatgttgaagggataacatccctttaacttagggataagttgaagtcttgggaatctttcaaattaattcaggaaaatggcagtgctatctactaaaagatgagattccacactcaacttctggaaattagcacattaaccgatggtttgctattaaaactatctaagcaagcaagttagaatgtgatgaagagttctttagaactacattttatgttcttagttattgtttttttattaatttagttagtaccaagtagtcctgttattgtagtgatattctccttaaacatctttgataggagagacaacttttgtcaatcagtaagaaaaaaatgtgttttctgcacatgtcaggcaccaagggagaaacatttatgtttgtgacagcactgactttgaagaaagcaattgtctacttataaaactaagctattctcctaaaaaggcagagcaagagagataacagactttttaaaaattatatggtagcacagaatgggattcatagttcatggtcagtaagtatttgaatgactgaccgagacatgttaaaggaatggatcagatgttaaaatctatccatgctcacctgatgggttgatcactgtgacctggggtgctcaggaaggactttgtgtggcaggaagagttcaagtggggccttaaaaatggtgacttaattaaaaattttattgcaaacaatagaaatcatttctctaataaaaaagagagttttctggaagaatatggaagtactcacagaatcaacagatagtccagaggtctgaatttggaaaagtcagaagacaagataaccctacagatctaaatagcaagaaatagtcaacagtctctgaagttacctccactgcaataaatgagttcctaccatttccagtctgttggccttctgttcaaaattctgcttcccagaaggaagagtctggttggtcatggtagggttgcattgctggcctcctggataggggagggggaaaagtcttgataacaatcccagagcacagtacagaaagaagaagagataattcaatgaaaagaaaatgtattgtcattaaagttggaataaatgctgataagctaacaaactaacaaggaaagtaatatttgctatggagaagtaaaatttcagtagaggatagctggaaagggcattcaggtaaggtgatggcatgagcaaggtgatggcatctgcaaggttcagtagattggcctggttaagagtctttcatgtagggaagtagtaacaaataaggttgtatggaccgaagagggccagattatggatagcctcaaataatagtctaaggaatttggacttggaaacaacagaaggcatttattattttttaacagctaagtgacaaaccaaaaaaaatcctttagataggaaattgggcagcaagatgcaaagtgaattaaaacaaatgcaaaatgggttaaaacaagaaaaatgaggctcagagacactaataccagctcagaaaatggcattgaagaggaggtttgtgaaactgaacccagtgaaatcaggtatgatatgagatgggcctatattaagctaatgagtgagaagaaaatggcagatttgaaacacttgaagtgcaattaacagcactattgaatgggttaagaacagggggagctcaaataagaatctgaggattggagcctgtgtttctgaaacaattaattataccattaacagaaaaggaagagacacatgagagagaatttgtgaggtaaggtgagaaggtgaactagtgtttttgatgtatgaatttcaaggtacaatgggacacttaggcagaaatacctagttagatgttagaaggagagaagtcaggccaacaggttaaggtatttagacatatttccacaaagatgaaccctcatgtcgtgaggatgggtaaggtctctgaaaaggagattctgtgcaagagccaagttaaggggaaacaaccctatagagttcttgtccctctgccatggtgcctttatttgttaaatttatattgaacacttactggagcaaatacttaaactactagcttgctgcaaatcaactttcctcctttcttattttattgatatgtgagctgaaactaaaaagatttgtaggaaaaatagtggctatggaaattagttttccaatattggaagatcaaatccaggacctctatttgcaaactaaagcttgttaaaacataaggattcatttgctaaataagtccagattcatttaaaaatacaaatacctctttttaaagtggttttgaatttttggacaaaactgtctttatttggtatctgaaatttttatagttatttttaaaggaatggctcaaacttatttcatgcctttttttctaactttaaatcaaagtatgtgacatttcttttttttctagactttttttctccctcccttcctataaaagggtttcattttgaggacagtgtataagaggtttgctaaaagtacaatgtgatggttttcagcatggggctccagctgtgtggagctcagtgtgagctgtcttaatgaatggagaagcagtgcaagttcagttttcttctacaacttattctgtactgtgctgattaggtttttagagaaaaactacccaattgccaaacagtggctgagtacgtcatttcactgctgagtaccttgtctcctgtagttgttaacactagttttgatcttcccattagaaggaagtgtacctgcagtggaacatatgttatcttttctctgcattaagtatttaagataaattcttcctgcactgaaaccaagccctattctatgcatgtaggggaatataacacttagcaatttctataaataggtttctttaggtattccttgtatccatttcagcctccatgagaatttatggggatatactgaggttatgtcttgtgttttgcttgatccctgtagaaaacacctttaatggctgggtgcagtggctcacgcctgtaatcccggcactttgggaggctgaggcaagtggatcacctgaggtcaggagttcgagaccagcctggccaacatggcaaaaccccatctctactaaaaatacaaaaattaaccaggcgtggtggtgtgcgcctgtaatcccagctacttgggaggctgaggcaggagaatcgcttgaaccccggagggagaggtggcagtgagccgagatcgtgccacttcactccagcctgagcgaaagagtaaaactccatctcaaaaaaataaaataaaataaaataaacaaaaataaaaaacaaaaaaaaaccccacctttaatgttaaacaaaataacaacaaggacaacaataaaagctcttcattcttcattaagtccttagtgtatcatcagatcacaggacattctcatttgaaaggatgtaattcaggatgtcacactcatacaacttattttaagtttttcataccttagatcaggaaaggtagaactgaaattgtaccttagttagtgtcagggaaatagtggtcaaggagattactaggctacagtttctatctgtggagtactttttagttttcaattcacatctgtatacattacatataattttgccctcatagaaaagctatgatttagacagggcattcattcagccattcatttattctacatttattgagtacctactgtgtgtcaggtactattccagcagtggaaatacagcagtgatgaaaagaatatccttggtctttgaagagacagaccaaaaaaacaacaaatccatgaaacaagataatataaaataatggaaagtgctataaagaaaaagtagagcaatataatacagatagggggttgaaaactccaaatgagtggtctggaagttctctctaataaggtgatattcgagttgagatgtgaaagtcaagaagaaggcagctatgtaaagatttagggatagagaatttacagcaaagcaggaaaagtgaaccccacagaagttaaataccttgccgaaagttccaccacaaaataacagcacagctagagcaacatagctctattattaacaggcatatgttatttcagatagtctggatttctacagttttcagtttacttcttatttatttgaaggagttattctacataatcctcattggaaacaatgctaggatagccattcacagaatgaagttctcagagatgaagcactaggtttcactggggacattaggacattagcattattcattggtcatcacagaagacattaaggtcttaattctcaaaagaagatatataaagggccaacaaactatgaaaaaatgctcaacatcaccaatgatcagggaaatgtaaatcaaaaccacaatgtgatactaccttactcctgcaagaaaggccataataaaaaaattaaaaaataatagatgttggcatggatgtggtgaacagggaacacttctacactgctggtgggaatgtaaacaagtacaaccactatggaaaatagtgtggagattccttaaagaactagaagtagaactaccatttgatccagcaattccactactgggtatctacccagaggaaaagaagtcattatacaaaaaagaacttgcacacacatgtttatagcagcacaattttcagttgcaaaaatgtggaaccaacccaaatgcccgccaatcaatgagtggataaagaaattatggtgtgtatgtacgatggaatactactcagccataaaaaggaatgaattaatggcatttgtagcaacctggatgggactggagactattattccaagtgaagtaactcaggaatggacaaccaaccattctatattctcactcataagtgggagctaagctatgaggatgcaaaggcataagaatgacacagtagactttggggactcaggagaaaagggtggtagggagatgagggataaaagactacaaatcgggttcagtgtatactgttcaggtgacgggtgcaccaacatctcacaaatcaccactcaagaacttacctgtacaagcaaataccacctgttccccaaaaacctatggaaataaaaaaaaaaacttttttttaagacttcacagtctttataggagttcttcacttttagcaaatgtcaatcgtattttcatttactctttaattcactttctatttaataaagaaaaattaacaccagggtataaatgtattgtaacaatagactaatgtttataatgatgtcccaagaaatgtagaaatgtggcaatactcattcatagcaaaataaagcagactgttaggcttagtcattctgtttccttttctttcgtttaccttcctaccctttccctctctgttttaatgtacctttctcttccactttgctctctaatggcattcaagaagtaaatttaaagcaatactttgaacacgtctaaaacagcttcttacaattgataaataagtacaaagagtctttattggaacagctgagttttaaaaaaatcagtattatttcatctttaagataatgaagttcttttggttcaatgttagccatgagagaactatgatttgaatatatggcattgttttaaatgatataattttttttcttttctgccatttcttcctcttattgaaggatctcaaactcgaaccaccagaagaagaaattattgaagggaatactaaatctgtaagtatttttatcaggtaaaaatgttagaaatatattctttaaaaacataatttaatttcttcaaaaattagttatctcaatgaaaaattgaaaaaccaagtagtcgtatttcattttataagattcagtagtgttgtttctacattgtgatttgtgtaaacctaatacctacttcacagtttttgcaaaagtacctggcatgtaataggtgcaaaatgaaaattttatacatgtataaatcaatgagttattgaataattgaaggaatatgactggcagagaagggcaacatttaagttgtatcataaacattttgtaaatcctgctatgttgtacactggatatacctgagcggaaacctggttctgttcattattatatttccagcatttagcctagggccaggcacattgaaaatgctcagaaataatttttcaaagaataaattgatgcaaaagggaacatttgtatccctagggacaagatgtccatccagagtggcagcagtttttggaaacagaagaagaatggacaaagggatcctaaaaagtacattaagatgcaacaaaaagaagttagcaaataattaaaagcagtacataccaagctttattatttactttatgttgaggcaaacatgcatagtacattttgtttcaggaagttggatgtttatatttacatttagtgaaaatttggattttaaaatcttgggtaactaggagaaaaatcattttttaatcccttagatgtattatatactttatagatgtcaaaggattggtcacacatttatatgaaaccaaggtaggaaataacctttcatctctgaattgtgcacaagcactgactacatgatagatgaagttgagacccacctatgtgtaaggctcctgcccatctgtccaaactcataatccaaagggattcttcagaggaagctttgtgggagtctcagaaaagtttaatcatggctgctactgttagaatcctatagttatgaatactttaccccgataagctagatttgtcactgcatgtctagtgcttttatccctccagagacagggatgtagtctgtgttaattcctcaagaccccaacattttaaaatggtagactttcatgggaaagagaggagaggggtgttgagcacatatacatactaagaatagcggatttgtgcagtcccggaggcacaggaattgttaaccttgtgatcatgcatctgttatcttctcgtaggtttgcatagaggaaaaactatactccagacaaaggaaaaacaaatataacttatctaatgttgtgagagataattgcctattcttaaataattttctaatgtgagattattttttctctctagttatgaagaggaaaaattgtctaaggattgtttgtgaaaggaggcagctattccatttgcaggtccctgagcagccaaagccaaggccaattttaaaagatcaacacacaaaacattactaattcagtagtgcatagaagtactttaaacaaataagactgaagaaggtcattcagctctcaatattgtttaaaagcagaaaaggatattccctatttccagccatatatagaggtatagcaattatgctctttgggaatagacataaaaatttgaattggtttgttttttcagaagtaacaataagatatttgtcattaaaagttgtttttttaattaatggtagtaagtgcattactataaattcctgtaaaacctcctatattcagaatgaccaaaatcatttttcactgttatttcatagctagtgctctagtgctcataattccatcctaccatgtgttaaatgatctatcctgatgcccaaaaccagttttagaatttattgagtagagaggtattttcccttttccattagtgaatgcttgagaacttggaaaaataaattctatgacagaaagcaaagaataaatttgtattacacttggtttttgaaatgctaatctttactgatcctttgctatgtgccaagtgttgtactaaacacatacataactcacttaatcctcacaatagccagccaaatgaggtagtgctatcctcagactcattttatcaatgaagaaattaaggtttaaaggagtttacctaccatagctgaacccctgcagttcaaccccagacctatgctcatcaccatgctctaacattttcagcctaagtgtttagtggatttctagcctgtaaagtagaattgctctttgctagcgaggttgtggatgaatggatgattgttttatgagattccctaccataagagcagagcagattgtctggcaggcttgtttaagcacacagcaaaagtcctgaaccctagcaactgccatctctagttttctgggcaatgagccgttacataatgatgagtccaggaaatgatttctttttttaagtccatttttttttttctcagcccagagtaagagatgtaacacttatttagtacctgtcatggaaaggatcgttatacacacaattctatttagtcctcccaaaactttgtgatataagtaccactattctaattttacgtatcagaagacaaactgagaaagaattaagtaacttgttaaaggccacataggaaaagtgaagctaattcttttcaatttatatgcctgctcttgaagaagaaggaagaaaagaaaaagaggacaggatggtggagacagatgaaagagcacctaacaattatgcagtgctgttgagtttccagggccacctcaaatcctctcctggaataaatagtttattaagggaattctaagattagtcaatggctaaaagcaaaagcatctttaatgtgtttgttccacaaataacttgatcaccaactatgttccaggcctggagatagggtctggaaataaagtggtgaatattataggctagaaaacaaactagaaggaaattatacagaatctacaataaaatgtgatgaggattattataggaaagtacagatttgcacagtaaggggacagaactcaatttaggagaccaaggaatacttccaaaatgacataatacttaagatgaaatcataataaatagaagtttttttaaaaaaaacttatatatctcttactacatcgaatgattctaacactgcactgaaagaacactcaagtgctagatcaaaatattcaaatgttccaaatgatttataacaagcatattataaagatgtgcctgtatggcacttcttaccaaaagagtactggagtaagatgatcattttccagatattttcttcattcaaaggtttttaaaaagtcatgataattttaaacaacatttgagcacattcttgtgcttttcaaaaactcagacttttcttcagcacattgttgttgtaatacactaaaatagcttatcatacaatgagtctacaaacctagtttttttctgcctctctacacccatataaaatcgacggataatgtcttgaagtcattccattctgccatacattcctaagggtttgggggctattctcaagtaatgtaacagcgactatcaaaatataagtcttgttttacaatggttgttaagagagtcagtgagagcatacaagaaaggctagggtatctctgaagacatatttgaaacacaactgtaaatgtactaaatagaacaaagtaacatgaaaaaataagttgtatttaaaacatgcctctgtgtcccaagactaaaaaagatgacatttcttgaaatgttccaagaaatcaaaggctgatgcaacaaaatctcatgtcactggcaaatactatcctgtgaactgagactggcctttcatacttacacagcactatttagtccaagacattccaaatatccagccatacttctattgcaacaaaatttctataaggtaaatgataaatgatatactactactcctataatagagaaacaaaaatgtagcaccatgaaagaatattcaaccatgacagagtgctctgagctaactatatcttgggatcccacattttagtaagcttcaggctgtgtatttgacacaagagacacatagaaatattaacaagatagtaggactcctgttccacctctcccaaaccccacatcctacaatttgtttcggcctagccggaacagaaaatttaagcgtttttttggatttcagaaaatctactttaaattaactattatttaaaaagctccgcttgtcagaatagtcatcaaacttaggcagattatctggggctctttaaatggatttctttgtgtaactatcttaggaaaggagggggaaaagatacatctggtttgggttgcaaagttggaaattgcaacccaatctaggaagccgagagctcaatttttccaactcatacatcaatgtacataagtgaatgatcagttaggtattggtaacataataatgcatccccaaattcagtggcttaacacaataaccacaattttgcaggtaggcaatttaggctgggatcaactggctggttcttatggtctcacatgggctccttgtatctctagtaagctgtatgttagctttgctgatcttggctgagctttctcgtatgtctaggagctcaagtgtgctctatgtggtttttaatcctctaatataggggttggcaaactacagcatacctcttgtttttgttcataaagttttattgtaacacagccacactcatttgtttatgtgtgggctgtggctgcttttacacaatagcagagttgactagctgcaaaaggagccatgtggcacagaaagcctaaataaaatacttactacccatccatttacagaaaatgtttgctggcccctgctgtagcaggtcttgttcatatggtaatctcagagatccaagagaaagagtggaaatccaccggcctcttagggcctgaatttgaaactggtgcactgtcagttctgctacgttgattggccagagcaggttagaaagccaaaccagatccaaggggagggaaaatagaatccatgtcttgaggagaggagctaaaaagtcaaattagtcaaagggcatgagttcaggagggtagtgaagagttctggttatttttacaatccatcccacttgatcacgtaagaattgcctttagacgaaaagaattatgatggaataggtggatgtatttatatatctcattaggaaagcccatgagctttcctaattatctgagttagtaatcacaaatgtccaaccaagaggtccctgcagatttttgtgaaaaggatatatccatcattattttggtagaaattaaccctacttagttattaatactaaacccatgtgctttggttagtccaacaaaagtaggaatatttgttgaatatactgaatacctaacctctaaaatatcattggtattcaacaaatagtagctattgacatgaaatgagaaacccattggaatagaaaacagtagaccaggggtttaattctctcatgctacatagctggtattactgtggaagttatttttctcatattctagatcatccttaccttgtgttttgtttttgtttatgcacttttatgattcatgccaatccttactttgatttgcacttttatactttcactaccaattcttgaaaagaactaatgttgatatctaaaattccatgagaagcccacaggcggatcttgagggaagccttgaaactacaattgctataatgctaataggatttgttacaggaaacagttggcatccaatccagtgtgatccattaaaaacaagcaccatctgatgccattaccatttgaacagggcctgttgtaagtagttaatgtgtttgacaaccctgtaatatttgatatacctttggaaatgcatgagttactaatttttttgaaatctagttgtttgtaatgattgtcacttatgtctaatatcacaaaatattcaagaaattggagctgtgcaatgaacaataggacttctctttaaaaattggtaagttgttatagggaagtgatcccagctctgcctgcacaatacagacacttagggaggttttaaaaatagcagtgcctgggccccactcccagagattttgatataaagataattttaaaacttctcgagtcattgagaatcactgcttttaaagggaaacacgtcattgtaaagaacacgttgtttagcttctgggactagaggcaaggaaaatatcttgcctagattacagcctttatacagttttatacttggaatagtcatggccttccttggtcatatttttggatgacaatcatctgtttttgtgaggaggaatgggatgggcagtaggagtcagcttaaatcgggctccgtgacagccaacgcagtgaccctcgccccttccttggcagcacatcatgcttgtgcagcggcagatgtctgtgatagaagaggacctggaagaattccagctcgctctgaaacactacgtggagagtgcttcctcccaaagtggatgcttgcggtaagtgctccgactcctgcaccttaggcctttggcagcctgggaatacagtgaaggcatttcttactttagacaaggctgggggtctagaagacagatatttgagaatcctcacattaaattatacagagcattccacctgggtgatgtcatttgctgcctttaactgaatgttttctctttaatctttaaaccccgtgtcgtctaatctttaaaccccgtgtcgtctgatcattggggcaccaagtaaaatgaaatagaacaacttgaatgaagagactgaatttcaaataagttgaaattcccttttgcatccaggcagcccacactctgatttaaaatcatctctggtagatgaggcgccaactctaggacatctagctgtgattgctcccttggcagtacgccctgtggcctaatgaccatttcagccattaggaaattgcaggcatccctgaagtcatgatttcaggccttggtcattaaaagaaaatgaagcagcagcagatcttttctttcctctttccatgggtaccacccagctcaggcttcggatatctcaagctactaaaatatactattcctcatcttcaattttttcactccaactggttcaataaatagttactataataattttctggaaacagttatcatagaattcccttaactgggaacctaaagtaactctctaatgagtatcttatcaaaggctagacatttgtcctgactctatatttaatcctactgacagacccaggaatccatatcactactattatttgttctccctcatctaaacactctgcctcggtgatgcacagatagaatttctgatataatctgtttgttccccactgtgcctcagacctggctattcttcctctcagaaatgtgcacccagctgcaagtctctgccagcccatgcactgcctcaagttcagagcccaggtccaaattcatctgcttttagaaaacttccacaaccaagtctaaccctaccttatgagcttgcttaaactatatttcataatgctcttcaaatgttgctttgggaaggtttttagaaaatgtgtgtgtgtttgtgtatgtgtgtgtacatgtgtgcataaacagatacttcatgtctctgggtgttttgcttttcctctcagtgttcaattaattatattttattcataccccagcagaatatttctctagctaagaagtctggctctggaaataaacatggaattttactagctttgtggttttgagaaagaccctcactggctctaagccttagtttcctcctcaagaggctcatgagatggttgggaggattcagtgagacagtccatatgcagtgctcagcacaatgcttcccatccactgaagacgtgagctgaagtcactattgcgtttactactgtttcctggttgtctgggtggctgacctcctctctagagtatgagtacagtacttcctcagtgccactaacagctcatcatcttccagtagtgcctttgaaacaagaacacaggaaatgctgtgtttccatgattatttttattattctatttcacgccagactcagagggcacaaatcaaaaccccattttagtcctttttacttcagtgactcaagacttgcaaaggtgggaatatgtgtagtttttaagagcccactcatttgaaaataaaattgaatatttaaaaattcagggtgcagtggctcacgcctataatcccagcactttgggaggccgaggcaggcagatcacgaagtcaggagttcgagaccagactgaccaacgtgatgagaccccgtctctactaaaaatacaaaaattagctgggcatggtagcatgtgcctgtaatcccagctactcaggaggctgaggcaggagaatcgcttgaaccccggaggcggaggttgcagtgagccgagatcgcgctactgcaccccagcctggatgacagaacgagactctgtttcaaaaaaaaagaaaaatgcaaacagtacctatatatacaccgttcacagtgtaaacttcccaaaatagagctcagtaaactctttttaatgaggatacagagaagataaagtctatttcagtgtattacaatctccagggattgagtgcatgttttatatttataaaaaaggcgcacaagtttattttttaggttcagaaacactactttaatgggtgttgggaaaatgacctcgagctactagaacagccccagggaaagggaaacaggctgtgggggagtgagagagtggatagatttgtgccgcctgctgcaaattccattctctcaataaccacaataaattgctccatcagctcctgctgtgaagtagaggaaaggagagcatctttttcctgtaagatagattttcagcctctctgtttactttgcaagattggtttgtttcatacaattcttcgttcacttcttattgctgatttttcaggtaatttcttttactggaattatcaaaatgtagactatatcagatggaatgagcctcagggaatcactacacccatatggaatatatatggtatagatgttatgccagtgtgtctgtctacattcaatttttcagttgtaccagttaatcaaattcaattttctacctgtatcaattgataatcaaatgccactgatgccatcagtcatgctccaatgcacccagcacaattgcctagtgcttggctgagaaaataaatctctgtgaatgtcagaggttctgttctcccatgatgtttagcttagtctcatcatgattaggcacaaaatacctccataaaataaaacagatattattaaggactaacaagattaggcattttgcacctattttcttatttttgagacaggatcttgctctgttgcccaggctgtagtgcagtggcacaatcatggctcactgcagcctcaacttcttgggctcaagcaaccctcccacctcagccaccagagtagctggggccacaggcacatgccaccatatctggctactttttaaaaattttttacagacggggttatgccatgttgccctggctggtcttgaacccccaggctcaagcgatcctcttgccttggcctccaaaagtgctgggattacaggcttgagccactgtgcctatcctcttgtcttcacagcaataatcaagaggcacatattacatccagcttagaaggaactggctcagatgggttaaaaaaaacttattaaagtttgtctgactctaaaactagcgtttaatccttcttgtcaatatttggtcatccttagagtttcctggattttctgtgattaaccaggggtagaacacacaagtccactcctgttccaattacaacaaggtcttgctttcttaaattcaggccactgaattagaggttttgccctataagtttttgattaggagactctgaagtatggggagttacagaggttttgttttagtagttagatgaatttttaaaaagttaagttagtgaaaaactcaagcagattatgtggactcatgtttataacatatacacacacattgtttgatacaacacatacacacactattcttcacttattttgtaatcatgaaggctcattaatccccgtttttgtcatagggaggtaccaattgaatataagtggtgtacacggtatgttctcagaaccattcttgacaccagagaacaagagaatagttttgctttcaaggatcttagactccagttgggaaaataggatgctcatttatgaaggtagagcacaattaaaatcatgttcatggcctaaaatttcatagtcgttaaatagaacaaaatgatttctaaagtcactcagctacgaaattcgagaatttgaatatattcaaaactccatgtcaagggcctaaggaatatgaatgtaggattacattgtaagaatcaactctgagacatccttaagaaataatggtggcacactgaatcattaatcatttatcagtatttatttatttttgagacagtgtctcacactgttgcccaggctgaagtgcagtggtgcaatctcggctcactgcagcctcaacctcccaggctcaagtgatcctctcacctcagcctcccaagtagctgggagtacaggtgcatgccaccatgcctggctaatttatttatttttttttgagatggagtctcgctctgtcgcccaggctggagtgcccaggcttgcgtgatcttggctcactgcaacctccacctcccaggttcaagcaattctcctgcctcggcctcccaagtagctgggactataggtgcgtgctgccacacccggctaattttttgtattttagtagagacagggtttcaccctgttgcccaggctggtcgcgaacctccgacttcgtgatccgcccgcctcagtctcccaaagtgctggaattacaggcatgagctaccgtgccgggccatttttgtattgcttatagagacagggtttcatcatgttgccctggatggtcttgaactcctggactcaagtgatccgcccacctcggcctcccaaagtattgggataacaggagtgagccaccgtgcccagcctcattaatcagtaattatatagacgaaataaattagtgacccacagcttggtatggagaaatgtgaggactggccctcttgccatgtcttttcttcactggttaggccttgcttgtgatttaaggtaggacatgcacatggggaaggaagaagccaagagggaaagtcccgtccattatgggcagtttcctcatttaaaatctttaatcccacctgttcctgagccacatccatttcccccagaagccatttcactgacacattttccagcatccaggaatattcaaggtctcccaaagctcgaggttgaagcttttggggcctgcatccaaagacagcttagccaaagaactcttgctttagccaatgagtgttaagtgtcacaggaagtatgaagatttcaaggagaaagacacaggctgtttcgggtgagtagaatcacataagaaacaaatcacaggtgtgttgttgtgcagttttacatttacaaataatcgaaagctaatcattcaagccctaagcctttaacaactgctgacaaatctttctaaaaattatttcacaattggacttttcttgctgtctcagtgtgatcattgtgtgtcattatctatatggtatagtctcaaatatcaatgtccttaaatgtcattgccccatattggtctttttggcccttaactgaaagtacccattctgtaaagcaattctggttagcactttcacccatgtgcctttgagacagaatctgcactttcatcactgcatctgcttcttgtcagtcacctttattaggtttcctaactctttgtcagagtgcagcttttggaggcaaagatgcctaagttcaaagtctggtttactcactagcagctgtgatgaccatggacaagacatttcgtctctccattcctcagtttccttatctgtaaacaatggagaaataaatacacaaagatgacaacagcaccttccggtatcaaataggaatgcttgcaactgcaatctagagtaagcacagtaacagtcatttatattataagtacatttattattctcaaaaagaagtcagaggcaacaatctcaaggttcttctacagcttaatgctgtcatcaaagatcccaggtctgtctttcagatgtgccttctggctcttcaccagatggcccacagtcaggaagaaaaagggagaaccaacaagctctcctctcatgtctgatcctgaagatgcaaatgttttcccagagtccctgcttcccagcatacttccccttgcatctcactggccagaattcaagtcacatggtcattgctggccactgggaaggctaggaaacaagtgtccagcagagaggagtaaggttatcagggtattctcagtccaacactgagtggtacattgggtgtattgcaaactgaacagtggcagagtcatgttagtaagaggagagtactatttggggaggcaatggacagtgtagccacatgacccccaaagtacctgtgaaggtaaaatggcttatctatggaaaatgcttaaattagaccctggaacagagcaatacatgtagaaatcatcaccaccaccaccattaatacttatattattagcttgctgcttctcattgctttaatagatatgtgcattttccctccatttcttttctggttttcctcccaccccattccttttgtttctgttagctttgcttcttagcttagacaccattaaggcttagctttcatagctactcgcccaataaaagtgatactttccttttagctattgggctaacaacacatacacacacacacacacacacacacacacacacacacacacacacacacacacaataagccaagtactgagttaagaattctacatgtaacttctttttttttttttcttttttttttttcagaaagaatctcgctctgttgcccaggctggagtgcagtggcttgatcttggctcactgcaaccttcacctcctgggttcaagcgattctcctgcctcagcctcctgagtagctgagattacaggcacatgccactgtgcccagctaatttttgtatttttagtagagacagggtttcaccatgttggccaggctggccttgaactcctgacctcaagtgatccgcccaccttggcctcccaaagtgctgggattacaggtgtgagtcactgtgcccggccttacatgtaacactttaattctcaaagtattgttatcattattggacagataaggaaaccaaggttgagtattggaatcaaggtggcacagctaataaatggtggatggtggaaggtctgctgggctatactttaaatcactgccatttcatactgtgttgtcctcctttttactccttcaaaagctttagcattatgctaaaattttatgaatttcttatcttatggtcttatggctagcctggaaaatgaaaggttcaaatagcaggataagtaggattttaatgtaataagtaaacaaatgaattagttttcaggaagcagttgatgaagagcttgaaatacaaggctgagtattttaaactttatccttaagaaaattgatatggattgtaatttgtccagtatactgttgaaggttatgtttggggattacatccctttgaaactatgatgaaagctatagattctcttcctaggaaaacatatatatgcacattcatttgcagatcatttctgggaatttagtgaacccccaaagagcacattcatgaactcctgggattagaaaatcacaaattccaccttccatttaattcttatgattccatagtaaacctttctccagaaaatctgaagttgagctaaaaacaatatttgctgcatcataccttaatgaaccaaactagataaacaactgaaaagaacacaagcagaactaaagaaaaaaaaaattaaaatctctgtgtgtagttactgccacctgctggtcacacttaggtaaatcctaaatctacattaatcaactattttactgctaagttatgtgttctcttactgttaagtttactggtaagttctttgttaacccaaaagccttattgtttttctaacccctcgttttgctttctaatatgaatatattatgaaccattaggctgaacaatctgtatttttgtaattcagtttttaaaggcatctttatttttgtctcccactcttaagtttatgaatctgtctctattgtttcaaaattaatttgggtcttcatcatttctcacctatgctatttcactatctttccagctgttctttctactttataataccctccatacaaaacccactgtgccatcggaaggatcttttaaaatatagctctagccacgtcactctccctgctttaaatccttcagtgacttctcattgctataggattaaattcgcagtcacctcaacctatgttttcagccagcctgctttcttcactccttcaaaacatattatgtagactttttcctccttcgggctagtcaaaggactggaaggaacaaatttgtctcacccaaattggaaaagaaatttaaaagtaaaacaaacaaaaaacccttgcaattatggccagaatatggactctcaaacttcatccagagacaacaggcactttgtgtgtgtgtgtgtgtgtgtgtgtgtgtgtgtgtgtgtgtgtgtgtgtgtcagagggagagagagtttgaaagagagggagaaagagaaaaaagagaaagagggagagagccactaggtattggcaaactaggagtcagttgtatagcagtagtgtggtccaagtgactcaaatggcatagagcaggacccacacaaaatctgtcaatacaggaatgttgtatggctaagaatttggcagaggtatggtggttgatagggccaatcctaacagctacatttgagggcaaaggcaggtagcatgcactcacatttttctggtcctagcacaacagatgctcaataaacctttttgaatgaatgaacacaattttgcaaaagttacatttgtgatgtctgcaatatactgagactgttttcatgatgcaaaaccagaaaactaaaaaaacaaacaaataaacaaacaaaaacacttatgcctaacagacatatttagaataaataaattcttgacaaatctgtttgattttcatgcaggcaccttagattgtttcctctattaatggataagattgtttcatactacatatggatattagaaaagttagcttgcatctttaatttccagtagctaattatgccttttattttccatttcagtatttctatacagaagctttcaaatgaatctcgctacatgatctatgagttctgggagaatagtagtgtatggaataggtaagttgtgagcaagcctgattttatgtgaagccaggaaggtggcaatatgcatgatgtaattttaggatttgtaggaaagttccattctcttttaccttaccttaaaacctgtcccatttgcccattaccatgaattctacacactttaaaaaatgtatttaatagcttagaaaccacttctctcttgaagtacaaatacttttggtaatgatcccactttgagtcttaccattttactgatgttttcagataagaagatatagatagggggtatgagtgtctaaagctggtgagggtagtggtgggggtggagaaaaaggatggacaaaagtgaggtgggaaaaaaagctttacctcctaatttttcataggatagtctgtgcagttattttattttacaataaaactacatataatttttagagtcattgcagcccaataccttctaaatgtctttaaacactaaaaataaagtggaaattcaagacgttgtcaaaaattaaaataaatcagcttctttaaaaattaaaataattactaatagcaaacaaacatataattttaaaatggaatgaaagaaatgtttgctcttctgagagtatataacaattcctgacagtttaaaatggtacagagaatacagctctctaaataagtccatgtttagggtgttaaatatggtgatggaagtaatagaatacctggaaattcagttgatccatgtttcacctaaaagttttatttttgtggcaattttgaaggcactttgtgctataaggaaggcaaaatgacaccaacagtatttcagccatagaaggaaacgaggtaacttattcgactctgcttccaggccaacactttcacatagctttttagatttatttttattatctagaaatgtaaaatatacagtctgtcttattatctatcttgtttttaaacaagatatatttaaatttggtgcaataaaatctactttttatcctctaaaaaagtaatgttctcctggtttaaaacctttttaaaaaagtttctgatgacaattattaaattactcctgagtcatttttgaaagctgaacaaccattaaaagaagcttgtatccaggagcttatttaatccaaatcatcccaaactttgccatcttgatcaaatttgatctctgctgtacttgggaagattgtaaataaaaatgcacagccttaacctataattatttatacagccaccttcagacaaattatagcaagacattccaaagaagtaatgtggatttcttggaaactccagaactcacatctacaatgctagttcctggtaattatcctgggtttacaatgcttctgtgtccttttgtatttttgtttgtttgtttcgtaaaagatagtatgctctttccttctatattttatcaatggtactctcttatttatttctttatatattttatgatttgagattggggggaagaaataaaagatctatatatttgttctattttgtccttagttgaccctatttgtattcccagctatactgaaccattagtcatttgctaatcatattaacaaacttgaagtaccaccaaatcatatttcaaaaaattattcaaatattttatcatattgtaatttagtgtactggatacaatttgttcatctacccatccaattactgattaaatatatatttactgagtattaatatgtgctaggcatcagggtgtttagcctaatttactggtactgattgagctccatttctgaacaagcactgtgttgggagctacaaagggtacaaactaaaggcaaaatccctacccataaagtgctttctgtccagcttcacagaaacgtttgcaaagacaaattttagcagaaaaaaaaaaacccagctaagggaataaaatagctgtcaccattagagataatatgtgttttgtggacttggagaagtgattacttctttaatagtttttaagaaaatgacttgagctagtccttaaaagatgagatgtggaaaagtaaagatggagaggaagggtcctttggtaaatttggacatgaacaaatgcaagaagtgtgaatgtgctttataggtgcaaaggtgtcactaaggcataaaacttacagtacaagtggagacagacgagagagtaagaagtgaggttgagaatgtcataatgaggcttttgaacagcaacctggagtaatttaaagttttgaaagggatggtgacatgttctaatcagtaataactgacaggagggagaaaggtggatgtcatggagaggagagagattaaccaattagggcaataatctaggccagggaagaaaaaaaaaaaaacctgcaccaggaaatagccagagtttgggactccagttgcagatgtaattttcaggagttaaccacagcaagatgattgttgaagcctgggattggtaagaaagtatgtaggtaagaacaaaatatctaagagaagcttggggagatgcctttctttaagcagtggagtatcaaggaaaccaaaagagtaaaatgcaaagatacagtgctcctggggatgagtgggggatgtatagtgttatgatgttataaatgggaggaaggctgggcgcggtggctcacgcctgtaatcccagcactttgggaggctgaggtgggcggatcacaaggccaggagctcgaaaccagcctgaccaacatggtgaaaccccacctctactaaaaatacaaaaagtagctgggcatggtggggcatgcctgtaatcctagctgctcaggaggctgaggcaggagaattgcttgaacccaggaggcggagggttgcagtgagccaagatcgcaccactgcactccagactgggcgacagagcgagactccatgtcaaaaaacaataataataaaataaaataaaataaaataaaataaaatagggagaaaaatcttagaatacaacttctgtaaatatgactgctgcaagctttgtacatagaatgcaggaaagtgagatccacattttatttatcttcacattccctaccctattacagtattactatagtacagtatatggcaagaagaaattatttcctaaatgaaggaatgaataggactttggcatcatcataaatatattggtcttcggtcaaaatttccacgaagtcctgacacttgtaatttttgtgtctgtcatcacacccatttccatctctcccaaaccaatgtggaaagaaaggaacaaagcttgttcttattagtgtcttgagtctttccaggacagaaacaacctgatcaaaaatagagtaggaaaagaggatagaacaggaggctactgaattatcagtgagggggaaaatgctatagcaagaattgaaaatgtggactaatctgatagttttctgacccaactttatcattatctggaattattttctagacactactagtgtcattggcacatatattactctttctctctcagagcatttcctaatttagaaagaaaaactgactacagataaaactggatcaattcttgttctgtgaatccaggctcaatacaatttaatgtcttttaattgctgccctattttgtattaatttcatgttacatttaatttcaacaatgattactggaatttcgtagaacaagaggaaaagttaggcttgatttttgacacaattttaaaacctacaacattttgacatttattgggacatcccaccttattttaaagttttatcactgtgacagcaggcctattccagtaagcagaagctagcatataaatattatttatgggttttaatggccatataacttctaacactatttttaaaaaccagttttgtacattttgtgttataatggttatgaagattaaaaataaaaataattagctgggcgctatggctcacgcctgtaatcccagcactttgggaggcgaaggtgggcagatgacctgaggacaggagatcgagaccagtggccaatatggtgaaatcctctctttactaaaaaatacaaaaaattagccaggcatggtggtgcatacctgtaatcccagctacttggtaggctgatgcaggagactcacttgaacctgggaggcagaggttgcagtgaactgagttcgtgccagtgcactccagcctgggtgacagaacgagactgtctcaaaataaataaataaataaataaataaataaataaataaataaataaatagctgcacatatttatacctaaaattaaaatctgaaagaaaaaaagcagatattacatttaaaaatgcagtatgaataagtttgtatttctaattttactcacaaattatgatttctggtaagattgctttttatggttaagactactaagtggtttacctaagatacatctaaagtaattaagcaactaagccagattgcatccagatatgaaaatatacactataatatattccaatgacctctcaagtataaaatcattcaaatgaagcatactggaatatggcagcccaaaccacccagacaaaaggagtatataaacttggtctgtggagcagaatgtccattggtaataacagaaaaacctacggttatgggaaaacaggatacaaaaaaaaagatcctattgccagcaaattacttgaacagttttgaaagcaaatttcaatcctttccatttatctgtttcttacagcattccaccaatcatacatctttgccattggtttgttttcaggatatctatattcactgggataaacatttataattttaacatacagatatactaaaatattatttataacctacttgcttatacccaatatttatgagatcctatgtgtataaatatatggtatttataaatatcatataggtataaatatatgtataataaatcacacatgtatttatatgtatattatatattatacataagctgcatatatttataaatatatgtatacatatgcatatatgtatattatgtgtatgcatatgcatatatgtatgtgtatacaaatgcatatgtattatatgtatacatacatgtatacatattatatgtatatattatgtgtgtacatatatgtatgtatatgtacacatatgcatatatgtatatacatatataaatgcaggtgcatgtatgtacatatgtataaatatatggtatttctacatataggatttcataaatattgggtatataaattatatatatatatatatatatatatatatatatatatggcctaactactgccagtgttgggtagattctaataagaacaatagcatgattctgtcttcagtgcatttataaacttgttgccaaaacaagttctattcacatagaacagaaaattttagactgcaacaaagtgccaaaaggtatggtacaaataacaagtgcataggaagagttcaatcttgcctcaaatagtcaggaaatggtgactagaaagataagttattatgcagactaaaggtaaggggaatggtctctttagaaataatttgcaccttgaatgttctttgccctataagttattttcattattttagaaaacatttttctcttttcagcttcgtggtggatcctgaacaactagatgttcctagacattttctttatggttccaagtgcaaaacaggtgttcttatctaaaacgtcaattagaaaattatctgcggttgttaatctactgtatatttttgtttggtatatttactaagtgcactctttcaaaacttattctataactttatcaattcatgtgaattttagctcaattttcaaagttcactaatattctcaatatttaatgctaaatgctttgctacattgtaactcacctaaaaccttttagtgacaaaatcctaatatgtggaaaaaagcatatgcataaaggaataatattgtgaaaatgaatctgttatgataaagaaaaaataaagtggaaacttttagagtattacttcatagggcagattttgtaaactgtcgtatactgtaaagggttaaatcagcgttttgtgatttttaagtaactgtgagtgaagtttattcttcaacaatgtctactccatccccaacccaactcacagccctatgactactatctttgcattagttaaaaagttagtatataggcatcaaacaaccttggctgtaacctatagaatctctatccatgtatcaggttatagactggtttttcaaaagtgaacaatcctgtgataagttggagtaccatttagtaatacagcaacattgtgtcatttattagcatcataattctttgttatgtaagttaaatatatcaagaaagaagagactgtttggaaaaatgtggttcaagttttatgctatatagttttggtatgcgatacagacagctaacttttcttatgaaaaatacatatttgcatgtaaacaatgatttcaaaatacttgaaaaataaaattttaacccaaatgaataactaagaaatataaaacaagcacaaaatcttagggaagtcataaaatagtagtgaaagtattagacagaagacatctgttttcgaatttcaacactagaatgactaaaactatctacctatagaactatctgtagatagtatactatctacactctgctcaacaagctcagaaattaaatatttttaataataaaaatctgttctggttataaaccttgctaatgaaaatacaatacatataaaaatgtatagccatgttattttctagtataaattcctttgaaactataagtctttgaggaaaattataaggtaaaattttcctgtttttccccctttgaaaaactcaggaaaaaaggaagattgaactaataaaattttatttcttaaatataaatttgacctaaaatattttctcaaactaattcatgaaacagcaacttttaccaatacctttgtatactctcagttctcattcagtataaataaaattttaaaatcctttcatagttctattagaaataagtagtaaattttgatatattgtacatacacacgtgtgtgtgtgtgtgtgtgtgtgtgtgtgtgtgtgtgtgtgtatttgtgtgcctctggtcaactctaaggatgacagacactgtgtaacaacacctgggtcaactcttttaatttatatacaaagcaaagaacaacattaatggagatgcacaatgattattcaaacaagctatatatatgtacaaaggcaaacagacacataacagtctctgcagactgattgtatatagtaagaaaagatcaaaagactttaaaacctaaatgacttttgacatacaaactcttcttgagaatgtttgttgtaaatggtttcaaaaatacaaattatagccaatcaaaacattgctttggttggtgcatttaagtatccaactcaaaaagcatatcaaatattttgggtactaggcagtttccaaagtagcatggtagtattacttgttaaaagggttctgttttcattaacagtactaagtggaagggatctgcagattccaaactggaataagctctatcatattctgaaacaagaattagaatgacttgagaacgggcaaataacaaagcaaaccaatataattatatggtcattctgaccccagctcttatacaaattatacatgtatttttgtgtatgtttgtgagagttgtatgtatgtgaatgtgtgtgagtgtgtattcacatacacatatatactggaacctatagtagaaaaggaaactagtagggccaaaaaaaaaaagaaaaagaaaaagaaaaaagaaaaaaaaagaaaaaactgggacctaagtataaatatctcatcctaaagtaaacaataagtttatagttaacgaagatttttttctatttaaaaccccattttcctaaagaacaaagtagtaaaataaaaaaaaatttaaaaaattaaaaaataaaaaaaagaggtcactaaaagaccaagatgggaaacgtaacatggaatacaagcttgaatctgggaaacaagctcaaaaaacagtgaaaaaaaaagtactggtttaggagttcaaaattcagtgaaacaaactttttgccaatagacctagggatctaagaaatagaattagggagagtttacacttacttacctatatatcagcagatttttctggaagaaaccctttttttttttttttttaaacagtaacatccagagtgacaaattgcaggagatttaatgtataaaatttctaggaattaaaagcttaaacccaaaaattgttcatccatatataagaaattatcgaattaaaacttaatgtatgtcaattattttcaaatgtctaaattcctttggaaataaaaatatcagttttactttgaaattgctcaacttctgctattcatatggtctgattagtgacataagtagcagccgtttttcaacttcagtttcattcactaccattgtttccaaattatcaatctctgctagtaattatgaatttaagaccatattattatcaaaaacctagagaccaatcatatatctgaaaagaaatacccattaaaaattctgcctcctgtttattgagaactatgcattgaacattctgaatcattctaagcctctggagagactgtaatgatccattcatgagctggtatgaaatcagtgggaagcagaacaacagaaggaactttaaaagcaacaagcaattatgtaccatatatacactgtagcaaatattttatatttgagagtctttacagcttacatttccattccattattacaagtgatgaaaaacaaaaaattgcaagtagtatgcaaattataaatatacagtcttcccacttcactaaccaaattcctactttccagtgttacttcccaatttatgcaggaaacctcctgcaaagctgaaactgattagaaaattctttatattttaaaatagctctttctcatttttagagaagtcaaatagccaaccatcaaaattaagaataaattgaattgtcacagtccattacagttattgttgctagatccacctcatttgcagatgtccaaacttaaattcatctgttcttaaaatgctacttaaaactttggttgttttcctgtaatataaaagaaaaagttaatttatcaattgattgaatacagtttttactaattagtttatcaaaccaaatactgtgaacgtaccaggtgtttacagatttaaatgcatgttaccatagaaactattaaagtaactagaactgtcaaataacaaaacggctcatgtttttaaaatatatgtaactcattttaaaatatattaaattgtattccaaacctgttcttctgtttctgtggcacctaggtttaaaatatgtattaatgtgtaaatcacaagtaaaatgaattctaatgtacaagtttgttttaaaaagtgtatgtcaagcttttatttacacaataaaatgttattaaagatggaaagtctacaaatgaaaaagtgactatagtttatatagcactgaagtttacatttattcttacagaccatggattacatatcccaaagatctttgaaccggtgggaaagttgaaacatcaagtacattttttcttatttaatatttatgcatgagaagtattataaaaaattttaattcctgctttaattaactttaaaaagaattggctagagatctaaagttagggagtttaagaaatattaatataaactatgaacaacataatgttttttaaaaattataatttgaggaaaaaaatactatgaattccaaagaattagaataccaaaaatggagatagaaggtagtagtgtttatctcccattcgaactgttctcagtatacctatattctgaatctcatttcagaagagtcctagctgcctttacctatataaaggtatttacgaaaactctaataggaagttaaattccagtcaaatgtaagtagagaccacaaagaatgggaatcatttactaaaagcataatgagagaaaggtatcatactcagtaatctcatgcattattttattaatcctaacagccagagattatcatccttatcagcaattgcaaaacttatcatccttatcagcaattcaatgaggttaagtgacttgtccaagttcgaactaccggtacacagaatggagctacaatttgaagccatgtctgatgacaaaatccatgtcctttccaatgaatatcctaagagatgcatgtatgtatttattatgtgtatttatttagatggaatttgataaggtaacacagaaatataaagggctaagaatagcaaagacatgttaaagaaaaatacatgagatgatttgttataatgtataaaaagactaattgaacagaatggatagcccattaacagaccatgcatacattgccacaaagatgtcagagaagtaccctttcaataaatatttttaaaatgactggatatctatgtagaaaaaggtaaaacttgatgcccacctcacatcatagagtaaaattaattccaggtggacaatataatttaattgaaaaaataaaacttttagagtatgggataatattttcatgacctttcaattaaaaatatttcttaaacaaaatacagctattccattctattttttgaacagagttactttataataattggttatatctttagatttttgtagttttctgaattacttatatcttataataaggaaggttaaaaatctagaggtagattctgatgaaaatgttaaagaaaaatattttgtaatataatattacaatacaaacttagaaaactacttactggtttttgcagtacaatgggatgatcaggcagaaagtctggtttttttctgcagatggaaacacttgagagcttcaacaggaaatctctgctgtatttaattctctctgtagatattaaacatcaaatgtaatgttaggaaatgtagggctgtctagatcactttttggttcatttctttctggatgtcctctattcattatataaaatgatgagtcgtgtgtctatgcaaaagagaaggagaaaaaaggctttgacaagcatctactgcctccaattctccttttacatagaaagaaaaccaagtaaccaaggaaacaatgaaagaaatataattaagaaaatgggaaatgcatggcttttttcatctggttattcaggtctagtaaaatgatcttgtgtaaaatataaccacagtaataactattgggcaattcagatctgccaaaatgttactttaatgagtctatcaagtctcaatcaatactaaaaacttaacacaataaaaataaattcaagaaacatttattgtacatcttactatgtatcaggaactgtgctaggtaataatgaataggacccaagatagggcccctatcttcaaggagaacaatgtttcaaatatctgcagatttcaaatcagaaatgattaccagaaacaatcaccaagacagattatatgctgtcccagaagacaatggaataatatttttaatgtgctaaaagaaaagaacggtaacccagaatttcatgtccagtggggggaaaaaaccctcagaaatacatgtgaaggaaagacattttcagataaagtaaaactgaaagaatccatcactagcagatgtgaccttcaagaaatgctaaaggaatttctacaggctgaagggaattatactagatggaaactttactgttcagaaatgaagagcaaaagagatggtaaataggtgggtaagtataacagattcctttttttctctaagttttattttaagaaatatgtattactgttaaaagcaaaagccaccacagataatatatagatgaagggtgtggctatgtttcaatacatttttatttataaaaacaggaattggtctgtaaaccataatttactgaccccctaaacattacattaaagactacaaattgacagagtggatttaaaaaataagaagaccctattatatgctgtctgcaagagacacatattaaatataaaggcatataagttgaaagtaaatggatataaaaagatacacatgaaaagactaggaataagaagggttgaattactatccttacatcctatcaactaacaggtaacaattattaatgtgttgttcctaatacacagttctgaaatacatcgaggaaaaattaacttaccaaaaattttgggtctggcttctttcatttaacatttttgaggttcatccttaatctggaacattctacgtagccaaaccatcaatcaagtgtgagaacagaataaagatattttcaaatatgcaaactcaaagaattcaccaacccaatacccttttttcacgaaactcctggagaatgtacttgagcaaaatgaggacataaatcaataaagaagaaaacataaaattcaagaaatggaggtaagtgaagtcagggaaaatagccaagtagagaactctaaaagtctttcactccacaaaaacaacaagtaagctcataaaaactgtcagaatcaactttctcagaaccctggactctaacccaaagcctgtaaaaaccaggggaatacttagtgaagaaaaaaaaatagctaaatttgggaaaaattttgtggcatttaacttacctgggaccatcccccagataggccatggccttgaagacaacagccctcattacttttataggttcccagaactggagggagtagtacagactttattctcaaaaaattatgattatttgttttgacctttcttatagttccctgaggaaccatcttgagaagcttgcctgtacttcacacctaactaagaattctcctagcattaaagctgctgcccaaagtccatttgtccaaacatttacaggaaaatgtatcagttgcttccacctgagacaagggataacaattggagcaaacattaggcataccaaaaagtttcggaggaaaaactgaaaaaacaggatgctttgaggtagaagggcagtgaaagaatcccaaatattctttctagaagcccacatgcatgtcaaagctaggctcatgttcacagaaaaacttgagaagatcctaagcactcactcctggctgactttcagattcctaccaagcaggaaatgaaggtgaaggcagaattgaggtaatacctcaaaatacatagaggccttatgcaaaggctgaaagaggggcttctttgtttttcagtttggtatggttctagccattgaaggcaattatgtcaaatcaccagctgaccactaagataacagaacagagacttccatggtcatgcatgacaaagaatatagattttacaatattagtttggaaaagtcactaagctaacaacaactactacaacaaagagcaacaacaaacccaagggaaggaagaaaatctgacttccagagcagccacatttataacattcaaaatgtccagttctcaaccaccacaacaaaaattataaagcatgcaaagaatgaagaaaggatgggctcattcactggaaaaaaagaaatagaaattttcagtaaggaagccaagacattgaatttacttgtgaaaggctttcaatatactattttaaatatgctcaaagagctaaagaaaattatgagaagagtgtctcattaaatagagaacatcaataaagagatggaacttataagaagaagccagatagaaattattgagaagtacaataacggaaatgacaaattcatgagagggtttcaacagcagatttgagcaggtggaagaaagaatcagcaaatttaaaaggaattcaattaacattattcagtctgaggagtagaaagaaaaaagaataaagaaaatgaacagagcctaagacacttatggattaccatcaagcataccaacaaataaataatgggagtcccaggagaagagagagaaaaaggagaagaaatgatatttgaagaaatcgtggaataaaatttccaaaatttaacaacaaaaaaagaatctatacatctaagaagttcaacaaactacaaatagaatgcagacaacccccaacttatgatggtttgacttacaattgtttgactttatgatgatgtgaaagcaattcaagatttccaactttaagcactggtgattctgtgaccaaagactctctgggccaaagactctcataaccaacatattatattttcaacttatgatgggtttattgggaagtaatcccaccataaattaaggagcatctatctgtataataaaagagattcttcacacatagatacatcataatcaatctgtcaatgaaaatcttgaggtcagaaagacagtagcaattcatcacttacaagagattatctatcagataaacagctgatttctcatcagaaactatggatgtcagaagtcatgtgatgacatatttaaagtgctgaaatcaaaaacatgtcaatcaagaaatctatatctgacaaaagctccttcaaaaatgaagcagaaatggagacattcacagataaccaaatactgacagtttactgcttgtaaacttgtcttacaagaaatgctaaagggaatccttcagacttaaaggatagtacacaactaaaatccacatgaggaaataaagaacaccagtaaatgtaactacacaggtaaatataaaagcatcaataaattttcagtatgaaattcatccttttctcccatatgatttaaaagacaagtgcatacaaatgcataattataaatctaggttgatatattacagaatgtgtaaagatgtaatttatgacaacaacaacataaaggtgactttagaaatatatataggagcaatgttttatataacattggaactaagttgatattaattcaaactagtttgttatatattaaattaatacccaacacagcaactaggaacataaaaaatatagtaaagcaaactaaaaggatataaaaatagtatactagaaaatatctattaaacacaaaaatataatggaggaattaagtaacaaaaaaagacgtatagaagacaaatagcaaaatgggaagattaagtccttttttatcagttaattacattaaatgtaaatgtactaaacttttcaattattataaaaggcagagattggtagaatgaatttttaaaaatcatctaattatattctgtctacaagagactcattttggatccaatgacaaaaataagttgaaactgaaagactgtaaaagatattcaattcaagcagtaaccaaaagagagctgaagtgagtatactaacattagacaaaaatagacattaagacaaaaattgttataagagacaatggacatttatgccatgataaaagcatcaattcatcaagaagatataagaattgtaagcacatatatacccaacaacagaaagaaaaacacagaattaagcacagaaatggacattttaacattaataactggagactacaatatcccattctcaatattggataggaaaacttaacagaagatcaacaagaaaacagaatatgaacaccacaacccaactaacctaattacatatatacaacactttacccaacaacagcagaatatacattcttctgaagcacacatggaaccacagcacacatgttccacacacatggaacattctccaggatgaactcatatgttaggccacaaaagagtctcaataaatttaaaaaagattcaaatcatacaaagtatgccctatgaccacactgaaataaaactagaaatcaaaaccagaagtaaactggaaaattcacaaatatgtgtaaattaaaacacactcttatacagccaatgcatca

SEQ ID NO: 1483 - DNA, 297 bp, Homo sapiens
aaggaagagactgaagcactaacattaaggttaaatgttatctctgttgatcaaggcaagggccagccaagccagaagtcctgtcgattcaatggcctggaaaacgatcaagccgccgagtccagagacacaacagcttctccccaaacagccctcagtttaatgtcagcggtccagccacttctttgtggcagtgccagtgctcatttttacatcataatttggtgggccttgaaaggtgcttcctccaagaaggcaggtggagaaggaaattctgatgacatcactctcccttta

SEQ ID NO: 1484 - protein, 97 aa, Homo sapiens
KEETEALTLRLNVISVDQGKGQPSQKSCRFNGLENDQAAESRDTTDQTALSLMSAVQPLLCGSASAHFYIIIWWALKGASSKKAGGEGNSDDITLPL

SEQ ID NO: 1485 - DNA, 1295 bp, Homo sapiens
tgccagagccggtgcgtccgcctagccccgctccgcctgaggccgtcagggctcccgaggatggaagattcccaggagacatcgccgtcctccaacaactcctcggaggagctcagctctgctctgcacctgtccaagggcatgtcgatcttcctcgacatactgaggagagcagacaaaaatgatgatggaaaattatcctttgaagaattcaaagcatattttgcagatggtgttctcagtggagaagaattacacgagcttttccataccattgatacacataatactaataatcttgacacagaagagctatgtgaatatttttctcagcacttgggcgagtatgagaatgtactagcagcacttgaagacctgaatctttccatcctgaaggcaatgggcaaaacaaagaaagactaccaagaagcctccaatttggaacaattcgtaactagatttttattgaaggaaaccctgaatcagctgcagtctctccagaattccctggaatgtgccatggaaactactgaggagcaaacccgtcaagaaaggcaatttacatccaagccagaagtcctgtcgattcaatggcctggaaaacgatcaagccgccgagtccagagacacaacagcttctccccaaacagccctcagtttaatgtcagcggtccaggcttattagaagaagacaaccagtggatgacccagataaatagactccagaaattaattgatagactggaaaagaaggatctcaaactcgaaccaccagaagaagaaattattgaagggaatactaaatctcacatcatgcttgtgcagcggcagatgtctgtgatagaagaggacctggaagaattccagctcgctctgaaacactacgtggagagtgcttcctcccaaagtggatgcttgcgtatttctatacagaagctttcaaatgaatctcgctacatgatctatgagttctgggagaatagtagtgtatggaatagccaccttcagacaaattatagcaagacattccaaagaagtaatgtggatttcttggaaactccagaactcacatctacaatgctagttcctgcttcgtggtggatcctgaacaactagatgttcctagacattttctttatggttccaagtgcaaaacaggtgttcttatctaaaacgtcaattagaaaattatctgcgttttcaaagttcactaatattctcaatatttaatgctaaatgctttgctacattgtaactcacctaaaaccttttagtgacaaaatcctaatatgtgg

SEQ ID NO: 1486 - protein, 347 aa, Homo sapiens
MEDSQETSPSSNNSSEELSSALHLSKGMSIFLDILRRADKNDDGKLSFEEFKAYFADGVLSGEELHELFHTIDTHNTNNLDTEELCEYFSQHLGEYENVLAALEDLNLSILKAMGKTKKDYQENLEQFVTRFLLKETLNQLQSLQNSLECAMTEEQTRQERQFTSKPEVLSIQWPGKRSSRRVQRHNSFSPNSPQFNVSGPGLLEEDNQWMTQINRLQKLIDRLEKKDLKLEPPEEEIIEGNTKSHIMLVQRQMSVIEEDLEEFQLALKHYVESASSQSGCLRISIQKLSNESRYMIYEFWENSSVWNSHLQTNYSKTFQRSNVDFLETPELTSTMLVPASWWILNN

SEQ ID NO: 1487 - DNA, 132411 bp, Mus musculus
  misc_feature (1)...(132411): n = A, C, G or T/U
tagtccaggagataaagcctcatagaatccctcaattactgtttcctgaaagacttcgtgaattttacaggaaaaaagaatggaacttgagaatatcatcctgtgtgaggtaacccagagccagaaggacatgtatggatgtactcacttataattcgacatagccataaagtgcccaataaccatgctgcaatccatagacccaaagaaactgggtcgtaaggaggtcccaagggaggatgcacaaatctcactagaagggtaaactaaatagttataggaggtagatggaaagagggaactgtgtaagagaaggggtgagtaggggaacagggatgtcaattaggtgtgaggagacagagggcgggagagggctggaagtgtgtcttagtcagggttcctatttctgcacaaacatcatgaccaagaagcaaattgggaaggaaaggatctattcagcttaatttccacatcgctgttcatcaccaaaggaagtcaggactggaactctagcaggtcaggaagcaggagctgatgcagaggccgtggagggatgttccttactggcttgctcagcttgctttcttatagaacccaagactaccagcccagggatggcaccacccacaatgggctccttcccccttgatcactaattgagaaaatgccttacagctggatctcatggaggcatttcctcaaaggaggctcctttctctgtgataactccagctgtgtcaagttgacacataaaaccagccagtacagagtgagaatggaaatcagcagggtcatctctggtgactagttggaggcctaggggtgggagaggatatggggattctatgagggtgactctagctgagattcctaccacagggagatatagagactgaagtggctacctcctgtatccaggcaggacttccagaggagggaaggatcatcaatccatccacaaatccttcaactcaaaatttgtcttacttacaacatgtgtagggatgagatggagcagagaccaagggagggcatagtcaaccaatgactgccctaacctgagacccatcccatgtgtgagagtggaccactgacactattaatgatattctgctatgcttgcagacaggaacctggcataactgtctccaaagaggcttcatccagcagaggttggaggcagatgcagagatccacagtcaaacatcaggcggagcttggggagtagaacgggaggtagaagtgagcaagatggaagggtcaaggacaccaaaagtagagctcaacagtcaactatcctgggaccatgggcctcacagagcctgggccactaaccagggagcattcagggactggacctagaccccacacacatttgtggcaaatgtgcaacttggtcttcgtgtgggtcccctaacaagtagagtgggggctgttgtggtctctgttccctgccattggagaccctttgggtctcagtgggagaagatgtacctagtcctagtgggaccaaatgtcccaggatggggtggtacccaaggggagggaatcccccttctctgaggagaaggaaaggggacaatgggtggaggtatttgtaaggactgggaagagaggagggagcgggttgcaatcgggatgtaaactgaattaaaaaaaaatctggatacagaataacttcaaaatggctaagactgtcgagtctcacagactgttccagccgggacttcagttaagccctggacttgcccatcacacagacactagacagccaatgttacagctagctttcttagggcttgaccattatcacaatttccttagggcctgcaaaagatgccatcaccccccagacagcaggaagcaattttatgagaacgatgccccattcccaagaggtgggtgggtggtttttggtcattcaatgtgcgatggatgttaaggggaggggggtgggcgttgatcacaagttgttaatggtcttggtcagggaggagcaaaggaaaggaggttggactcaggcatctctttttctcctttttatttcatctatctttctctcctatctggtgttaagaggaaaggggaaagaagggatggaaagagaaaaggggatctaggggtgatacaacaaatcattcaaactaatgagtctacttttaaactaaagaggttaacaagtcaaatagtttacatcagtatggaattttgtgtattgatagaaatttaatgttacattttgctacaacacgctatgcatatatgtttttactcttaggtattgtaaaaatgtaatttaaagtcctagtccttgaaagctactattacaaaatattaggataattaagaaatgcaagtttgtagtcagcctgaagtggaaacttaagggtcctttggaagtcagttgtgttgatagtgttttaggagcaaacacctgaagggcaaacacctgaagacttaggcagacttgtgaagaacagttcactgaagccgacacaggagaaaggatgttctgctaaagcaagcacgtgaaaggacaggtgatgacagattcttcactaatgacacgcatgtattggtctgctttacattgtgtagctgagctccatttgttgggactccatagagagaaatgcaccaaaaaacttctggtagtatgctgcagttttcttgctatttcctctgacttgggctgattggcagagtgatgctagctgcgacagacacacagctgaggcgagtcatgtggaggacacatgatgtttgaagatcatttaaatagaacttgatggacagtgactgaggctgagcttggcttgtttatagagctagctgtgcaacgcttgtggcttcatgtctgctgatcttcgcttcactgagagaggcatagctgtgcctggctgtctctgctaggtcaggccaccgatgttgattcatgtttgctatcccgactctaccaatctcgactgctggtgtatctgtgaagtgtttgccagtggaccaagctgttgctgctaacaagtgaactgaactgctgatttccagtcaacacagacaggacttgctccaaagaacatttctaaacatgtctacttcccttgtagcttttctttcccactacctctggttaaaacgtttaagaaccgtcattaaaaataaggtttgaaaaattaaagttacatcagtcaatcaaacttgtgttcatgtattagtttagataatgcattagataattacagatgtaagcttttatagcctcctgtacaagttttcaaagttaagcagataacaaatagttagacacaagtaatgtttgcctattcagatgtcctataggtagatggtcttcaaacacttaagagatctaaagaatatggcatctaaagattttttattaacaaggcttttcatgagagtgagacacaactgctcctggcagcacccctgttctacttcaaagaaaatatcgggcatcgaagaacctccatatggagtttgcttcaaatgtggcagagctagccactgggcaagaaactgcccttgcttcaactactgacagaatgctgtccaagctgtacacaagcaggacacggaggaagctgactgccaaactttgctaagacaaagtaggcaagtccttcaagattcttgcttcacaggtaagtttgtctggtgtactgcgccagaagactgaaaaatggatgctctgacatttcagaggactcttgggcgactgtccaggtagccaccaacccatgtcatttttgtggttttggaggctgcttgctctgcacttcctgtttattcaggtaacatttatttttctcaggtctctgacagggttgaggactagatagctttagtctcacaattaaattgtttaggatttaagaacatgttttaaagcctaaaaggatatttgtaggttgataaatgtaggctatgatagaaaaaaggtagagagccttggactcaccaagacagaatagatcttagagtactctctccaaggttgctgtcatagtcagggtttccttgctgtgaagagacactgaccaaggctcttaaaaaggacaacatttaattgggaatagattaccgtttcagaggttcagtccattatcatcatggtgggaagcttggcagtgttcaggcagacatggtgctacagaaggagctgcgagttaatagatcttgatctgaaggcagacagaaggaggctctggatcacactggctaggcttgaacacatatatgagacctcaaagctccaccttcacagtgacattctttcaaggctcccctcttccaataaggccacacttcctaaaagtgccacatcctatgagccgaacatattcaaaccactgcagttgccaaatacaaatggactagacattgtcaatgtagttcttacctgacagttttcataattgttcttgctgtatatagtttattgatattttagaaattgacttttattggactaaaaggtggagatgttggagtgatgttttatgcaccgtgtaaagattgcctatgtattatataaatgctgatttctgattcagcaaagatctgattacaggccagactttgttattgttaagtatcacctgtctcagtgttttgtaaacactccctctctcacgttctgattggttaaataaggagctgaaaggccaatagctgaggcaagagtaagcaggaattccttcagagacagggaggctaggaaagaaagaggtgtggccagagaggcagagcaagcagcaaccaggactaagactgagagataatgagacatgggacatagaccagggcagtattgtcgggttagaaaagctgataatctgtccagctctagtgcctacgctattaaaaatatattatgaacatatttatcattataaatataagtctcagaactggtgctggcacagaaaagcctacagttatgtgtatgtacctgcgcacatgtgcacacaggcagtggttgtaaggtacacaactatgtagatctgcaaaaagtcccaccattctccagtacagaaatacataattgcataaaaaacttctgatagcattactcacaacagtaaaaatgaagaacctaagggcttacaaaagacatctttgcatatgcatatctgtgtgggaaggcgtgagtgtgcatttgtgtcagttttcaggctagagttcaatggcagatgtctttcccaattgtctccaccttatcgtttttgagatagggtctctcactgaatctagagttcttggtttggtagattagctggccaggaaaccccagggaacctcctgtttctgcctacccaggaatggaaattctatccctattctgtgcgtctggctttttatgtaggtgctgaggctggaactctggtcttcatggttgcacaacaagcaattcactgactcagtcatcccccagccctgaaagcacagtgtaaaagccagcctacaaggacaatttaaaaatatagtttgttatatatttatcaagcagacgtttaacagaatgaatacttacgtactttctggtcacaatgggtaagaatgcaggtttgagcaggtgtggtagcacatgtactcccagctctggggacactaaggtagataattgtagaggacagcctggtctacacagtgagttcagagtcctcccggtttatacaagttgtcctcagaataagagtaaaagcagtatggtagatctgagtttctatccatgtgacagaatgcatgttccctggctacctgattaatcggactgaatcaagtaagaaaacaaaacacattcagagtactgacagcatagttcagtgatagaagccttttcaatatgcaccaggcactggggccattcccaacccaacacactataatacaacgcaacagaatacaacacagccagatgaaaccaaaccactctaatccactgtctagactcaagtctccactcctcacttacttgctagtttgtggtgctgtggctgtacccctgaatccctctgtgccataaagactccacttcataaaactattgagaggagtatatgagtccaattcttagttttgtatcaggaagaattagtattttattagccatgattattattagtgatatataaaagggtatctgtgatgctttaattggtacaatgataacacacaataatatgtataataagattccactgttttggttaaaaatctctgtacacacatgcaggtgatttgtacatgtggagactggactttctatatacaatagactaagttgctaattattcttgtctaaaggctaaaatctcctcagttgctgtccttaactcatatttggtttttatttgacatggctacgaaaggttccacttgaaattatggaaagacactttccctaaccagtcattgtgagacagatacaaggcactcaaatctctttgagcttcctttcagtagaggttgaataaggttaaacactgtgaggtaagtactagttcacaataggcctttaatgtagatactctttcatgtctttcccttttaaatgatcaaagctgtcttgattgagccactcaccatttgacagacaactgtcagactcttcccatcgaaaatgtcaatcaagcagtcccttttagggggctacagcaggagtgctgctatcatggtggcctggctgctttgaacattgcatgggaactgagcaaattcaactgtagttttgagcaccattatgatgatagctgcttaagaggtctcatttttgtcatgtctgtcctagtcagcttgcaccagctcttggagacttcactgtcatcatgataagtctcagggacatcttgatgatgctacctatcttgagttatagtctgcttaggccaaggggaacacgttccctggtgactcagcaaaaaagttcttgattgacacacacgaactaggtcatgattgctaaacaggcaaagctctgactgatggagcgaggagctgctcctacagatgccacaccccctttctggctttataagcagcctgcttcttagtctcatggggtcagttttgaagccttcttttccatgtactatctctgtactatcatactaggctccaataaaaagtctctcttgagtggcctttcatttgcccatacatagtctttactataggtagagtggactaaacttgttgcatggagagaagagagcactggggtggtgttcagcctcagcatgggtactaacagaggtggtggcgacagcagcagcagcagcagcggaagtgagaaaatagcccgagagcttcagagagcaggccatggcaggagactgtacagagaagagccgaaggtaagaaacagtgaagggtggagtcagtgaggttgaaagtcccatccatgcaagacttccagagagctggcgggggttcagagccaagggtcctgataattgaggtttgctgctgtaacaccagctgctgggttctgtgcccagagtgatagcctctgtccggagttcctaaggttccaagcctggctgagcaattttggagcaaaaagcccctgactttgagggctgtggcttgctttgacctgaaccacttacatgtacttatatatacttacatatacttacatgtatagtgtaagcctctgccttttaaagcttagagtcatatacctctaggcctgtacacctctgacttagtaagcctctgctcaagagctcagagatgctaacaccaaggaaactattcttgccactattttttttctgagattttgttttatgtgtgtgggtgttttgtctgcacatgcacgtctgttccccacacgcatgcagtgcccgcagaggttagaaggtgtcagtcagatcttgtggaacttgagttacagatggttaactgccatttggaccctgggaagtgaacaagggtcttctgggagagcaaccatgcttctaaccactgagccatctctccagcctctatccttgccatctctgaacacctaaatagataaaaaaagacccttagccagcctttcatgacatttagagtgttttactatagagtacagaactaggagagttcgtatgcatcaaacggctgacaagttttgaatcctttctgaggagtagtggacaatggtactgggaggggtggagagacatttctgtactttagtattgtttataaatggtcattgcatttattttggaagaaatgccaaaccaaagagcaagaatgtccactaaaaaagcactgaggctcagagcactatacaaatctagtcagtttcaagtccccaggagggagagggtggagttagtctggagttagtcaatctggagagtagggtgagattggggatatgggaatggggctggggagaaggtacatatactattaagtcattaacaaatggtaatgtagttcttccaattaatagtgaaagtgtttgtgggggttgaaaacatttacccagaacctggactccacctgtgtttgcttttctgtcactgtgacaagtttatgaccatttaaaatgagtaaaaaaacaaaactgtatttggctcacagtttcagaggtgtggtacatggtcacttggttccattgctgtggacttgaggtggggctggacacgtggcagggtgtgtgtgatgaaataaagcagcccctctcacggcaaacacgaagcagacagcaatgacaggaagaggccattgcaacacagtccctaagaacacacctccagtgatatacttccttcagttagccccacctcctgcttttccatgggcaatggagctgtgcaatcagtattaacctctgattaggccagactctcaggatctaattattgtcccaaagtccagcattaggcaaaacaagcagcagggaaggagtgtgtgtgtgtgtgtgtgtgtgtgtgtgtgagagagagagagagagagagagagagaaagagagaaagagagagagagaccatatccaagttttatcactatgaaccaaactgaacctggggctatacatgtgtgcagaactaggtcttgaagcatcaacaaattctacatttaataatttttctcttgggtgtgagatgggtgaggtagctgaactaggaggaaggactcttatttttatgataatgacaaagataatgtaactttctttgtaaatgtaaaattaatacaggaagtaacatggtcagtgtttgttgctatctcgtacttgcctaagttacattgggagccgcatgtattcaaatttcaaggcattatctagggccctagggattccattttgcgggaatatatgcaacttcagttcatttagggtctcgattattttcttttcctctaaaaatgtctttgatctggcacctaatttctttctttttttttttttttggttgttcttatagtaaccatataagcccttgatttgaattccattttgcagctgtacacgacctcatggaccaacgagaggcttaaagttaaaagttgggattgccactaaactcgggttaagaagaaggactctaaagcacgtcttggtagctcaaatatcgtggtttccggcccttccctggctcgcagctcgctcgggaggctaacgttaggggagcaaccccagggtgagccctcggtgcaggtccctctgggctttaacttcggggctgctcggaggcccggcctgagtcagcgcggcggccgagaagttgggcgcgaggcgcagggcggggcttcctcctcttcctcctcctcctcctccgattcgagccccgctctacttttccgagtccgcgtctcttcctccgtccgggcgcgtgttcctccagctccgaccaggcggacgtgacagccgcagacctttaacgccacagcccggggcggggaagctctccgcggcagccaggacagcccggctccgctcggccgcacgcaggctcctccggagcggccgcgcgtctcctcgggcccggcccgtcctccacctcgctgggtcgccgcagcatcccgggctatggagaccggctccgactcaggtcagaggccgcgtgcttgcgtgcggctgagggaatgaggctcaggtccaggggttggcccgccgcgtctgcgtctcccgctccgcgccggggaagcttggcggcggcaggtgggcaggacgcggcgtgagcgaggcagcgagggcgggcgaggggccggcggaggcggagggggaggggtgaggatggctcagctctttctaaatataagagccggcgtgaggctagcaagccgggcgccgagccgaagagccgccgcgcggtcactcggccgcacgggcggcagcggctcctccgtagcgcgaggctgagagggagctcccgagtcgcgagctcgcgaggcgcggcgagagcgacgctcgcagcgcagaggacgcaggcagcgggcgggcctcgagggcgcagcgcggcccgcgtgagagacccgaggcggctccgggcccctgcggcacggcgcggcgcggcgcggcaccgcacggcacggcacggcgacggccgcgagcccccctcgccggccgcccgcccgcccctccctcgctcgctcccgggcgcaacatggctgcggccgccgcctccgcctcccaggacgagctgagtaagtgcggcgcggagcctgcagctgggagcgggatttaactccacgcaggaccggggctgggcccggccagacacgggaggctgggggggcgcggggccgggcaagtgggtgtgcggtggtctcggcacggggctccggggctcaggcctggcgggagggcgggcgaacaggcgcgggccgccgccgcgggcgctcgtaggccgcaggtttgcaatgtcacgtcgtgaaattgaaaccagagccccgggcttagctacccctgctcgaaatctgcttcggcccgggctttggggggatcccgggcccctggcttgctaccggagctggcgtgcggcctgtcgcccccaggtcggactgtgtccacccgtccgttccgtctgaccccccgcatgtcccttgattctgactgacgggcgaattctggacatggagctttggggaaggggagagggttgcctttcccgcacctccaaggaatcggcagaaaggtcacagatgggagatgactttcaggttgaagctgtaaaggccaatagggccgctgttaatggcagaaaaacaaaacaaaacaaaaaacaaaacgagggtgacggagctgtcagaaaggagagagtcccactccatgccaagcgttgcgattttccaggggatgacgatccaagctcgctgggagcagtggtcgcccttaatgccaggccgcccagcctgctgcccgtgttccactctatgctttgtgggaagtgtagttctaggatgttgtcagcctattctggggtcataaatattcagttttcgtgagatatgtaggataatcgattgcgttttgggtggttggttcaaatgctttagggtatttacgagaaacctactcccctatgttgcccttcagtaaagactaacaaagaaaggtgttatttgaggatgatgtgtattttaaatgccagcatgggtgaggtgttgtaagcgtatgtttgtgaagcttatgttattaaagcgtctcaatcgccatgtgaaagtagttaaacttaatttatgtttctttggtgcttggcatttgaaagctacttttatgaacgtgatctcacttttgccctcataacaaccttgtgtggcaggtaggtaggaattatcccttgtttcaaagaggaggcataaacgtttagagggattaagttccatgctgctttgaactggtggagcaggagtgctagttgctcggttggaagctgaagtacgtgtttggtttggctctgggaagaaaggagactctgaggagagcaagaagagggaggtctccggtacggagaggtagatggaggtggccacagtgttgagtgtttgcctcacagtcccaatggaaccaacacttgacctttgaagagaccaatttctcagttttatttttcagtgtttttatggtggtgtgatacgcatcacaagatttatcatcctaaccatgttttaagtgtgaagttcagggtcattgtgtacatggactctgttgtgcaatcaccacctccgtccatcttcaggattcttccatctttcaagactaaaattctgtaattgttaaacaactccttccctcctcttccttgaatcccctggcagccacttttctgctttttgtctctgaacttcaccatataacttttcactgtttgtctcccccccactccccaccccgttttgtggctgtgtttttttttttttaatttagtataatgtcttcaaagtttatccttgctataacatctgccatgattttctttctaagattgaataattctctcttgcatgtaatacattttcttatccattcatcttactatggatgaatgcttccaaattttagttgccatccataatgctgcagtggtcctcctttcagttcttttgggaataacccttaacttttgaggaactgccgctttctttgtttcacttttgtggttctggggattgaagccagagcctttgacattagtatgaagtgctagtatgtgagtgctctgccaccagtcacactcccagcctgccatttgtctttttcccagtgaccatgccatttcacactcccatcaacactgcataaagggtttcacttctccatattattgtcaataattattagtttctgtaatctcactagtaccattttagcagacatcaggtcatctgatatcaattagaaataatatgtattttaaaattgacgtgtttcatggtgtttgggtttctgttgtaacactaacattaacatttcagttactggtagagatgggaaagaaaatgagaaagagttaacaatttggagtggttcaagtgtttctgtatctacagtgtgcacttatatatcagatacctgttaagatgctgagggtatttctggttaagagatttattggcgttagcagcaaatgttaaagttaggaacagatagtcccattctagctgttctgttttctttggtcaaattactgtaccgaagaaatttgttgatttagcttctgtttttattctggagaaattaaagacttggtatttggtaccttagaataacttgagaccatgcacatgtgtgcaggttaagacatttcaaaagaggatggtgacattttttggcaatcccaaacatgtataaagctgaagctagagctatagtttgaggtcagcctgaagtgtatggcaaaagccacccccctacccccaagcattttttttttttttaaaagaatggctgtattaagaggaggtgaatggtaaaggtgctttgaatgttccaagaaaaaggagctaattatctgaacatctggtggtattttactgtttttgagattggttttgttatgttacacatgctagtctccaactcttgggctccagaaatcctcctgcctcagcctaacagaatgctaggactaaaactaactacagtctgctaactactgtgtctgccttactgtcatttctgtatagtagatagtagaagcattcttctgggtggcagcattgttttttaccctactagtttattatggaactcaacactcagaaaaactgaagtgaatatttgtgtattcaccatctatgtataccacctggtggcctactgttcagttatattaagtcctctatcttttatatacacagacacttttaattatattatcatagtacactggaggagctcctgagtagcaacaattgactgttagtcactacatccctccttccgttatccctttttctttcccctctccccacctgagacaggtgtgggtatttagccaaggctagcctcaaactattgattctttctgttgagattataggcttgcactaccatgccagcctttgattgattgaattgatataaaatctttgaacttgcaagtgaccaaaagagaggaaggcaagatagttttcagttttgttagattttatgttcttttaaaaaaattaaattttatatattttactttgaatcatatggctataacagagaaatagtaaaactattttttttaatactctagagaggtaccctagtttgtacttatgttctgactcctcagagtaactgtgagtttggtgctatcaaccaaatggtaccaaatggtatcttagggcatagttagggcttgaacttaggttctttgatttaaaaatcacttctgttctgtcagctgttaacttccttacagttatagaaagaagtagttatattttcaatttttttcattttagtctctcgtataaagatcaaaatcagggtgagtatgttggtgaagggttctattgtggtagtgttctgtgtttgatgagtagaatgtatttttggatagaatgcggaaaaagagattagttagtttatattaaaagtgtttttaaaatctcgtttgtaattacttatgtctggttttctttgtatttaggctcatatttgcaattggagtgaaattcaatagagggcagatagctagactttattagtttatggaaaagccagcaatgtcactgtttcagtaactggaagaggtgcttctgacaggggaagaaaggactcaagtgtttttgcttggtnnnnnnnnnnnnnnnnnnnnnnnnnnnnnnnnnnnnnnnnnnnnnnnnnnnnnnnnnnnnnnnnnnnnnnnnnnnnnnnnnnnnnntcatgggaaaccttagtggtatcagataagcaacatgccagcaatcttcagagggtttttttttttttttttttttttaaagaggatgatatgtggcaagctggtatgtagttgtgtagttgaacaattaattatttggcattatggaaatagtccttcaaagataataattgtaatcacagatatatagactattgagttgatctttgtagaaaggctgtcaagctcatattgttaaattttggtttcataagcaaataggaagttaaaatggaaaataacaacagaatcccctccccccaattccacagtttattactactctattctttttgaactgtgcttccagtaaacaattttagtaaaggccaatgccagaagttggcatggagatactggtcttgttcagaagatagatgttacaactgtaggcagtgctagtgtgctcaaatgctttgatccggttgtcgatttctcctttcactcctggccaagactttgctttgatgactgctatcttgtattacatgttttatctacatactttccaattcagtaagaagacttttaaaattgagtaatttatggtttgtcctcagagtgcttatagttaattagacacagatttatatgccaatataaatagctgatatgaagcatgatatgaaaaaagcttaatatatgtctttagaaacttcaatgaataagtatagcattctaggctctaagggatagtagcttaaattgaaacgtggagaagagtaataatcatgcattttaagaaaaggctaaataaatcatatgagagtaatgaagatgtgtttactgtggctgtgtgaagaactaggaaaagaaataaacttggtaatctgagacttggtatatagtgccttcattatgtgggatctagaacaaattactttcctgaatattctttctttctttctttctttctttctttctttctttctttctttctttctttctcgtaagaaagggtgatgacaagaaatactccagtggtgttaagagttatatgtgcaagtgctctgttcaaacagttaaggaatctatggggaacggcgagagcagaagacactgggaagataggatggggccaaggcataggaaagccaaccaatgtaaagagtttgaacttagttctgtagacagtagagaactaacagagtttcgaaagggctgatatacaacatgagaaagtctatttgataagaataacagataacaatggtgaaataattaattgcaagcacccacagatctagagcacaagatttacaaggaggggatcaaatgggtaaagaaatgtagagtctgacttgagacagtgaaaatggatttggcacgaagataattttaattgaagtcctaaagtatgtagaaatgattgggttgttattatatatgtgagggttattaaagagaggaaagagttagggacgattctaagactctaactggagactgtaggatagagaaatagggcagaaagtagtttttaggcagacttagacagttggaaatgtagaggaaacaaaaataagattgtattcaacaaatgaatgaatgaatgatggagaaatctttattgaatagtttaaggagaatggtttgggtagtgatcagtgtctctgaaattatagtcaaagctggtttcaaattcatcactttatcacttttggttgatgtgtccttgaacacaaaactgcctacctttgggctttggttatcccatttataagaggggattacaataaaacagcttataggattctaagaatgggaagaaatgatgtatgatgcatgttaaaagtttggtagtatttggcacatgggttgcacgtccatgtgagaaatttgattctaaagctttgaagaggtggggacgatgggatcataggaatggatggcttgctctgaagacagctctttggagcctgtgaaatgtagggagggttgagatgacaatattcaaggagatgagtcctgggagaagtcatgagttagtagagttatcttttgttttcctgagttttgagacaaagtcacactatgtagcccatgctgacttcaaattcttgatcctcctgtttcagcttcctaagtacttaagcatttatatttctcagttatattactggtaacgtgtacaggccaactaaccctcttcttacaaaaccactgtgtagctgagatacttcctttaattttaaagttttaatatacttatgatatgcacatatttatatgataaattacatgtattggtactggagttttaaaatctttagtcagttatcagtgtatcttttgaagatttatgtaggctcaagttctgtttatgtaatacccttcttcatcaaatttgataatcactttatttttctttattctgaatgcaaaggagggcatcaaagatgttagcaagaaattaaaagtgcttatttttcttaaaatggtagctctgtgtacaagtcttaattgtattttttttggtgttctaaataatagattctttatacaattgcatatgtacgagtggatgaacataccattggtgatccagaggacttttgtcaagattggataaaccatgtatcacattgattgtagaggttagtagatttagttcatgaggatatgtgcatttttatagcagatttaaaaatgcatagattgttaggtagcaattttcctctaagatcttcactccccccacccccatttttcctttttcctttcctagttacctgagagaaccagtgaagttcatgttagtttgtatgtgcctgatatttctatttctgtggtgataaatataaaagaatgagcaaaaaaagaagaaaaaatccaaaatttgaaaatattagttagcaatgtgcacaggcagaaacaatggatgacagtttataactgataatctgctatacaaaaaaaccattttacagtttcaggaacattattatggaatcacttattttaacttctgaaaaaaggtattagaggagtcatctttatggtaattgggtattcttgattctgttactttaatatgcactgtgattttttttttaaagctgttttattctgttagtattacaaagagtgtgattctagttttgtttttcgatgatactggatagttctttgaaactccatgaattcagtactagtgaatacttggggtttggtgtcaccagtccaaaagtctactgtgtgcctgtctttactataactcttagactaatttaactattattttatgacttttttgtatgtatactgctagttacagtatataatggctaattcatttaagtggaattttgagggctgaaatgttttataaatcagaattcaacttcagaataaattttagtttatttttgctgtttcttatctttttccctgtggtgtgtagaggaataaaaattgggaggttgaaagacttgtttagtagagcaatgagggcattgcttattgcatcctagattctttaattgttttggaacccatgagcaatgtattaatgcttttatactatactgaaggcaagcagtcctaaacacaagtgctaggattgaaattgtgactttttagacaggcatgatggtgcatgcctccctgtcctcgggaggcaggcacaggaggatcaccacaactctgaggccgtcctggactcgaattccagggtagctagggttatagtgtgctatactgacttaataaacaaaacacaagcaaacaaacattttagaaattttcacatcgaaatgagcaagtaattaactgcttttggtggatagtaactatcctatgttggacttttatgaattcttatgtagtatctccctcaagcttgcttttgtaagccaaagtgatccttctgctcactatcttattaaaattaatttctacctggttgcctgccagctgcgggttctgaggagaaaggccattttagaggagggagtgtttgtgaacttaagagtgtttgtttattaggaatctggcacttaactcactgcatcttagaagttgatgaggactcttgttaaatcatctggtccagctatcaagctgccttcatgatttctttgctttcctgtgtgtatgtttgaagagttaaggagttgaaggcagtaaggaaataatcttgtaggcagctgaggtgagcaggaagggggatccttctaatggatcatactgtgttggtagggagtttaaagcggtctggcatcttataccgaaggctaggatttgatgcataccaggaaatagattcttaactttgccttgcttgaggagttagctactagttcttgtagatacaatacccatgacttttcctgaggaatgcaataatgtttctccacaccttaacatgaaccaatggcaagccaaagaaattctgcccaggtttatcttggcgaaacaaggaatttatttgggcttcttactggagcctgggtgagggactacttacaggaatgactcaaaggtacctgctggattgcaaagcatgtcaattttcatgacagttcatgaaaatcaagttcttagagctccctgacagacttgggccaagtgctgcatggatactctccttttctctgtaattgtttactgcttatgtaactggggaagaaatataatgttttgggctcctgagcctccagagtttcattagcttcgtgagtcttaatgagggaatgtttgggtttggagaaaataacgatataacaaggactttcttaattgggcatttgtcttggccctgaggacagagggacaaacatgctttgactgtcttagttctaaggggcaggagtactaggagtgctgcctaggtaaggacccaggaccacgatgtttccccggactgtcctagctagaggtaggcagcttttgcagaagctgtgatggattgtttcattctgggattgcagcattccttatttccaacatactactgtatttgtgcttactttgggagtgcctggcatttgttttttaaaaaagtatatttgcatttaaaaggaattgagttcctttttaaaaaggctggagtaggggcaaacttctattttaaaatcttaggaatgaagatgggagttctgatttctggtattttatgaagaaaagttttgctatccttatttgggtcttgcatgtgttagaatgacagtcaatgacttcaagtggtatttagaatcataccactttcagagctagtactagttagatttataagagaataatctagataccagtcaggtcttccttatttttcagttttagcctcaaactaattaaaatggttttcatgtttgaagattcccattctcttctttacatgtctctatcatcacttccaattgtataattcagttctacttttcctagcttgtagggtcccatttctgagaatgctgctttggttctgcctatttcaggttgacgcgagaaccaactctgtctgtcatacactcactgttttcttcaccctcaaacatttccaagtaaattattgaagttgaggtgagtcacagggcagccttgtgtttcaagcatttgattttctatacttcagttggtccccttgtcatttcccttttttttcttttatcctttgatgtagaaatggctgtaactcctctgatttggattagtacagctttgccacacaatgaggaatcttactttattgtcatggtattaaaacatatctcatttccatcctaattataagttatcactagtttctctttttattatagtgttagatgcataaacttctaaatatctttcatgattcataaagaattactattctctgcattcaaccagtatttgaacatttactttctaaaggaactgagttaattaagtttttggataaaagagactcagtcataggttctgaacttaagctggaggaagatggaggcatgagtatgtagtagggtagagtcttatcaaattggtctagaaaaggaaagattgagcagttatataatatgtagcaaacgatggtaatcatcagaagtaaagaaaatgtaagtggtggggcaggagctaggagggtgttgaactgagatgtagctccaggatgcctcctgtagctgcgttcagcagaagctggaagttttgaattgcccacagaagagaattttaggagacaatatgaagcagaattggagttcattaagaagagatttttaacatagatttaaatatggggatcattagaagagaggtgctcagtaaaaatataagacagacataattgtgggtgtgggttactcaagagagagttgcaattacttgtctctccaataattctatagctgattttggtgggctctgaagttacatctaataaggttgttaagtgacttaaatgtggtcatagatggtttctgatgcatgtgttgagcagaattatacccagtagaagtaaaccttgggtcacaggtttcttctcttcccccctgatttttcttaagcctctgtagtttgtatcctaccagaaaaggactatagtgagccctaggaccaggatgaaagtggtatgtgtgtatagtggcttatgagttggacctcaagtggcttggatttagataagtgtagatagaagaacggtctagtgtgtttgggagagtgtaccatgttggatgacttgcttggtcaaaagaattggactgggaagaactggatgtggtggcacacattttgattctagtacttgggaggtgaaaggatgagatctgggatttgaggacagcggcctagagcaaggatgtctcagaatatttgggttgggagactttatggtctatgtaagaaacagttgggccttggatggctttggggagtgatagcatacataggtgaggatgttcctctagggtaaactggcctactcccaggaaagattacctttctgatattaattacaatgcattggaagcgttttgttttttaaatgtactttatgtaggtgtgtttttcttttcttctacaagatctttatatttagatcaagttgaaagctggcttaagccaagaatgcatttgcagtgaatcaaaatacttatggaaccgagagggaccttcaggagagtcttggaatttcaattagaaattgttcagatcttcttgcttttccaagctgtcatgccattccttcttgagtccatctttctctgattttgcgtttgatgggataggcttgagatatctgtatcgtgtttgttagtttatgcttctcgattcaacctgtcagaggaggcttggcttttgatttataaatcccagttctgaatacttgaaaaaagttgcatcagaaacctgtcctgatgtagttgatactggctgtgatcaagatcaaatttatactgtgtatacttgtcgcaagagttagtatcgtctctgtcttctttctctgctgaaaccaagctatagctcagcacactggaaggaacatggtgcttggagatgaactgcctgccacttagtagctttgtaatcgtgatcaacatagtttctgtagatgttttcatttcatataaaatggagcgactttttcctacttgaataaatagtggtttgtgggagagatacttctttttttttttttttttttttcatttttttttattaggtatttagctcatttacatttccaatgctataccaaaagtcccccttacccacccacccccactcccctacccacccactccccccctttggccctggcgttcccctgtaccggggcacacaaagtctgcgtgtccaatgggcctctctttccagtgatggccgactaggccatcttttgatacatatgcagctagagtcaagagctcaggggtactggttgggagagatacttctatgtctcatttagtcacctttggcaagctggttagggcatgaattccggttttaatttttcatctataaatgcaaatgtctctgtattacatcatgtttttctgagacccaaaagatcccattgccatcttacatataaaaaattttaaaaagtaactactgttaagaatgtttgtgaaattattttattatagtctgggatatttttgtgctaattaaccagataattaaaaatatgctgtagctttagattagtaattgatttgttatatggtgagacatggtctagatattttcagcttcctttccaatctcagcttctccttaagcttctacttctgtgttgggtactgagctgagtttttacatatgctaggcagatgcactgccactaagctgcagtccagagctcctcatttatattctgaaatttactttcatattcataaaacttgatgtttttgttagaaaattatataaaaatagacttattacttggaaatagcctttttttggtggctcacacaaaaccatttatgctcttgaattaataattaaacaaatggcaggcagtatgctttttttttctttgcatactctatgaggagtattgtaacaagcaggttgtcctgaaaaggtctccctttcccattcttttgtgtaatgatatgacttggaaatatatctttacaatcttttttcttacatggatatataatagttggcactgctgagctagaaactgtttttgtgtgtgtgtatgtatgtgtgtgtgtatgtgtgtgtgtgtatgtgtgtgtatgtgtgtgtgtgtgtgtgtgtgtgtgtgtgtgtatgtatgtatgtgtgtgtgtgtgagagacactttaaggttgttcttaaggttttggcactttcccttagaccaaatactcttattttattcttttgcatttaagattctttaaaagttctgtgattaagattctttccttattcttgaaatagaaattattttaattgttctgtactttttaaataaagaaatttatttttattgaatatttaaagatacaaagaaacaccagtgatacattttcttcccccttttatacacatatacacttataaataaaattttggcgtgtatgtaatatttttaaaacaaaaatgtttcaagtaaaaacaaaagaatattatgaagaaattatggagaactgtcctgaacagtatacatattgcatttagaaactttatataagtgccttgtgcatgcctatctttctgatttgttttcttgccatgatcttaagatgtttccaacataatgctatttattgtttgtgtaaatataactcttgtttttatcacttttgaccctgctatatttaatccattctcctgttggctgagttttggttactttcagtttccactcttactaaaaccctgtgacaatgaatggttttatgcacatgtccttgtgcttagctcttctcaggagaaagctcctcccacccccaagatcatgctgtataaagtgccatacctatctgcctgcctgcctgcctatcttttctttttctttccttccttcttgattttctttggatttagggacagcatatttggagcttactacactggcttcaaatttgaggcagctctctggagtcctttaagtgtgagtacctagcttagttctctaaagtatttctattcaggtttttgtagttaaaaacgtaggagatatttgtaatgtactcctcttttcctttttactttacagaactagtttttaaaaatattttgttggtattttatgctttgtgctaaatgtttcattgagagtgtttcaatttttcattttcagattttcatttaaagcttaaaataccttagtttttaattcatgttattaatttacacaaaagtgatttttatgatatttatttctggttgttttctctattctctttcaatttgttgatttgtccctcttaaatacttttattatatatactcttaatgattgtaactttataataagtcttacaatatagtagagtgactcactttttgtgggacttattggttatctttgtttgatattccatattatttctattcacatttcacctgaattttataattatcttttcaactttcatgaattcttttctatagaaaatatttgattttgttatattgtactatttttataatgctgggtttatttgtggacatttttactgcttaccagataatttttactcttctggtacaaaaaaagtctgggtggactttggttagggacatggcgtggtgtgtgtaaaaggcattgagagtagttaacctgtttgtagagcagaaggcttgaggttatggagccaggcagccaagtttcactggaggtggccctccgagctgagtgctgagcagagaagagccttcctactgagctttggatgacgaattctgtggaagttaatgtcagtgtttaaactgtggagacttcggcatctcaatcacagagtcaaccaacctgttccatctgacacagaaatctgaatatttctagtctccttattctagtcattagaattaagttatagtttagagtactatttttttctataaagaactttgacatgttttgtaggattcacttccaggttttataccttttttttgttgctgttgaacaaaagcacaaatgttaatatttccattctcgcgtatctaagttggcttctttactctgacctgtatgcaacatgaacttcttgctccacatactcttctcatagctattatataagctatgaaatactgccagttaaaaaaaatcctgtttatttactgcattttcatgaacctcagttcagttttttagaatagtgtgtactttttgtgttgtccaggttttgcacgcaatatcatatttgctttagattttacagagatatattttgtcagagtggtaatttccttctatgctggttgctttcaaatctacatttataaactctgctctgtgatactggtggtttctgtattttccagactcctctacggattagtttcctgttttaaggctcccctttcctagagtttaggaagaacccaggggcttgtttatattacgcacagactccatcactgactgcctttagcttttcatctttagatttatgactcaccagaaatttatcttctttcatgtttggtgtgatgaagtaggagttacagtttgttttcccatagtacaatgcaattgttagtgcagttcgctgaaataacaatatttacttactcatttcattcataactttgttttaaagcaggtgacttgtacaagtttacctcttaaggactttttgtattttttcaactggtctgtttttgtaccacattgtacttttaattattggagtttttggcaaggtttgaaatcttgtcatataaattgtttttcctctttggcatcaagaggatgataaatactggcatttttttctctgactttttcttttttaatcttccaggtcatcctttgcaaatcttagtcctttgtagaaatggtataatcaggcttttacttagtattctttaaatacttttgagttgatattggatagtattttctgtagatcagtttgaggataattgacatgttgttagtataaattgtaactcttatctgagaggcttagaaacagataggatgtttgatttttgtttttagattaaaaaacttcatgtatttataatgtggtagcttatggatgagacccaagtcttccatttacttatacaataggcttaataaccgtgtattttgactgtaatccatgttagttcaagtgtagcatcagtagtcttagagtgtggatttcagattttaaactattagatgaagagatttgttttattgtgatccatgattattgtataccctttcagttttcctcagtttcttacagcacagtacattttggttttctgcttagatgtcttgcataatttcctcttattttctatgtacttgtcactaaaaagaattttctcaagttagataaattgacacagtcttgccctacaactcaacctggccttgaatacatgttctattgccctagcctcctgtgtgctgcaattgctagtatgtgctatgtgcctggatcacaaattctattttttaatgatttgttattggtatgtagacaatcaactgattgttatatattgttattctagtaatatatctgtagattaatttttattttctgtgtgctaatataatcttcagataatgaaaatattttttctaatctagtgtatgttatttatttttgtcttttttatttattttctacactctatttttgtcttattttgtataaaatttgcagcaaacattttagtagatttatttatttatttatttttccagtgctagagattaaacttggggccttgcaagtgctttaccactgacttacattcttaggccttgaatataattcttcttaaaaattttttattagttatttatttacattttaaatgttattcccctttctggtttcccctctgtatcccaacccccgtgcttctgtgagggatctcccccacccaccaacccactcccacctcaccaatctagcattcccctacattggggcatcaagtccacaggaccaagggcctcccctctcattgatgctggcagttctctgctatgtaagcagctggagccatgggtccctccatgtgtaccctttggttagtggtttcgtccctgggaactctgggggtcggggtctggttggttgatattgttctttctatggggttgcaaaccccttcagtccttcccctaacttctccattggggtcccagtgctcagtctgatggttggcttcgagcatccacatctgtattggtaaggctctggcagagcctctcaggggacagccataccaggctcctgtcagcaagcacttgttggcatcaaccatagtgtccgggtttggtgtctgcaaacgggatggacccctaggtgacacagtctctttgtcctgcattttctttagacaggaacaattctgtgttatatttttgagatgggtggggatatatatatatatgtgtatgtatatgtatatgtatatatatatacacacacaccccatataattatatttttaataaaaagatttatctttgttttgtgtgtgagtgcatgcctgcatacatgtatgcgcaccattgcattcctggtggtcacagagggcagaagagggtgctggatcccctggaactccagttacagatggctgtgcgtttccatgtgggtgataaactaaacccaggttctctgcaagttcagcaagcagtcttacccactgagtcgtctctccagcgtctggatggagttgatacgagtgaactgtttccgtgttgttcctcagatgacggagaatgtagttagtattttatcattaagtacaaagctgtaaattaaaaagtaaaatccttatcagattaaggctctctttttaaccttattcaacatggataatttattcctgtcttattaacctggtaccttttaaagatatattgaaatactacaggatttaaaatttttaatcctgctagtatggttaaatacaatgattttaaatgttaaactttttaagaatttttgaaataagccctcctttagcacatgatgtattattatttttatgtaacactgtctctgctttgttatttgacttacagtttttatttgcttttgtgttcaagtaaaatacattttatttactgcttttttgggatatacatacatacgtattgtgttgtatgactataactttatacagtgtatgttatctcttactctgggagggattactcagtaggtaaaggaactgccgaccgtgacaagcttggatatgacagtttgatccctagagcccacatggtaggaacagagaaccatttctagcaacttgccttatgacttccaataaatgtgctcttttgtctgttggcacatgggagttctcaggcctggcttagttttcttttggtggtggtaaatggaggtgttgatatccagtgtacgattcctgttgcctgtgagattctacagttactcttagctgaaaacttgttctgaaactaaaagcttgggtaaatgttttattcatattattaagaaccactgtaaccatagttgctcttgaattatgactttggctctagtcacctcttcaaacagtttgtactcactctggagtatttttttttttttttttttggccatgacagtacttggtgatttttaggtgatcctacctgtgttgctgctattctcagaacatgaatgaaaccattttttcttgtcctttaacaaaagctgaattgctagtctgtacacatttaaagcttgtcactggtggaactagaatccatatacaagtttgctcttaactctcagcctatttcacagttccattgggccagtctcaggcccttctatgtacagctaccccctgggttgcaacttttgactccagtaaaattttttgtctgtctctgtctttccctttgtctctgtttcttcctctttcccccctccctctttccacctcactttctttccctctcttctccttccttctcccttcccctcttctttttccttccttccccttccctttttctttcttgccttccttcttggatttcatatagttcaggatggctttgactttctggaatgacaggtatgtgacactatacttagctattagatgtgattgttttatgttagatgatattctgtaatggttaatattgtcaacttgatagaatttatagtcagccacctgggagacaaatctctggacgtacctatgaaggaatttctagattaagttaaagtgggaagaagacagatcctaagtgtggatagcaccattccatgagctagggtcctgagctgaataaaaatgagagagggctggagaaatggctcagtgtttaagagcatatactatttttgcagagaaccgaatttggatcctagcacccattatgggtagctcacaactaccaaccagctctatgggatttgttaccctcttctggcctctataagcagtcatactatatgtgtgggcatttgcatgcatgcacacacaaaattaaaaaaaaattaaagtattatttttaaaggagaatgtgagctgagtaccagttttcattattctttgttttctgaatatggattcaatttgaccagctttattatactctttattaacatgtctttcctgtgttgatagatggtgtccccatactgatatccaaaataaactcttccttcccaagttaatttttgtcatgtattaaatcatagcaatgagggaaaaaaaagtcctttccgactctgtaagtatagtaaagttttttctatcttttctttctttttgatgctgaggtttgaacctaggtttttgtacatagtatatgctgtgccctatactatacctgcagccctctaaatctatcccctcccagacagcctcctttcttttttttcatctcttcccatccatcctcctttctttaaacagggtctcactatatttcaggctggccttgaattgtttattcttttactctttgagtactgaagttatatgctctatcatgcttggctcaaatctatttttaaaaggtttatttatttatgtatatgggtacactgtagctgtactgatggttgtgagccaccatgtggttgctgggatttgaactcaggaccttcggaagagcagtcagtgctcttaactgctgagctatctctccagcccctcccccccatctatttttaatcacatttcaaaatctatttttcccctcctaggcttggatggcagctaagtgagagtttctaacagttaattgaactgtgtgtacttgtgctttacatgttttctttgtgttttatattacaatgaacaaatcttaaagactccagaaaaaaattaatttcctacattcttccatatgctaaaggactattttgaatagattaaaaacttgaatacagaaagcaaaatcataaggtatatgaaaatatagataaatatgttttaggtctctccaaggctactgcttaggttcagtacttcagagtctaggaggactcaatgcactgaacaaataatcgtactctcagattagctttattacagtgaaaccaccaaagggaagaaaaggtgtatggagtgaatctggaggaaaccatgtgcaagcttccaagacagtcactcaaaacaggctttcaattcctagttcctgttccattgagttcatgacatgagtgaaatggtatctactagggataatcatcactaggattatcattagagattcagtgtcatttttgtcatttggagctggtcagattgacaccttttgcccaacatgtaccacaattctccaagaagtaaagcttgtgtttatcataaagtacattgtaaaaccaattcagatgtggtgagtcattcttacctgaatggtgagaatgctcttgcccatgtttccagatatcagttagctctactatgtttttttcccccatacattgtaatttttaaaacaataatcttggcatgataaaaagaattctaagcatgaaactaaatatagccataaagtaaagtaatggcaaattgaactgtatttaaacagtgagatctggaaaagaaaaaaagtcctatagaggattagaggggaaactgaaaagtgatttatttactatatgggggaaaagtggaagttatttgtcaaatatgtaaaagctcttataaaggccagcaaggttgcttagtggataaacttgctcgctgtgcaagcttgatgatagcattttgatccccagaacctgcataaaggtggaaggcgagaactggctccacagagttgtctctgacctcgacacctgcattgtggcacacagctttccctccctgtcgtcacctcctctcccctctctcctatcttctctccacctcttactctctcacacacagtagtgataacaaatacaattaaaccttcataagtcatcaataaactgagcaatgggtttgcatacctatactccccagatgtaggaagctgaggctggaggattagtttcattgtttgcttaaggcatattgtgagttttgaaatgtatatcttctatgctatgtctgtgtaaaatctgaaaaattctgagttatatcactctaaagggctaagatggaaatttatgttaattaaaagagggaaggcaggccaggtttggtagcacatgcctttagtcccagctcttggaaggcagagataggcagatatctgtggcttcaaggcttgcctggcgtacagagatccaggatggtcagggctctgtagagactcagactctaaacaaaacaaaaagagcctgtctcaaaacagtaaaaagagaaaggcagagttacaaattaatatgttatgttccagggttgagattatataatattaatatatgaataaaaatagctgtgaaaaatatgtccccagtatttgaattgggggagagatgagccttcttgagtgaaatgcttgctgtgcaatagtaaagacctaatagagatccccatcacccacacagaagccagagggtgcaaggagttgtaatcaaatgctgggctgacccagcaatatcactggggcttactgatcagcgtggtgcactgaattggtgagcgtcagattcagggagagacttttgtctcagaaaatgacatggagagtagtggaggaagataactgtcattgacctctgacctccacacacagtgggtctgcacatgcatacaccacacacacccacacacacatgtacacgtacattgaatcaattacttttcctgttgctataataaaattcataacaaaagcaacttgatgaaagaagaaggcacacaggatttgagacagctggtcacattgtacctacagttgggaagtagaagtgagtggccatatttaactcactatgtcctttttcaacttgggatctcagtccatggaatggtaccacctgcattaaggatggagtttctaacccatgtaactaaatttagaagctctttcattgacatgctcaaacttttgtctcttaggtgattctagatcctgtcaagtagacaatattatgtctttctgtcacatatgcactaactctcttctccctcccatctccccacatttaactgattgtttaaagagaaatagtaatgtctctaattttttgataagcaaaacagtgggagtttgagtagaaaacgtgaaaagatggagcttgctcttgtctcaaattctgtttatcatctgttagaatctaccatgataatttggagagtatcacttagagctaatagcttatgaaagatgagtgagttttagatctcctctaaatcttcagaacatatggttctctctctttctctttttgagaaggtccttttatgacatttgtctatttttgttgccataacagaatacttgagactagataatttataatgaaaagaaatgtctttcattttcttgcttttttttggcccctcttcttgagacagaacctcacatatcctagactgaccttgaacttgttatataaccaagaatgtccttgaaattaaaatcctacagctgacagctcctaagagccaccatgtttgatataatgtggtactgagctttctaccagtgaatccatacacactctcccaccccagtatcctgttgtttctgaaagctccatactgagaggctttcaaatgttgagtttttcctttttctttttttatgtcataccacgtggaagaatagaagtgcaagagggtcacaatcttaggaagaaaaatacctgtatgttttccctcatatgtggatcctaggtgtgtgtgtgcgcacatgtgtgtgcatgtatgtgtttagggatgtacttatcatatcacatgatcacatatatggagttcaaagacaacttgcaggaattacctccttccactttgtgatcctgaggctcagctcaggttgtcagtcttggcagcagtcttggtaccttttccctcagaaccttctctgtgtgtgccctaccctctctttaagctagattcttggtatgagtagggtggccttgaacttctcagcatcctgactcagtcttcatcatgctaggattacaggagtatgttaaccacacccagcttgattagcgtttacttaaaagtacattatgtctctaaaagatgacctgattagttgtacattgatcctttctctattgaatgtggaagatataattctgcctgcttgagaagcagtgcccttgtatgatgtttggtggtttttgtattatcacattgcattacaaatgagtatattaaaaataaccacaatatatctccctttttaactttgtcatagatttttctaggtaaatttgttaagaaaatttaactttttgtcgtgtctgtggacagttttctcctgcctaagagctgtaatgcactgaagaatatgcttgttacttggagctttcacagatgtagtggttgaattcaacattcctaaggagcaagttctaggacagccaaggctacacagagaaactctgtcttgaaaaatgaaacaatttttttttcacaatagcactccgtgtttattaagtagagtcatctggtccagtattcccagagtttacctgcccacttttgattgtttgttttattttcctttcttcaactaaacttgaactttacttggaattttactaggtttttaaaacattttattgattctttgtgagtttcatattgtgtaccccctcctgctcatctccttgtcccctcatatctgcccttcactcttgcaaaactccccaaccccccaaaataaagcacatacttgtgctcgagcacacgcacccccaacaaaaccccaaagcataaaaaacttatctcggaggaagctgtactatgtcacagtgtgtcccacagtatgtccctctgtctacacagcttcacttgtaaatagcttttgcagtgagtcattggtctggttccagatctctggcttctgtgacaccatcaatattggctcctcattgggactcctagtggttatccagtttgcattttctgatgttttaccagcaaatagacttggatggtaggttttagaatgaatacaagagtgctgaaatgtctctcttgttacatatcatcatgcacacattatattgggtgagagcatttttccattgtaaagttattatttccttctgttctaagtagtaactaaatccagagtaccctgaaaagagaaagaggaaggaaggaagctatacttcctttaggaatatattattttgagttcttccataagaaagacttacctttccctttagtttattgacatcaataaagacctgtgtgggtttctagtttggctttttaacccagccatatactatttattgtgttctgttagtccagtgtagcaggagttctttcaggttgatttcaatacattttttatattttcatttcatctctagtactataagatgtttcaggctcccttttaaaaatcttttttcctgtcctaagctctagtattcccaagaatctctctccttttattactaaattatatttaaagtaagattcatgttggatatagggtttatatgtttctactcgggtgttgctgcatttgctttttcagagctcactcattgatggatctatctactttctttcacagatggagtatttgaggtaaacaaaaaagttaatcttggggctggggagaaggctcagcagttaagagcactgttcctcccagcacccatatggcagcttacaactgtctgtaaccctagttctccgggacctgacacccttacacagacagacacgcagataaaatagtaattcttagtatctgttataacacttgcctaattaccagtcagtgggtagtcttgagtttcatttgtatgactccttttgcctgtcttttggctaaccttattatttgaagtaaatttcagtaactgtattagttcatctgcatattttttcgtttttatcactaagtaataaagacttttaaaaatacattttaaaattgaggtgtacttggcatgatgcactaatcaagatataaaatattttcagctcattcttactgataatttttgcaagtgatttgtgtgtgtgtgtgtgtgtgtgtatgtgtgggtgtatgtgtgggtgttgtgtggtgtagtgtttgcccgtgtgtatttttgtaaatctgtaccctcatgcatagggagaccagaggcggttttgagtgttttgctttattactctacgccacactcactagagatacggttgttcatcagcaggcccagtgcttgttcacagttataggctgtaagtatgcatgtgactgtgccaggcttttgcctgagttctggtggtttgaactcagatcttcatccttgtaagagtttttacttgtagaggcatccctaactctttttgagacagctagttatcttgtttcacagaccagcctagcctgaaacttagagtgatcctcctgcctcagcttttcaaatggtgagattacagtcaagcaccactgtgctcagtgtcactcatagtttttataagagcctttgagaaacaaatatttcattacagcaccttttttttttttcttcagtgctaaggttcaaacctatggcctcataaatgcctagtacctaaaaaattaacagtaatttgcaaccaggtgtttggcattctttcccctctgtatatagtacattggtcaaagatacatggtggcttgtttaataattactatctacattttgttgaacacatccccatagtcttgtccaacatggttctcactctagcttccctgtgggatacttgtctcggtccccacatagtagtggtcagtgattctgactttggagaaacttcatcagttagtccctgacatctagtcaaagttcctctgttgtggtctcctagctaggtttagatcactttaaaaaacaaaaacaaacaacaaacaacaaaaaacgtatatcttttcttaggacctaactccttcaggaagactaagtaactgaattactcctggttattctcctttttagagattaaatgtctagagacaggtgtacatgattagctaagagacccttttttaatagtactttctggtgtgacacagtcatttgtgtatggggctagtctggtttaaattcttgactgaaggatctgcagtacagaaaaaagaattaggctataaaaataggcttgtttatgtttggtttgccaagttctcttgttttcttttatattatagatcagctcgaacgggtctttttacgacttggccatgctgaaacagatgaacagttacaaaatattatatctaaattccttcctcctgttctgctcaaactgtccagcacccaagaaggagtacggaaaaaagtaagcatgttggggaccgtttggggaaataattgatgaataagtggatatatatatatatatatatgtgagttttttattctcattgttgaaatgtaggttcctgatcctaattacagctttccaaatgtatcgtaagtctaagaactcaaatgcctacctagtacagctgctatcactacttgtgtgcttgttaccagtgtcaggtaatttaatcaagataattaattacctggactgatctaaaaccaaatatgaaagccagtttagaaaggggaaatagtctttaatcatcagttgatggtgaatatatccttaaataaaggtaataaaggtgatcaaataaactgaaaacgaactgttcttatataacttacatccttcaaaatactgtttcaaaaagctatgtaattataatatcactattttatttttaaattattgtatatggagcactttgccctttaatttgtaacatagtttttttttttttcccagtatttttgtgatagacctggtcttttagctgtcatcaggtttcatctcttgtgatactataataggttgacattgacttgactgtcttctctaagagactctgatttgagttcagtggtaaagtatctcccagaatgtctttgttgcaggaaaggatggagagtcttgccatacatatacttgctattttcatttgctgttaatccttatttgctgaggttatgccattttcctattaaaacctctcagtggatttttcttgctttcagggtaccaaaggccttttacaaattgatgtatatttacttattgttatcagtctggttacttactgaattatgatttgtggtacctgctgcatttgttttctcttgctctgagacaaaatacctaacagaagctagttaaggaaggaagaatttattttggttcagagtataaaaggatagttaggaggtataatagtaagaatatgagggtagatgctcatattgtgtccacccagtaagcagagagtgcatgggcagggaggcctgtctatataatcagaacacttgctccccagtgaccaacctcactcagtgagacggcctctctaaaaaggtttacttttcaaaacaatcgctagctgtggaccaaggaataaaatatatgggctcataggaggacattttacttttgctaagagtgaagaagaaaggagtagatgaaagaacatgaggacgcggttatcgtggatgggagagttcttggttaataagatcaccaggttaagagatggtggacagaatgtgatcccctgggaactaaagaggccacggtgaatgagaggtagggtgaggggcaggaggaaacaggattctagggcactgatttgaaagggtgttagtgatatctttacttggctgctggagatatttagagtggaagccaaaaagaaggagctagagaaccatcctttaggctgagtatttttagtacattacaaaaacaaacaaagaaacccctaaaaacccaaacttgtttatataagatatttttatttctttctactttatctttttttgggtagacaatcatctgttcctatcacctactaattttttttttaaagatttatttatttattatatgtaagtacactgtagctgtcttcagacacaccagaagagggagtcagatctcgttagggatggttgtgagccaccatgtggttgctgggatttgaactcaggaccttgggaagagcagtcgagtgctgttacctgctgagccatctcaccagcccccacctactaattttagtgccattgagttctgttatactatttatcctattttcagttgggactttgattcttgttctcaggtttccctgtgtgtgtgtttacatgtttgtatgtgcatgtgatcacacatttaatggctaaagattgatgttgggtgtctgtcctagttgtataccaccttttaaatatgtttaaatatttttttcaattttttattagatattttcttcatttacatttcaaatgctaccccgaaagtcccctataacctcccctctgccctgctcccctacccacccactcccacttcttagccctggtgttcccctgtactggggcatataaagtttgcaagaccaaggggccctctcttcccgatgatggctgactaggccatcttctgctacatatgcagctagatgttcaaatatttttaaattttcattttgtttgcatggttgtttacctgcatatatgtttgtctgttccatgtggatgcctggtgcccactgaggctagaagagggcaatcagatcccctgtaactggagttacagatggttgtgaaccactaagtgggttctggaaattcagtctgggtcatctaaaagagcaggttatggcccccatgccatctttccatccttttcttaatttttgaaggatgcatgatctcttaccacacctggacctcactgatttgactagactggctggccagtgagcctccggggatcctactgacttcatttccccagtacaggtatatgtggcatcatgtccagctttttttcttttaaaaaaaaaaggattctgggaggttgagctcagtcctgtgtagctagcactttattgattgagccatattctcagctcttatctcttaacttttattggttactattatcaaaattatactatggtttacttgtttgcttgcttgcttatttattgattgattgattgattgattgattgttctggtctctaacccagtggtttctacatgcttgacaattaatatgccactcagcctagcctgttttaatttgagctttttttaaaaaaaggatttatttattttatgtatatgagtatactgtagctgtcttcagacacgccagaagggtgtcagatctcattacagatgattgtgagccaccatgttgttgctgggaattgaactcaggacctctggaagagcagtcagtgcttttaacagctgagccatctctccagctccttaatttgagctgttttaaaagacaaaccagtgattaggtatttcttcttgttaattgcatttttctgttttactcaaattgtttttctttttctcatataagatttttatctatatgatagtgtaataatggttatgtgttaagaaaagtgctaagaagttgtaagtttatatagggtaatatgaactagttctttcttttctacattttacagatgaagccaagtttagaatgatcaatgaacttttatttttatttgtgtttatatgtagccctggctagcctggaagtctagacaaggatggccttgaactcacagatctgtgtgcctcagctctcaattgctggttttaaaggtgtgtcccactaccacccagctcaattattgattccccacccccctactatttagccttaactgtcccagagttccctctgaagactctcctagacgctgtagactttcctagagttccctctgtggtctcaaactcacagagatctgcctgcctctgcctccaaatgcttggattaaaggcatgcaccaccactgcctggctagttaatgaatttttaaacgatcaaataatgaataggtgagccaagatttaaaatttaaaataaattttctttcactaattatgttttcaagaatgctcaggatgaataaaagcctgtttatgaacttgtctttggtgttctggttataccttagagttatacagtatgcagtgtttgcttttatttttgacttaattattagtaagaacattggttttagttttgaaatatttgttgcaaaagtttccttattacattgtggactgagaccactgtaaacttttttttttttttggtgtgtgtggtgtgtggtactttggttagctaccacgtacgggcttttgtgtaagagaagcatgtgttctgccattgacttacatctctgatctaaagtgtattctgtgttctgagaaaaatccttcataagattaaaaaattatattcttgtttgttgaatgtggagttgagcatgccctgagactatttgctgttaacactctacagttatatcttgagaatctgtcttctagtcttatatattggtagttacagattacagccttctctggttgtagttttcctgtttaatatttttgatgtacaagtttaacattagtgattatagtatgttacatatatttatgtatatctttattagcaaagggatactgttaagcaaacttgaaaactcctgggaaaaaggaaacaatagttaaagctgatagactttaacattgtgccactcagatagatcttttttattcaatcctgtagctttgaagaattgtcatttgagtccttcagataggaaaaatgatcctgaaattaatagtaatagccacaattattggttagtgtctcaatttaataattctgtgaggtataggtgctctaatcattcctattttatagatgaaaaaactgggactcaaagtaagttgccttatatcacatgactaacaatatactttataaatcgagacttaatagataagtaatttcaaaattaatctggcttctgcaaggtactccttctgtgtaatggttacacatgttaatttttttttttttactatatttacaaaagtaaatttaattcatccaaggccagccaaagtaaatagagattaaaaatgactctgaaggaagcagtagaactttttttgtgtggtattttgatttttaggcagtggagtcttgataggtgtttttacttttatagtatatgttgttcactgttatgccttataaattttagaactagtgtaataataattgtcatttgaatggtattgctaataaaagatacagatattgagcacaaatttataatgcagttttcctctttcataactatataaaagagatcttggatttatttatttcttttagttttttaggacaggggttcactatgtcacagccctggctatcctggagcttgctctatacaccaggctgtccttgaactcagagatctgcctgtcactgtctcttgagtgctggaattaaaggcatgtgccagcactgcctggctagaatgcatttttaatttaaggaaaatgagagttgctaagtcgaattccgttataattaactttttttggtaagcattattagaatagaaggaagttaatgcttgactgtatttgatgttagctagcaagtctgtagaacaacttgagctcttaaatactactgggagaactgaaaattattatgctcattttggagagtaagtgaaagcatctgttcaaactgggcatgtgcagaacctactgaccaaacactttggtcttggatttatatccaacaaaaataagcacatacatataccaaagggcatatctaaaaacatcgtctcagcattatatttagtcactcaaaatggtagctttcactaatgcgtgctttgaggcttcagtgcatattttagaagtgatatatcatagatgcagcccttaattaaaatgttcagtcgttcctttgggagagattaaaaaaaatctcatttctcagtgttcattttcttcttagtacataatatattggagtaagactgtagtcatttatcagaaacttgtctattttcctttcttgccacaggaattgctgatgtgttaatttctacttttgtttctttcccattttaggggaggagggaggttttatgtttttacttaaattctcttagtggttttagatgatttttcaggataaaataaacatacttcagtgttttgctaaactctgttataatccagatcctaattttatgaattcttaccactctgggtttcagatagatataatttgccatattctattaggtccagttccttttctgaaaccaattttctccttgaaatttattccctagaactcagtgttcctactacattttcttacaagtacgcctatttggccaaccaagtatatctagagacagtagaatcttatattttacattgtaataatcttggtatcttgcaaaatgcagatactgtgtttctgattctgatacatccctttctgcgttataaactttatgttccttaaaagaaagaagtagctactttccactaagacaagtaatgtctaagaaatgaatttatttttaagatataattgataattctagttctgtctttgttttaggtaatggaactgctggtccatctgaataaacgtataaaaagccgccccaaaatacagcttccagtagaaacactattggttcagtaccaggaccctgctgcagtttcctttgtcacggtgagagttagtttggaatttttttttgcggggaggggggtttacgtcagtcttctcagtgtttagttgatgccatcaatgtatattggcaaacttaaaagtttcattcttagaccatacctaactgaaacagttgttttttttaatgctgtgttattttttcatggagtactgattcacaggtaatgctgcttcaaagaagttataggaacatggtaatgaatggccatttattgggcaaagaaatgttggtgaaatgactgtgaggtatttaatataaaaaagaatgattttacttatacagaatctgaacaagttaatatcaaagacattaagagtagagtaccgattatcagaagttgggggaaaattaattgctaggtactaagtctagagaacaggaacttgtgatgtgctgtgcttgcccagttggaatgactgtaggtaatgggtactttatgcaaacaggtgtttacaggcgcccagtgtggtgtaggattgcagttcctttggcttgttaggttgaggcaggagtattgcttgagctcagaagttcaagaatagcctgaacaaattatgggatgctcttcttgaatatgaactctgaaacaacaaaataacttacagaaagctagaaaaagggctttcaaggtcttgccttaatggaatgatagatatttaagggtatgtttaacctaatagaagcaacatataatgtatacatagatttaaatgtcacattggtactctataatatgtatacttttctaaaaacaacttggaactggggattaagccaagggccctttgcgtgcaaggtaaaccttctactgagccaggcccctacccaatgcatgtaattgcttttatgtaagtaacagtaattggattcttagtatctgagacaaatctgaaaagagagaagagttagcaatactctttctgatgtgtgtactcagaagctatccttttttgtagtggagtaaatctgagactggcaagtattcctcttcattccgtttcatgaaaacaaaatttaaaaaatgttgatgttaatatgatgacagatagtgtttttttctggctcttgtaatttttcacagtggggcaaaatttcccagattgttttatcaggagtcacagttttatttggaggtgctgtgtctattttctacatatagtttcattataagacagtatctttcctttaagcaaatacaaatattgaggtcaatatctatgccaaatagaaggaaggccttctgatgcctgttcatttctgtgaagaatccttcagattagcaactatcttatttctacatctggatttatactcatgagtttacttgagttgtaaattttgcaaaggttgtatatagtgctactgataacatctgcagccctcagtttccctggattacctgccatccattgctgagttgttactggattgagggaccacatagtgctgcagttcctaagatggttttagtaattgacctgtgaaatggaagcttgggatttgttaacatgtgatcttgggttattgcagcaaaccgggagatctgctgataatgtgtattataaaggtttagataggctaaatgccttttttcttcctagcagtagtaattgacatgtgactgtttctggttaagttaccttttttacataaaaagctgactttaaaaagaagttgtgcttagggtcttccccgagatgagtaatttggaagctgtaataaacagaggatgattcttgtgatggttgtgttataagaataactttctgtaattgaatttttccctccatactcacttgccttctcttactgcattagaattttactataatttatgttaagatgggctatcctcgcctgccagtggaaaaacaatgtgagctggcccctacgcttcttactgccatggaagggaaacctcagccacagcaggataggtaaggcttcctcgcttacctgttcccatctgtaagagtcaacaacttttgcctttcagatacaggtcaagtctggttttacttggcaactggaaaggcttgggcttgtttacctgaaggatagttgaattttctatgatattttagttactgttttattagtggcattataaagttcttcatatgaacacaaaaaaatatgtaagactgacactttcctaaatttaactgcttcacgttttttgttgtctttttaaaagtggttgttttatgtgatgttaaaaatctatttcattgatttgttttcctttcatctcatctggagagaaggcactgttgttaagagtactgtctgctctttcagatgacccaggttcaattcctaccaaccacataatactcacagccatttgttaactccaattccagggggtccagaacccttttctggctctgggcactaggctatctttgtcgtgtatagatttggcatgtagacgaaatacccatgcatgcattaaataactaaaaagaacatttttcattaaaacatttctgtcttgatggataaaacatttctcaacaatttttggaagcaatagggtattattaatataggcactggaaaaaaaatgaaggccttttataacatcatttatttgtgggcttagagaaaatatctttatctcacatctgtcaattagaaagtttccagttctggtttacttatcagtcaatcagttgtttgataatggtcttggggatcaaatgcagggcctcagaagccttgaataaaagactacaggtgtttacaatcaaattaataattgaagcaaatttttattgaaagaacatgttgaactttacttttatctaaaatgtaacatgaaccttctagtaaccttctggtaaaatcaagtttattttatatacatttttccagattcttaaagtgatgaaccatgttgactaagagccagttatcacttaatactttgagatctttgttcaaatctttgagatttgttgtttttgtttttgttttattttgagacagtttctctgtgtagttctgtgtgtcatggaacttgctctgttagccagtctgatctcaaattactgagtgctagaattaaaagcatgtaccaccaccatgcccagcttaatatttgagtcttttatttttatttgtatttttacattttttgagacagagtttctttgtgtagccctgggtatcctgggactaaccctgtcaggctggtcttaaactcgcagaaatctagctgcttctgcctcctgagtactagggactaggaaatcaaggctactccctaaattaagactttgtccctaattggtataaaaaatgaatagctcctgatataattgccaatttgtattaagtatatcttttatttgcgtgtataaaaatcgatttataaactagctgcaataaatttaatttttctttcagcttaatgcatcttttaataccaactctttttcacatgaagtacccggctgaatcatcaaagtcagcttctccttttaatcttgctgagaaaccaaagactgtgcagctgctcttggactttatgctagatgtccttctgatgccttacgggtgagttaaaaatgacagagagccaagcagtgttgtcttgagagtttactctgtggaaattgtatgctactttaaatggctcagcttatgtgtgatgcatctctgaggatttgcagcagtactaaatgctaaagtccagctctgctacatattggctgtatagatatagtaatgctgttgtcatttttagatttcaccagtccccagctgaagtaaatgttgagtctcctagctctgtgtaccttaggaaatcaggaaatcatatccagttttccttgttctgttttccttgatgtcttggaatttcttttgcacttctaccatttagtagtggatctgtttggctcttcctacaattttgttctcatagctttgttttttgattcactttctttagtgtacaaaatgtgatttacattctacaggcgtatcattggactctgcttatccctctcatgtcttcaaacagtgctgtagagttgcctgatttttagcacagattttaaagcacatcttagaagcatgggttctcagtagccatcattacatgtattcagtgattcatactcccctccaagtacttccaccttattctttaagataatgcagtactttaggatatttctctacagagaaacaaagtcaccttggaaaatatctcttactggccagatgtcaactcggtgtctgctacagacatttcttattttgtgtagacatatttgctctattttctgtgtccctcatagcccccaagaactacctgtgtagtactttgtgtttttatcacattgttgacatcttcctctttcttaacggtttttcagccccttgcagtgttttatcaggcttttgaatctggtttccagattgtggtctgacactagcctactgatttggtcttgctgctagagatagtttctaaactgctacttttactctgttttcccctgatcttgagggtatatgtacatagacgaccatgcacatggagttgcatagcatctatcctcagtgcagagacaagaaggttaaggctgtatggttctttctcttccagttggctctccttctgcccctctagtttaatagcttgatttttcagggcctttactacaggcaagaagctgaaatagtgaactggaagtggggtgaggctataaactctcatatctcaccctcagtgacttttcttcctccagcagaattgcatcttatggctatggggatataatctcccctagaagcgccagcaattgggaactcctttaaaccaatacagcttccaagcttctcattctttaatgagaattttagtatctattatgatctattatcagtatagaattaatatcagtatagagttaaagggatttcaactaatgtttatataaaatataaatatgattatgaggaataatagttttaattggatgaaaaataaatttattagaggtcttatttctattctacaagctaaaaagtatgtcagataacaataacaaggagacacatacaaggagctttgaatatataatgagaaaattattatttttttttcaaaatttcctacttttaaaactttgttattattctttgtatgtgtacagagtatgagtgaagtacagttctgtggagttgggtctctcacctttaatgggtttcaggacttaaattcaggttgtcaggcttgtgtggcaaatgccttttaaccattgagccatcttgccaggccctgactgatgccttttactttagttttaacttttagaatgttacatgcttgtatgggaggcagtttgtgagaggcttcagtgagttttctaatgtgagttacaaagtaagggaaaaaactgtaaaagctttgtttggagcatagaacaatactaaccataaaccttgtggagtcaataggcatatgtctgtatttgtcattaaaaaatcaaaatgtagtgagtgtaaactaacttatcagataataatatgtacctggaaatggcataaacattttgtagttcacttataactgccttgagtgataggttcttctgattaatttgctgacgatatatatatatatatatatatatatatatatatatatatatatgtatatatatatatgtatgtatacctttgagatttttttttatattgctggacagtgttgctgcatgccttcaatcctagcagaggcaggtggatctctgagtttcaggccagcctggtctatagagtgatttccaggacagccagggctatacagagaaaccctgtcttcaaaatcaaaataagtacaaaagtgatttttacgtggaaatttttattttcgttgttgctctagcacagtggtgctaaaagtgactctttagtagagttcctcatgttttgatgacccctaactgtgatattacttttgttgctacttcataactgtaattttactattatgaatggtaatgtaaatagctgtgttttaccatagttttaggtgacctgtgagagagtcattttactcccaaagggggtgcgacccagaggttaagaaccacagctctagcataatactgttcaacgacagagtgagtgttttatgtatatatgtgtagatatacacaaattcacatgcttttatagagagttaaagttttattttcttttcagatatgtgttaaatgaatcccagagtcgccaaaattcatcatcatcatcacagggttcttcttcaaacagtgggggaggttctggaatcccacagcctcccccaggaatgagcttttatgcagctaaacgagttattggtgacaacccgtggacacctgaacagttggaacaggtatcatcacagctgctctttataggagtactgaccctgaactcttgcccctgtgaagttcatggaagcatgtgcagagcaattcctgtaatttcaagttctctaaagagtatgttggaaaggagcaaattcttttcctctgtcatttatttgttaaagccctagggatggggggagtgggaaatgagcgtatgtctttctaacagtgttcacatctttcaagtactatgcacaacctattttatattgagcaaatttagttttctctcattttaatttataactataggtcttaattatgtagttcctttgatgcagttaaaatacaatttatctttcattattcaatattttagggctgtacattttgtgtaaagtgaggaacctctatacttcacaagtgacaatgtggggaaaagcatgactcccttttatatttcttcttggggttttaaaattggcattaagaattttattctggatttaaacaggacacagatgttctctgagcagcttttaaaaatgactggtgctctacagagaaggtgcctccctgtgtctgtcatcaggcacctcagggaagaacagaaatcagtatgtaattattttggaattcaagcaacatgggttagtcttccaatccttcctttatttctccatagcagtctcaatgatttgatcttttctttttgggaatgtaagtgatcattgacaaaagtgttttcaggagagagaaaaagaagcaaatggggcattcttgccactcaaaatttagtgttctattcaatgagggttataattgattagatttacttcatgcttatacaccttttacctcctccctcctccccttaagccatagtgtgaatctagaaaccactctaatgagtgtgacatgacctatggcaggcactatactgggtacttttagtatactatctcatttaatcctcacagcaactaatgaggtagcgaaattttctaaagctcctttcctaaaaggtatggaagttttgagattcaccagggtctcttttctgataccggactcttagcctagtcctttgtgaggcttaaagctgaatatactggagagtactagttattgctattgttcatttataatcttaagttggtcattgtttgctgaatttaaaggtttctgtatctgttttgtctgtttcataatctggtgctgaaatgaatagtttagctttaaaaacaaaacctttttaattttgaatacttttttccccccaagtaaatcaacttactttctctctctctctctctctctctctctctctctctctctctctctctctctctctctctctctctctctctctgtttttcaagacagggtttccctatgtagccctggctgtcttggactctctctgtagaccagactggtctcaaactcagagtccacctcccttcttcctcctttgagttgggcttaaaggtgtgtgctaccatgcctggctaaatatactcattcttattttaattaaaacatattttttatttttttctgattataaaggtaaaggttttagtagtcaggaatagaattgagggtacgggacatgtagcttagttgagagagtttacctagcatgcataaagccgtggttgagtcctggcactccgtgactaagacatggtgcatgcttgtagtccagcactcaggaggagaaggcaaggaaatacaaggtgttcaaagtcattcttggctgcatagttcatttgagaccctgatttaaaagaaaggaaagaaaagaaaccccctgccctgcccccaaaacaaaacctcccaaaataatgctcagtgatagagcctagcagccaggcttagggcggcgagctcagtccagagcacctcaaggaaacaatagaacaatccgcctccagttctgcctctgtctgtctgtctgtctgtctctcttcctctgtgtgtgaacagttttatagaatacgtttttatttgccacattatagtttagtctttgaagattaaagaaaaatctgtccttttactgcttgtgtaagatttaactatgttttatgttttaacttgtgatttattgttgagactcttgtcatttttggtttttagtacactttcattatgtattgtgtatttgacttttataatcatcccctttgcagtttacgttaatgactcctccacctttcaaactgtatttcttattataattaaattatactgagaaggcctttttgtcatcagctacacttttttattggcattcttttccatttaatttttaaaaaatttctttctcatttaataattgtatattttatcattcctaattcatacatctgagaattattatgtaactggtttttaaagtgaggataaaattttacttttcaggtgtatttgtccctgaatgatgggcagtgaagttcatagctctttcacatttcagaaagtcctttttaaaatctattgtgcttcattgagtatgttagtttaaacactactcttggattgagttgcacttggagtgactagaaatcattttctttatttttagtcttaaaaatatgtatatgttaacagtagaataaaactgaaatgtgagttgttcaaaatgtttctcacaagcatctatcagacactttgttcgtaatgtattgcttctcacctggagatgtggacagagatgttaagtccttatccctctaggaaggtcgtgtggcctagtagggagactcttgttgttttgttgtcagagacttgtctttgaagcctactgtcatcatttgttgtgtagtttaatgttttaagctttgcctcagtttcttcatctaaaagtgtctgtaattatatctacctcatagattgtgagggttaaatgaaattgtgaatagttaagatagttagtgtagtgtctggcacattataaacctaagtaggagctctactgttgcattaatccatggcttatgaccgtgttgttatgttaactagctttagtgcgtgctctttgtttccctgacccttctttctccttcccttcacttatctgcagtgcaaattgggtatagtgaagttcatagaagctgagcaggtgcctgaacttgaagctgttctccacctggtgattgcttctagtgacacacgccatagtgtcgcgacagccgcagacctggagttgaaaagcaagcagaggtaattacttccttgttaagctttcaaaatcaaaaggcagagttcttaaatctttgcagggttttatgaaatgatgtattcagcttaggaaactaggacacattcttagttgtaagttaataaagtttaccaacgagcaaaaatctgtgtccaaaaaaaacctatttgaaaatgtatttcaaagctaaaataggttaggaatgccattataattaataaaattttccgctaggcaaataaactgaaagttaatgttgaaaacaatagacccaagaaataattaacttttgatttttctctcgtctcagaccagttaagatcccttttaataatgaatgtgtatgtattgtggttgttatagtaaaaaccaggcttatggaagaattactgagtaaaacttaaatctacattgaaaagagatacaaataatagaggaataatctttgtatgaaataaaaatcaatggaaaatgagtagtttgtacctatggttaaatacaggtatattgaagtggtaaatccatttaagtttctgaggaagtactgtatcttatatcttatttgagcagtgagtcattaaataaataaatatatacacacacatttatacatacacacacatatacatatacatagtaaatctgggaattcatgatctaaccattcaaaagaagaaaatatatttagaaatgttataactttagtcattatagcatgtcttacagttattgaaaaataaaaacctgaatacctcatgtcacataacccagcacttgagagacaggagcagcagatcttagtagttcagtagctcttgctacacagtgaggtcctgtatatatatttaaaatgtaaatcctgaggtatttgtaactggcttctttgggatggttttgttagatagcttagactgccccaggctttctaccctgtgtctctgcctactgcggattacaggtgtgtgcttccgtgtccagaaggttgaatgcatgcaggttgttaaaataacatttataagacagaaatagcgaaaatgccataaaactttataactgatatatgcattttactttgcttcctctaagaagaaagtgcaaggaggtataataaaataaggaaattaatttaatggaccttagtttgctctattgcagtgtttgggtagataatggcagtggctgagagtggcttccactgggaagcatatgaggtggcttatagcagggcttcttaaacttttctaagtgatccttttgtttgaaatcctttttgtttgagaatttctttatgtgactatggatatatattttgtgattttttttgtttgaaattttttatgtgactgtgtatgtatgaaatagatatggagagcaaacatttgctggtaataaatcaaactcatttaaaacagttttgctatacatacatcttttccatttgtttatgaggaaatcaattttttattaataagatggatagataggcttttcaaatttacacatagaattaaatcttggctggatatttgatactctaaggcagaacatctttaacgtgcgtgctttaggattttggttttataatggttactgctaagaacccttgctttacctactcagcacaaaatggctggaggaaatttaaggcatctagaaattattggaaattctgtcctgatcctatgccaaaactcttgcaatgattttttttttaaagttaaactcaagtcagcaactcagcaagttttaattaaatattctaacatgatacaattcaaagatagactcttttgatatttgcatactaggattgatggtaggaaaaaaagagaagttttattttatgtgtttaactcagtttctataagaggtggagtgtacagtaggaacagtgacatttacaacctgtgctggtccttagtaggtttccgtcatgcttgtgtagtgtggactgatgccagattcagtgcacagtcatcatgtttgcattcagagccaaggctgtggggaagctgcctgacgcaccataagtcagcgcagccagaagcaaacacgggattcattacagttggttttgagtaaagttttggttgtctcatgttagaaactttacttctcaaaatttgttatgaccccatatttagtgatgtgtcgcccacataggagtcttgacccacagtttaaggagagggtaaatcttaattttactcatgtcttttattggttgaatttgagaacctggcttaactttgctagactagattaagagaattgaagtatattttcccctaacattctttcaagtctcatttttttcttttttctccttttccttttccttttccttttcctttttctttttctttttctttttctttttctttttctttttctttttctttttccctttccctttccctttccctttccctttccctttccctttccctttccctttccctttccgttttccttttccttttccttttctgagacagggtttctctgtatagccctggctgtcctggcactcatgttatagaccaggctggcctcgaattcagaaatcctcctgcctctgcctcccgagtgctgggatcaaaggcgtgcgttaccatgcctggccttttttttttttttaaaatagatattttctttatttacatttcaaatgctatcctaaagttccctataccctccccctgccctgctcccctacccacccactcccacttcttggccctggtgttcccctgtactggggcatataaagtttgtaagacttaggggcctctcttctgactaggccatcttctgctacaaatgcagctagagatgaactctggggggtactggttagtgcatattgttgttccacctatagggttgcagacaccttcagctccttgggtactttctcgggctcctccattgggggccctgtgtgtttcatccaatagctgactgttagcatccacttctgtatttgccaggcactagtctagcctcacacgagacagctatatcagggtcccttcagcaaaatcttgctggcatatgcaatagtgtctgggtttggtggctgattatgggatggatccccatgtagagtagtctctcatttttttcttattgcttataacttagagtatttctggtatcatttaaaggaatgaattttggagtgttaaaaaagttcttctttcaaaatttttaagtttgaactggccttattctttatatcatattgtagattttgtttttggaagcttaaatgtgattcttagtgtattttaattaatttttctttaggataaaaaaaagtatataccataaaattacattaagattataaaattctgtggggagaacacataggttaccattttgtggaaaaaaaaaaaaaaaaaagaaaagctcaaagtacaggtatcgtttctgttctttttctgcctcctagctgtactgtcaagtgattagaatctggaaaaggatatcaccacagtcagtggctgtcataatgaaaagacatagtgccaggtgacaggtggtggcacaggcctttaatcacagcactggagaggcagaggcaggcagatctttggaagttcaaggccagcctggtctagaaagtaagtccaggatagccagagccacatagagagacccagtctgaaaaaaccaacaagtaaaatgttaacaacaacaacaacaacaacaaaacagtcagaaaagtaaaccttaaaaaagaatggtaaagcaaaataagaggaatagtgcaatctttcctcagtggatgagagagatggatcagagaagcagttaagcagcaggacactgttgttacacaaatgcagcatcagtggaaagcagagccagtgagtgttaggagtcagagagaagacagcgcgaccagctgtcagcagtcagctgaaatcaaagatctattaggcttgtaaaatgggtgagtgaggcccactgtgctggtgatggtgggatagatacttacttcttatccagtctctaaatcccaactcaccttttctttatagaccccagataggggtgcatctctgtgacaaatggcgttgtgacttctcagatttagatattgaagctattgggttagatgagggttgcataatgcccggaatcagaacagaactggagaaatgcagccgcttcagagtttcctagggtgtgagcttttgaagcataaaaccattttgttgtttatcattttaaaattctgaatggttaaaaagaagcatccaccacccacctaagggcgtttggaacaagtaaagtgtatgtgtgctctgcgagttgctccatggtgttagccctaacccacctgggtaggaactttgttcaattttttttccctccaccagtagtgccaagttgggccattgcagcagtaaactgttgagtcaagaagggagagctagacgagtgagctggagttggtgggttttttgttgttgttgttgttttgagacaggatttctctgtatagccctggctgtcctggaactcactctgtagaccaggctggcctcgaactcagaaatctgcctgcctctgcctctcgagtgctggaattaaaggcatgcgccaccacgcccaggtgagctatagtttttaaagctaagtttgacagtagtcaccttcatttcttctcttccacagtatcagttgtcaattcatttggtgtgtttctgccatttttctttgatgacaaatattagggtattttcctaatcattgaaataggaacaaaaataatttcaaccatctctcttgaaatcttccatagcttaattgactggaataaccctgccatcattaataagatgtacaaggtgtaccttggggatataccactgaaaacaaaagaggtaagctgctttgatttagtctcatgtcagcataaaaagtattgtgttgacatgaattgtgtttattttttccctagtttgtaagctgaatccatgttttttgaattactagttttaagccatgtttgtctatatgaattaactgcctgaaacgtgagtttaatagatctggtattttcagtgtagatacataaataatgatagtacattatatagatgaaggatccacagactttctgcaattattttgggcatttgaggcattaaagtatttgaggctataactactcaatttctataacatgaaagaagcaataggcagtatttaatttaatgaacatggttatatttcagtaaaaatgtgaatactgatacttggatgttatataattttcatggtttacaaaatattatttcttttattttttccatttaaaaatataaaagcaaaaaatataaaagcaatttattaaagtctcagtccttgttgaaataaatgatgggccatgtgtgatctatgagttatagtttactactatctggcttagaatctagaacaaaaggttgtttctgcagcctcagagtaagatcattgcttaataaggtcttttcactgtgccagtccaaaacatacagtgtgatttgtgtattttgttgctttcttttaagaacataagtaggagttaatagttctttagattattagattggtttagcagaaagaacaatgaattgagacccctggattgtaacattaagtgtctgtacacaaacaaatgtgttagaaggagagatttggctaatcagtcaactcccctctgcctcatattctttgtgtagaacatgcaagaatttattgaatagagtacagtctgttgatctctttggagtcataaagaactttttagaggatccgtaaagacgaggttatttgtcagtttttttttaaagttgatatttgcattgatgtcagagtggtgggtatatattgtgtgggctcatactacagatcaaagcaaaaccataccatatacttacggaggaagaagagagggagaggtataagatgggagaggaggacacaaatgaagaaggagagagagagtcagaaagggagagtggaggtagagtaattgtattttatgttaatatcgccatgaatcattagaaattattttacttgaagaataggtacataagctatatatattgtgactggtattttgacagaccttttctctcaaaagaaaaagaacatatcaatgaaaactgaagtgacttttcccccctcctttttggaatgttgaaagttgacctcataaggaaatattagaattgtaggaaatttgaactcattgacgtagtaacttagcaatatatttcctgaagagactggttgttgcaagaaatactttaaaaaaatatgcattgggggtattttatgctgatatgtttttaactcagtaaaacagtattttccagatagccagtggtattacaaaagcatacaacctaaggaccccatccaaactgtatgacagtggaattttatttaaacgcatctgccggagctcaccaatttggcttaaactccaaattacaattagcctttaagaaaccattatttattaagttttggtttagaatcaaagatccacaattactttttaaaaggacaaaaatcatccttactttctcaccgtgtgtctgtgcaagctgggacttacctatcaagcaaaagagctaccacagcaattagaatagagtatggaaaaacccagttcttttctagttacttccaaaaaatagaaatgattctgttcttcagtgcagtttttaaaagtttgtcttttaaaagaaaaatattacttattaaaatatattaatttattgatgtttcagattgtcttaatcagtttttctattcctgcacaaacatcgtgaccaagaagcaagttggggaggaaagggtttattcagtttacacattcacgttgctgttcatcaccaaaggaagtcaggactggaactcacacagggcaggaagcaggagctgatgcagagtccatggagagatgatatttactggcttgcctcccttggcttgctcacattgctttcttatagaacccaagattaccagcccagggatggcaccacccacaatgggccctccctccttgatcactaattgagaaaatgccttacagatggatcccatggaggcatttccttgagggaggatcctttctctgtgatacctccagcttgtgtcaagttgacacacaaaaccagtcagtannnnnnnnnnnnnnnnnnnntttaatataacaattgctattaggtgacactgataagaagcttttggaatcttaagtaattaaagcaattttaaaaaaaatattttgttttatgtgtataagtattttgcctgtatgtattgtgtgcttaccatgtgggtgtctgcttcccacagaggctagaagaaggcactgaattccctgaaactcaagttatggctgtttgtaagccaccatttgggccctgggaatcaagcccagttcctctgcaagagtaacgagtgcttttaaactcctaggccttctctccaggacctaggaatcttcagtaccttaaagagtaaaagccacaaatcattttaaaatgttgttataactaaagatgtttttcttagggagcagttctaaagccggagctgaaaagagacccagtcagtactagagtgaagttaaagattgttcctcatctcctgcgctctagacaagctgctgaaacgttcccagctaacattcaggtaatctttattgtctagcagaggaaaagtgctttgaacaaatagctttaattaccgggaaaaaaagaagaattagtggatattcaggaagtaggctgatgtatgtaacacgactaacaagttttatttcatcttaattgtagctgtataaattattttataaaaatgtactttgaaaatatgatggtaacttcatccatactagttttctgcgattgcccagcaccataagaaaccacacttatgctggtggatggtgtgcacgcctttaatcccagcttttgggaggcagaggcaggcagatctctgtgagttcaaggccagtctggtctgtagagtgacttcaaggacagccaggactacatagtgagaccctgtataaaacaaacaaaaccaaaacaaacaacaacaggatagaacaaaacaaataaaaaaccaaacaagttagtgtgtgtgtatcttcaaaaatattatcatcataaattgttatgtaaatcagaggcagtgggcagctttgactttgtcttcacagagtctttgctttctgtgcttacagatgatatcagctcactgttgcttctggatttagtaactgcagacgttttctccctcatcttctggcccccattcagtctgtcttctgtattgacacctacgtatcttggtagtggaaaattattaaacagtgtggatgggtcggtactgggtgggtaaagggtattaaatccttcaaaaaagatcttatttttaaccaagttatgtctacctcaacgctggtaatcgaatttatttatattgtttctttcttgtttaaaattgtgatataatgtacttgacatttgctgtcttagttatttaatacagttacactggctttaaaaacttcattgctacaattcttttcatcttgtgaaactgaaactcagtatttataaaatgttgtcattgtcctttgcccccctggcaatcattattctggcttttgtctcgaaatttcagttctctaggaacttcttatatgtgaaatctaatagtatttgtttgtgactagcttgtttcactcagtacagtgtcattgagatctgtctgctatggcattcatttgtcaggagttcattgttttccaaatctaaatgtcccatttatttatttggatcctggcatgctttacattttagttttcatttataatgtgtcatgaacatgaatgttcaggtatccttttggaactttgttctccattcttctatgaataaattctgcttctgaattgtctgactgtacggtagttttcaggtttgcggagctgggtttcttgttgcctgtttgtgattcaggctttctccatatccttagtaacacttagttttcataggggcttcctaaggagacggtagtctccctagtgaatatgatgctgtgtttctttgttgtgtgcttttttattgtgctcttcctctccttctccctccctgctgcctcccccccacccccgcccctcaacattttccccttctagtttgtttttcagatgggggtcttgcttccttgcttagcctggtttctaacttaagactttcctagcacttaacagctgctagggaaggaggagatggtttactcaagagtgtagctcctgctaagtcagctactctcaagtagtctactattatacttccaaaaatattaaggcaagacaaactgtcttgaggatttttttaaaaacgatacaaagttaagaggatagggaagcagagtgttggctcaagctatcctccctgcccattctctcaagtataattttgaagtttttgttgttcacattaaggagtctgtctgtatccagaatattagtcccttaattagatttatgacttatattttctcttccatgctgtgagcctccattatttactttaaaattatttattagttctttgagaatttcatacaatgtgttttgatcatattcactccaccaactctccccagattctctactgcttctctactcttgagtaaaccatctcctttcctaccagctgataattgctaatagctccacaggtaggagtagaattgtgtgctcaactcccttctctctgctgggatttggtctcattttggctagcacagggtttgtgtatgctgtcataaccacagtgggttcatagcttgctgggtttatagctagacacaattcgtgattactttcccagtagcttgcacagcactgttttacaaaagctctctggttgggatgaagtttgcaggtctgttataagcttgatttttgccgtgcccttgttactcaggtatgtggtgtcttcagcaatacgtatggtcttactgccaagttctgaagaattattgagagcaatgacagtagcctgtaatgtttgagggtctatgggacttcttttgctaatctaatggaaacagtgagagcctttctttccagtcaagtctataatcaagactagccattatactatgttgtggtttgaatgacccctcagctcatatataatgagtgcttgatccttaattggtgggcctgttttggaaaggattaagaagtgtaatcttgttggaggagatatgtcactctgggggtgggctttgagatttcttaagcccatactgggcccagtcagtcagttggtcagtcagtcttctccctccccctccctttccttcttccctcaccccccttcctttttctccccctctcttctccgtctccctctccctctctcttctctgtctccctctctcttctcccactccttcctctctctccctctctgtgtctgtctctctaacttgtggatcatatgtaagctctcagcaactgcttcagcgccatgcctatctgcctgcctttatgatccctgtcatgatggtcatggactcagcctctgagtaagcccccaattaagtgttttatttattagtttgccttgtcatggtgtcttttcacagcaacagaaaagtgatcaagacacactaggaagtctgctcttagtgtgctgtcgttgatagtagaagacaattcagattggtttattccatatacagtcttttgtgtattgctcaggaagaagcaggagagtagttaatagtgatggacttttacaggccttttacaggggccagggtaggacagattcctcatctacacctatcagcctatcattcaggcacattggggttttgccaagctctggaaagaataatggtgaaaagccgctcttttagttgttgttgttgaagttgcttttttattttattttatttttttaagatttatttactattatatctaagtatactgtagttgtcttcagacacaccaggagagggtgtcagatctcttatggatggttgtgagccaccatgtggttgctgggatttgaactcagtaccttcagaaggacagtcagtgttcttaactgctgagccatctctccagccccgttgcttttattttttacggtccagttgttgccccccccccccccactggtctgccctcccacaaattcctcacccacaaattcctcacccattcctcttccccactgtcttcaagaggatgtcctgttcccactagcccctcaggccaggcctctccattctctggggcctcaagtctcttgagggttaggcgaatcttctcccactgaggcccgaccaggcagtcctctgctgtatatgtgtcaggggccttaaacctgcttgtgtatgctgcctagttggtggctcagtgagagatctcaggggtccaggttagttgaaacttctggtcttcctatagggtcgccttcctcctcaccttcttccagccttttcctaacttaaccacaggggtccccgacttcactccaatggttggatgtaagtatctgtctgaattagtcagctgggggaaaacgactcttaatgcatctgtgccatgcctgtggccactagtgctgtcacaatgtcatttcccaagcctcacaccctgttaaggtagtgatacttacaatactaaaggaagagaattctccacattgttgtggtctggctcttgctcaggtggatggactggtggtgcaagactgctgcagtcagcagtaggtgataagggctggactttatatgattttttagcattggcttgtccaagagcctccatcagctaacaaagtctagggtggactgctttgttctatacagcaaatgaggtattataccatattatgctgcctgagttttgggtagcattcaccgcagaattcctttgatgatgtacttaagccagatagctacagggaattgcatagccttgggaagctgtgatgtatacttgaggccaaatttaggatggcagtgatgtgaggcaaaattgggttttccttagactcagtcagggctttctttgccttattttgtttgggacaggtctaatagatccagagtatactccagatcaggagtagtggttacggagcttttaatttctaccactgtggccatggaactgacctccaagatatcttaaagtagctttaggactcttgatggaattctgcttcctgctgtgcagctagaggttgcagggctgataaagattctcagttgtagttccagtagctcaatctgaagttaataatttaatcgtggcattagtcctgggcttcttgaggttgtgggcctgttactggattttaaggcctggacttaattcctttgacttacctgaagcaagcaagctttctaaactccatatttttcaggttctagttgaaaaatgaagctaataagtacttttctcttgcctttttcattgcacctcctccgtttccttgttgtcttcttcatttttgttttcgagttacaatcaaaccaggcactgtgggcaccctgtttccttagtttttccgaggacagttttgtgtctgtaaggtgatttgaaagatcttaactcaatggccatcttcctctgctttcttcagagattacttttagaatgttgatgtagtttctttttatttctggccgaatgtctttattacgtaaagatgaagaattttatacacctgtataaattgaaacaaccgtgcattttctttttctattctgttgacatggattattatagcgatgattctgtctgtgaaacttccttatcttcaaaagctatttacgttgaaaagacttattaatcagtagaaaggtacatgagctatgttgcatctgtggacatcacaaagcacctcaatggagtcctttatgtgggctcctgggattgaactccagttgctaggtttgcatggcaagtgcctttacctgctgtgctgtcaacagtcttattcagtaatgctgtatagtaactgatgtgaagttggcttactaactagttgagtaaggagtgtttatcttttctattaatgttcataaaaagatattagtacatagctttcttatgatatcttttttcctacttattagttatttgggagtttcacattatgtaccctggtcatcttcacttcccagttttcccaagtccatcctcccatacctttgtgaccttacccctcaaagaagaaaaaaagaccaagtccaatttttgttgctcatatactcactgaagcatgatcaacctcccagtggtcagccccttaaagcaaatagtcctcctccactcctccccgaaagccatcacctgtgaagggctatgcttcagaatctccatcactatttaaagagtctttttcaatgactgttttttttttttttttgtttttttttttttgttttttttttgcggggatgaggtgggggagagagatcatagaagccttctatgtctctcattctcaactgagtctgcagtcattgatcgataccactgcaaaagaagctcccttgccctttacagtcatctgtgataggaatcttagacttccagggttgccatcatgggccttagtggcaacacagacatggacatcaacatgacctttggctgcagcatggacagaccatggacctcagtatgacctttgatggcagcatgggccgtagatagatatcaacattcagtagcacaggccacacacatcagcatggtttcaggcagcacacatgcctcttctggtccccaacagcaggaccacagacatcagcatggccccaggtggcagcatagtccatagggatccacgtggaccttgggcattgacatggcttgggatggcagcaaggactatggatagcaccaacatgtctcttaagtgtagcacagatcataggtaccagcatggcctccagaagcagcatggactcaggggatctttcaaggagtcccagttcagaaaatgaactattctccatcttggacatcctgttgttcagagcctgggcgatcacacatgtttgagagcagagccttggagagctccagactgctgcacaccatcctgcctaccttactcagtaatgccatgctctcctgcccactgcagccttctcccacacctgtcatcactgttgcatctatctctagttcttcctctctctcccagcacactggtttttccacctctcctttgcatatttgtttgttgaaataacattgcaaactgtagtgtatcacacagtatatgtgtgtatgtgtatgtatgtatatatataatatatatatatatttctaaccagatttatatgtaaatactcagtgcattggtctggtttaagatttctggtttctaaaacacagtaaacaccagactgtcacagaaactcattttggatatcctgttgtaccccagagtcagagtggtcttactgctatgctatgcagggaatctggggacagaaaattaaagcctttatcacctagaaggatgaaatggacacataaacaccaagccatagactggagaggtactgcagtagaagctgatgcccaccagatagtgagagcacaaagaagagtgtgttcagtggaaagagaggtgggatctggaacactagatacagtggcacgctttagtgaataacaggacatgtggaggtgtttattatgggagaggggagtctgtgctgagtatgggtagaagcagcagcatgagagagacctagccatgaaaactgtatttgagcttttattcacagacaagatgtgggggaaggggtggctagagatgggaccagaagggaaaaaaacctaactattcaccatttactgagaacataacaagagtaccagcttctgtactctaagcttcacccattattttagtctttggaatattgctatgagggaggtgttaaaatttttgttgaacaaaagaaaaagaaggggccaaaaccacggcttgtaaggtaaaggagcttgctgtcacactcaagaaacctgagtttgatccttggaacccacataatagaatgagaatggattccaatgacttgtccgctgacctccaattatgtgcttttctgtctattggcacaggggatttttatctctcagccatggcttcattttcttttggtggtagtaaatgaaggtatatttaacaagtgatcttagctgagtgagtattctgaaactgaaaaacttgataaattcctaacttatattatcattgttgcgtatataaataatattttagcttttgaaagtggtcagctattatattcaatatagaaattaaattagttttgaggagcatggtgtagtgcagaggtttgttattgaatcttgactgttatttgaaaatgccagattgttatttgttaattggtatctttgactttgttcattttacataggtggtatatgatggactttttggtacaaatacaaactcaaagttaagaacactgtccctgcaatttgtacatcacatttgtttaacgtaagttttgttttatttttaaagctaattaactattcattatttagagtaatcaagtttcaggtatttttctatccagctttcctaaaaataaatttttgtttatgcaagagggattccattcttttagatttattttttctcatttaaaatggtgtgtatatggatgtgtctgtgtgggcgtgtacacgtatgttgtggttcctgcagagtccagaagaaattgtggagtttcctggagctggagtggcagcctgtgaagagtttgtaaattgcccagtgtaggtgctgaataacacctgggttctatgaagcgagcagcacaagcttttattgttgagttgtttatctaatctccagaaagagtcacttcttaaatattgttcagcttcatttattgctaatattttaaatgatcttctgaaaagatatcttgatttttgtttttgtttcaagttgcccagaaatcaagattaaaccactaggtcctatgcttttgaatggtctcactaagctaataaatgaatataaagaggtaagtgacttgttttaaattttaccatttaattatttaatgtgataaatcttccaggcccatccattgataaatgtttgacattgacctttgtttcttaacatttttatttgaagtgacaattttatatactattgcaatttttttgtcttttaaaaaatggttgttaaaactgataacatctttaaggatgccattactttaaaccatgtatggcagcgaatacattttatgatacatgtatgtcctatgtgaaattgaaattaaaacaattttatgttttatttctatatggaactatttagagttgacttatagtaggaaatagtgttaattcttaaggggctcagattttaccaatttacaattttatcaaaatacatacattcagtaaagtttgattctataagttaagtggtaggatttcttggattgtaggtttccaatatctgattttctttgctattttttcacaatatcgtaaatatcttgataatatgctaaatcaataaagtattaagtctagctaacattgactttctcaggcttagttaaacatgggtccatctttgcagtacagggagataaatatctaaagctagatttgaatttgcgtcctaggtctattctttgacgagctgctcaagttatttggactctagtttgtcagaaaaaaggataaattaccttattgtattattctgaaaatgaaatgacttagcaaagttgtttagcataggcaggacacattagttaggtattacagattaaaactgttgatttgtttacacaatttgggatctagcttttttctttcattgaataatgcttgcttgtttttgtttttggtttttttttttttgagacagggtttctctgtgtagaccaggctggcctcaaactcagaaatccacctgcctctgcctcccaagtgctgggattaaaggtgtgcaccaccacgccgggcttgcctgttttttaaagcatagtaaattttttgtgttgtttttgaaccctgactgtcctggaacttgcttgtacacctagctggccttgaactcagagatttacctgtctctgcctcccaaatgttgggattaaaggcgtgcaccatccctacttggccacttttttcctttagggtctaatacattttaacattatttatggcatagattaagagataatcatgtgctttagaatgactggtggaaataaaaatgctttggaatttgtggagagaaactatattgctaaataagttttnnnnnnnnnnnnnnnnnnnnccctccctccctccctcccctcttcttgtaactcaattgcacacgttagatgacaatcctgttaatatgttggacatgcctgacccattccagataaaacacagaatctagtcttacttccaagtatcatttacaaaccttcccaacagatgtgtcaataagtgggtgttcagttattggatgctgaattctaggttaaatggacaagattgatcttacaggagttttactgtgttctgagtaatgctgattctcagtgtttgtgacactgtaaagctgtgtatcttaggtggaggccactaatttccataatgactatgatctcagtaatttgttaacagtataagaaatgaaaagaagccatttattttattacaggtgtttaggtaattgtactaatgcttattacagttttgttgggggaagttaagataatagtttgtcagagcagggataaatttcccaataagtcaagtgtattggtaattaatttgctgttgacaggatacatggtattgaaaataacatgaagctagtgcaagataagagaaatctttcacttgtgaccagtgtatttggagtgaattaaggattttgtttgtgtgctcttttgttctgggtttggatgttttgttgttttgatggcattattatgtaggacactgtgattgagaagtcaaataacaaatgttgttgtggcaaaggggtttgctgtttattgcatttttttgtgtgtgatttttgttcctttctaaaaattttaaggaccctaaactactgtcaatggcatattcagctgttgggaaactctccaggtgagtaaagttttttcttccatttttgctttttttctgtgggagacacctgttggtaattgagaaaaatttatctggtattaatagatggagaataatttgctatgattccaacaagaaatgtattttatggcaataagctaatgtcttcttttttttttagaaaggatataaatcatttaagtttacatttgaaaatacagtcttaaatttagtcttgaaattagcttttaaacttaattgtgtcaaaataggtcaccattatggttgcataagggattacaatctagacatctaattaaccttaagtgttcctgttgctttttatcactaaatcttataatgctgtctgatattatgaacatgaatgatcctgttttcaaagatatatctatttccctctgctcaatatgatttcttcattccaattccttctggtgtcatctttcttcacttcatactagagggaaaagagatgaaatgttttcagtggtcccatatgatgctttggctccacacacaggctgtgagggaaagaagcttcagggttcagaggaaagtcactcaagatcagtttacagcacaggattgtcacaaactctgtccttatctctattagcaaaaagtagcaaaacctcttactatgacagattttcatttaatttgtaatttattatctcttcacattaaaattaggaatgttaactgagtatttggaatattatagaaggtatatcttgaaaacatatgttaatgaggattatataattgaaaagttaaataatcactttacaaaatatttggctcctggagaaagttagctaatgatactgacattgtatttagagttgtgaaagagtgagttgaggaatgtttctatatatagtttctttttcgctccttttcatcccatgaagatttatgctaatgatatcttacattctcttacagtcgaatgccccatttattcactaaggatatagctcttgtgcagcagctctttgaagccctctgtaaggtagggaaacagtgtatacactccttcatgggtatgttcctagaagtcagcagggaggaaaacaccattttactgtcttcacaggaagaaccggagactcggcttgctattcaggaagcgttatctatgatggttggagcttacagtaccttagaaggagcacagagaactttaatggaggcacttgtagcttcatacttaataaaggtaagtcgtatatatattttacatttacttttttgttgataaatataaattatacataaagagtatcattttcagtaaatgtgtacaattatataccattccaatcaggataaatgaaaaatcccctttctggttttcttttaaatatgcaatatactttagcatctgtagttattcttttatacactaggacaccagaacttaattttttgtatctaacttatttgtggacctaccttttctgatctttccctgtcctcttctttatctgtaaactggtccattttcagtttctttgagatcaactttcttagaaagttgtcctagactcgatagaagtctgagagatatggagtgagatagagtggcatttgtttttctgtgcctatttaacctgttttctagtccattcatgttgctgcatatgacagtactactttctaattattttataattgtgaggattgaacccagggtcttgctcaaatacaaatacaaatgcaaatacacttctactgagcttattgccatattgtatagtgtttagaaggaaatttgaattgttttttttttttttttttttgtttgttttgtttgttttgtttttttgtttttttcgagacagggtttcgctgtgtagccctggctgtcctggaactcactctgtagatcaggctggccttgaactcagaaatctgcctacctcttcctcccaagtgctgggattaaaggtgtgcgccaccacgcccggcttgaattttttttttccagtaaaattttgattattaagaggtatatttgctggtttgcatttatgactttgatcatttaaattcttcatgatggaaatgtggttttgggtcaaagtatgcgtaaggacttatatttaagcctctatgtgggaaaactaatcttcatgctgtgttttccaagctgaaagttttttgtcataactggtagctgaacactgccataagagatctgtggtaccactgttagacaaatcgcatttgtcaagatgagtctgtaagaagaagcctagtgccatccatcagacatgcccttccttcactttccgatttgcttttcaagggaatatttgtaggcgttttggatatcgacagtgtgtatgtgtagtatataatacatatttattacaaactatatgtattcatattaggtatatattacaggttatatgtatatgtgtgttatgttatttgtaacatatatgtatatgttatatgtacatataacctgtaatagataataaaacattattgaatgtttgccttagttctttttcttccattattagagatagaggaaattggaagaggtaattattagaatatactggtgagataaacaaatgtattttttaaaaaattagaccaccatgatatattcatgtgatggaattattaagatagtcagaaaagcatctggtgccactgaattatgaagagcaaattgtaccattgtatgtgtttagagcttgctgtatgtatatgtgagtcttgtcctatatgctcttggtgtcttgtttgtgtgcttcatggtcttatttcatagcaaattcttagacctatctggacactcattagaatacataaaatttttccagaaaactttacgagcaagagtgatgtacgcataatgcttgtagatgctgtttatactcacataaatgcaatcaagtagtagtattaccaagacaaagataaatttttttctcatagactacttttaaaccaaaccttagattaaattgtttaatttaaactagtctttaatatcattcttctttttttaacacagggaatgtagatagcatgaattctaaaagaataaggcatatgtttttaaatttctcacatatttcacttaggtttgtggctagaggaatatatttagggaagctacgtaaaagtaagccattagcatcagtaaaattaaaaactggccaatttcataaatttttaatcaaagtgaatatatttgcattgttgaatttctgatctgaagtcagtgttaacttcagaacaaatctgagaatgatagagatatttttgtttcaaaattatagtaaataaggtcagattatgtccctggtaaaacatttgaatttcacttgtgagctggggagatgagggtagtgatgaaaaacctcacagtgactgtgcctccctccatgtttgcactggagatgtgtatatacagagatcctttgtagctagggtctttgtagatctttggtttgtttgcaggattcttgtaagtcataaaagagctcattacataatgtcaaatacttctaagcagatcttgaacaggactaagtggtagaccttgtatataacaattgtgaggtcctgggtttaatagccagcatttcctattccatcaaaagagagttcttgaacaaatgatttttattttttttcgtgtatatttattgatatgttaaatttgaatgatatacaattagcttgacttatgactgaattgagatgctgataattaaattcttttttggggtgtgtgagtggatgtctttttgtgtatgtccaatagcctgaagttcaagttcggcaagttgcagtgaaatttgccagcacggtgtttccctcagatcatataccttccagatacttgctcctactagctgcaggagacccgtaagtttcaaaagctgtcaatttgaatttgtgttacctttaagtatattttaaaagtagtaaaatttatgttggttgttgggttaattttaagaatattttaaaattactcaaatttatattggtttcaaagttggcttatgaaatttagaagtaatttattaaggaattcaaagtaaaccccttcaggtaacctgcaattaatataactctatacttatatattgaattataagtatatctataatatatgacatagatagtatgaatcgaaaattctaattagtcaaatgtaaataaaaccttataattgtataagtattatatatatatgtatatatatacatatatatatattttatccatatagttcctctgtaggagcaaaaagaattaatgttattgatcaatacatatttaatatttcatgttgttgatggaatatcattttatgtctaatataccaatatttaaaaattaagtatatatatattttttttttaacttgttagtgaattatattatgacaattctgaggtatatttttaatgagaccaatgtgctactatctatactaattaaggcatcttttttcatttatatatttcagaattttaaatcatatgtaaatacagtaaaatatacgtgtgcatttacaaataattcttaagggtcctgttttctgttttatagtcaatggcatatcttataattttttaatttatgtatttgttttttaatgtatgcttactctgtctgcacgtacacctgtatgctagaaagggcagagattgtcataagccaccatggtgggtatgctgacatttgaactcaggaactttgaaagagcagccagtctttaccgcagagccatatcaccaacccctagtcagtgacatcttaagatgtgtgaagtactctgatatctgccataatatgtggttattccttttaaattagattactgtattttaaagccacatttatgatgaagctctaaataaaattaagcttccttttatcacttgcatatcctttctataaactctgaggtctgtttaaaaaataacaagaagttactttttttttttaaattaggtattttcctcgtttacattttcaatgctatcccaaaggtcccccataccccccccccaatcccctacccacccactttttggccctggcgttcccctgtactggggcatataaagtttgcaagtccaatgggcctctctttgcagtgatggccgactaggccattttttgatacatatgcagctgaagacaagagctcccgagtactggttagttcatattgttgttccacctatagggttgcagtttcctttagctccttgggtaaattctctagctcctccattgggggccgtgtgacccatccaatagctgactgtgagcatccacttctgtgtttgctaggccccggcatagtctcacaagagagagctatatctgggtcctttcagcaaaatcttgctagtgtatgcagtggtgtcagcatttggaagctgattatgggatggatccctgcatatggcaatcactagatggtccatcctttcatcacagctccaagttttgtctctgtaactccttccatgggtgttttgttcccatttctaagaaagggtaaagtgtccacactttggtcttcgttcttcttgaatttcatgcgtttggcaagttgtatcttatatcttgggtatcctaagtttctgggctaatatccacttatcagtgagttacttgataactgtttgagaattttaatgagttcagctttttgcctttactgttcatcttcagttcatattgatatgatttctttgtttgatattttacagatcctttactcctgatttctgatcttgatttttctccttatttatttacatttcagtttggcaccactggtttcggattgttaatcttgattttgttgacctttccccaccccacctcctacccctctttttctccctttccaactacatgccagattgcttagggattttgagctaatgtagcaattgatgttagaacaagatttcaatccaagaacttagacaaaccttagccagtatttttatttacaccacacacacacacacacacacacacacacacacacacacacacacacacacacaccccccaaaacatgactgattcagtattttccctttttagtttaataaaatttgttctgttgaaatgagaactcctgacagtgtaaggctcagcctggtcatttccatccggtctgctatttattaggccctgttaggaattgaggacagcccagaggtagctaaggacttcagaagacttgtgtggtgtggaagcaaagctgtgaaggcagtttctaggtgttctgaaagagattactagtgctatgcatttgccagttttgtagaattgtagacaaactaccaagaggagtcagaattgaggtgggaatacagaacacaggattctctaatgatttttaatgtatgttatagttgtttgtgacttagttttaataagagtaaacatgcaaatagaaatttacataatgagttgtaattagtcttgttaatgatgcaagccaagtgactcagcagatatcactgttatgaaaaggatataatttcttacattactttttatttattgcttatatagccaagaatatactcaagacattttgttagaatcctagctgtcaaataaaatttctgttttcattcttcaagtgatgactctgcaggtgttaaaatttaatttttacttcttatttgtccatctaaaagacgagaagaagtccatggtgaagcacagcgcgtattacgatgtcttcctggtagaaataaaaaggaaagtgcttctaagcagatgccatcttttccagaaatggtatattacattcaagaaaaggtagggattgtaactataggtacttagtttgaaacatttaataaatgttaaaaataaaaatcaacattttaaaagtacagatgcaataattagtaaagttcctagcaattatagtatttacactaagaggaaaccactaggcaaggagagaaatataatttttacatgcagttaatttgcttttccaaagtatgaatgacttataattcctttaatgattgtaaacatcttcagtatgttcaaaaacattttctttggtatgacatagttaaaaaaaattttctttaaaaaaattgttgttcttaagggtaccaggtgtcatcaatttaaggatgctttagagaacagttgagattttccatgataattattccatattctgttgtaaatcctcactttgtagcgtgtttctgcagctgaatcagagcatcgggagcagtgatcctcagtgctgactgtcccactttttacattggtgttcttttgattatgtcagaggataactatcgtttttgtgagaggtgcatgccctaggacagtgttttgtttagaaaagacaagtgcatggactggaggcttagctaaggttatgtgtggcttttgtagtatatctgaatttgatttccaggacctgcgtacacctaccttgagtagtcttgcgtatacctagtcttgagtatatttttgagtatatattgtgactattgctccagaggatccaatgcatctgtcctctgtggacacctgcacccagtcacgtgtgttcatataatttaaaatgataaaataaatcttcagggatggagagaaggcttagcagtcaagagtatttgctgtcttgcagaggatctgggtttggtttcctgtgtctgcatgatgcctcataatttgtaactccacgttcagtggatctaacacccttttgtctccaagagatgtgcatgcatatggcacacttagatacattcaggcaaaacatgcatataaataaaacaagaataatttttctgaaaagaaaaactctttaaaaaggcaaataaaaggtgttgagagctggctcaggggttaagagcactgggagctttgccagaagacctgagtttgattcccagcatctacgtggaacacacatccttctataactccagttgcagaggatatgatgccctctctggcctcaataggcactgtttgaatatgatgcacacacacattcaggcaaacacctatacatatatacatatatatctacatacacatctatatctacatacacatacatataaattatatatgaaacaaaacaaaaaatcaaagataatgcaaatggataacagtgatagagctagcagtaaagttattttcagttgagtaagagaacagttggttttcaaaaatttatttgttttggaattatttttattaggcttcccatcgaatgaaaactccagtcaaatatatgaccggaaccacagtccttccatttaatccagcagcatttggagaggtaggacttcagcatcttatgctgtgtctgatccttttgctttataggtaaactcatatcatggtttcattgtgcttttagggtatttattttcaaaaaacaagacccagtatttggtaatttgttttgttttaatttatagttaactggcggttttctacccacactcagcccctgtactgggaatcaaatgtggggccttagacatgccagggaggtactctactgctgagtcacactcccagattccgccccggcaagagttttgtttgttttgttttattttttatgacagaacatttggttactgttgggcttttgtagtaagttggatttaacttctaaagccaacctactattgaagttgctagagttttcaaggctagaaaacaaaataagatttatcacactttttgagaggattaactcagcacatccattaaggtgaattttatgttttaaattatttaaactgttaaataataatcttgtttagagtgagacaatggctagggacagaattccttggtagaatatatgctcagcatctgaaaggaaatggcttcaatctcagcatgaagaagaaacaaaactcaagctttttacttcccttaaaaacatacctggatctgtgaaatgttttaataccttttgttaaattataataatttacttagcatattgaaccttgcttcctggcttccattaagattttgtaaagttttgtgaagaaggatgggaatgtaaaaactgaaaattatcactttgaagaatatgcctcagttctgatttttttaagaatctggtactttggggctggagaggacctggatttaattcccagctcccacatggcagcttttaactgtctgtaactccattttcaagggatctgacatcctcacaccaatgcaaataaaataaaatttaaaaggaagctgtatttctcatcctttttgttgtagatagttctgtacttgcgcatgtgcctggctcatagtgcaggggtggtacccacttcccagagtttggctgatatgcaagatcatgctccggctattggacggtacatacgggctttgatgtcaagcagccaggcgacagcttcatcttctaataagagtggagaaaccaaccctgttcagatctacactggcctgcttcaacagctgctagcgggggttggaggtaagaagccaatcatactaagaaagaatatcaaaacaagtaaacagaaagttaatttacccttttcttcagtatttgcccatctggctcagtgggtaggttccaaactcatggtctcagagatgatcctggttaaactctgggcctcaaaataaaagacattaatttgggagagatacttgtagggaggagatggctatacgtgtgtatgtgtgcgataatagggatgagagaaataatagagggttgagggctacactagtcagaatatactatatagacatgaaattatcaaagaaaattcaataaaaatctacagtagaagtattccaaccttcttgacttctgtaactaaacattgacctttgtttacattcgaagcctacctgattgatctttgatatgcttttcatttcagaaagaaaatgttggtgtagatacatactttgtttttgaaaatgcacgagaagacagggcatccttttgataattgaactttaatctatatttagagtgtaatcttttgatttttcagaccagaatttgtagcatatttgagggaaatttaggattttctttttcatgaaagttaaaatggttctgaattcttatttaggtttgccagtcatgtactgtctattggaagctgtgtcagtgtatccagaaaaattggctaccaaatttgtagacaaaacagaatggatcaaggtatgtcctcatgataagtttttatttttttctctatggactcagatattttaaactaattgaaaggctttggttttcctaccagtcttatgcctttcactacttttaggttattttaaactttcctataaccaaatacttactgaaaagaatgtaagctaatattttataataataggaacacatattttgaaaacacacttgtatatttgtcaataaaacacctcttttctgtaattgtgtactgcctccttaaatcttctcagtgttctacccttctcttgcctctgacaaacatgcaaagtacattaatagttttatggggggaactttctgtttgcttatgcatatatacataaaacaatgcattttatttttatttatttatttatttttttaaacaatgcattttaaatgtttttcttttatacaaaagatagcgtactgctggcacagttttttgtttgtttgtttgtttttcgagacaaggtttctctgtatagccctggctgtcctagaactcactttgtagaccaggctggcttcgaactcagaaatccgcctgcctctgcctcccaagtgctgggattaaacgtgtgcgccaccacacccagcccccgctggcacagttttgtacttatttaatggatagtagagcctgtagctagtcttacagctatggagaaaactcctatttattttaacagcttcatcattttccattgtaaggttaattctgggttgctattgctgatcgtttagtattgctatgtaattctatttttcatacaaggaaatgtcagnnnnnnnnnnnnnnnnnnnnnnnnnnnnnnnnnnnnnnnnnnnnnnnnnnnnnnnnnnnnnnnnnnnnnnnnnnnnnnnnnnnnnnnnnnnnnnnnnnnnnnnnnnnnnnnnnnnnnnnnnnnnnnnnnnnnnnnnnnnnnnnnnnnnnnnnnnnnnnnnnnnnnnnnnnnnnnnnnnnnnnnnnnnnnnnnnnnnnnnnnnnnnnnnnnnnnnnnnnnnnnnnnnnnnnnnnnnnnnnnnnnnnnnnnnnnnnnnnnnnnnnnnnnnnnnnnnnnnnnnnnnnnnnnnnnnnnnnnnnnnnnnnnnnnnnnnnnnnnnnnnnnnnnnnnnnnnnnnnnnnnnnnnnnnnnnnnnnnnnnnnnnnnnnnnnnnnnnnnnnnnnnnnnnnnnnnnnnnnnnnnnnnnnnnnnnnnnnnnnnnnnnnnnnnnnnnnnnnnnnnnnnnnnnnnnnnnnnnnnnnnnnnnnnnnnnnnnnnnnnnnnnnnnnnnnnnnnnnnnnnnnnnnnnnnnnnnnnnnnnnnnnnnnnnnnnnnnnnnnnnnnnnnnnnnnnnnnnnnnnnnnnnnnnnnnnnnnnnnnnnnnnnnnnnnnnnnnnnnnnnnnnnnnnnnnnnnnnnnnnnnnnnnnnnnnnnnnnnnnnnnnnnnnnnnnnnnnnnnnnnnnnnnnnnnnnnnnnnnnnnnnnnnnnnnnnnnnnnnnnnnnnnnnnnnnnnnnnnnnnnnnnnnnnnnnnnnnnnnnnnnnnnnnnnnnnnnnnnnnnnnnnnnnnnnnnnnnnnnnnnnnnnnnnnnnnnnnnnnnnnnnnnnnnnnnnnnnnnnnnnnnnnnnnnnnnnnnnnnnnnnnnnnnnnnnnnnnnnnnnnnnnntatattgcatatttaaaacaaaaccagaaaggggatttttcatttatcctgattggaatggtatataattgtacacatttactgaaaatgatactctttatgtataatttatatttatcaacaaaaaaccccccccccccccccccgtgtccactttccctcccaggttcctccctccttcccgttccacttgtgattgctttcttctctctcccaagtgggacagaggcatcatcacttgggcacttcagcttgttgacctttttgagttctatggagtgtatcttgggtattctgtactttttgttttgttttgttttgctaatagccacttattagtgagtacacaccatgcatgtccttttggatctgagttatctcactcaggatgatattttctagttccatccatttacctgcaaaagtcaagatgtccttgttcttaatagccgagtagtatttttttttttatagcaaagagttttattgtatttcatggaagagatgtaatagtgagaaagtatacgtttaagttccctagatgtggaagatacagtgtctatgtttacagtgcccacccttcatgtgggtagtactaagttatatggccagctaggtgagagttgttcttccagggtaacaccaaaaatgttatcaggtttagcaaataaaaatgtaagttaaatttgaattttagattagactttttagtgaaaatatggctcatacagttgtatacttattgtgctttgtaatacagtttttttttttttggaaactagcctgagttacaggaaaatctatggatgtgaaaataggaatatattttgtcaagagatactagttttgtatttttcttgaaaaaatttggtctcctaaaagtgcttcttgttttagaagggttttcattctttgtgaatattttttaatttaagctaatcttgtgaattttcatctcttggtagaaggtaaaagttttctatgatatgaagagagaccagactatgagtttgattctagggcttgttatgctgtgacctatgaacaaaaaatactgtttgactcctcattttatggtctacacgataataatgcttttcactttgttaaaaaaatttatgctgaattttggaaacaagactttgcatatagtagataggtgtttccctctgatctacaactatagcccctctataatttttaaatagttgacaaaaagataacagaagacattattttatgacatagatctcatcttattggaacacagctgtgtattatctgtgcctgcttttgtgaactgcagtggcataatggagtattctcagtagtgactagataaaaggttgctgatctctattcaaaatcaattatatttattttatctgttttaaagttttatatctctttatgaaaatgcaactaaactaagatttttatatataatttcagctcataaaatttaattaatttttaattaaaatttaattatcattccccctttttttctccttgtagccctttccatgttcctttctacctttcaaattgatagcctctttttttaattacttcatacatatatatgtatgtgcatgtatatatgtgtacatacacatatatttatataatttgatgtttgttttttatgtgtatgtgatttcagggctgaccactttgtattggataggcagtcagggcgctcatccctgggagtgggtaattcttcctcagcaatcattgattgcttgtaggtttttgtctaggggtaggacctggtaagatttccctcttagtgtgttagagtctctgttgatagtgtcactgtttgtgtcttgtttgttcaatcatttgaagagaggcagtcttggtattctggctctttcaacacccctactcatcaaccctgttgtttgctcttatgtgagttaaagagacaggaactgtgctgcagatgtatccatccattcatgctgagctcccctacaatccagtgatgctttatgtgcattgtgttcagtcatggttttctataatggcctccatttgttatagagagaagcttttttgatgagacatgatagctgtacttatctctgggtataaggacaagatttagagtgtagttaggaattatcctggtgtaagtggttatagtagattctcttttaaaatctatgaccccactagtcctaggtagttgactaggtttctggtaccagggataatttccctcctgttgaacgggtcttgagtccagttaggcagctcgtgcttggcatgggtgtggggagtgcagctgctgcacctttatgcataccttgtcctgctggtcattgttgtgattgacaggtgtcccagctgagtaggactgttctttctttccctttgtagctttcatagtacttctggtattgtggaggctagactgcaggaagaaggatttcaggttagatccagttccaatatattaagcttgttcttttataatatcatacacatacataatactttctgatatttctctcccttgctctcttttatttcctcccatccgtattaccatccctttgccagcctctttcccctatttattatttttgtttttgttttttgtaaacatttagtttaaccaaggccatatgtattgtaactgtccattgaagccttgcagagtctttttttaaaaaaaataatagcttttcacattattttttatggatatcaatagattgagtgttagactatcatttacttttattaagtgtcagatatcagcaggaagatgattatgcatcatatatctacttcttttctctattgctcagagtctgatgagtagcagtaaagaagaaatgcgtgaattggcggctttgttttattctgtggttgtgtctacagtgtccggaattgagttaaagtcaatgatagaacagctgataaaggccacaaaagacaatcatgtatgttatcagtttatctttactcttctttgttatttaaataactttggaattaaaaaaaaaaacccgcaggaacctgtctctgaagtctgtgcactgttataatcataaaggtgaggtttgtttttccgttcctacagatttatcacacttcagagctaagtacagttatggccagaacttaggtttgctagaaaacatcagttcctcctttgagcctgtaagacagtgaaaaaatatatgaaattttgtttttctttcagttctgaaaataggtgaatctcataggaccatcttcctgaattagggaatttactgctaaggatggatttacctggttgttagatctttttgagcctgcgtctcatggtgtagctgattctgcccccagacttgagatctttctgccttagcatgttccatcatagcttggccccattctttttcagtaggtgatagggttttacaaagtatttgtactagtttttagttttccatttgtaaagtaaacttataaattcttagcctttataagtaatacttgagataaatgtgctgacttactcatttcatttagcagattttaatactttgtctgaaaagtactgtttttaggtgctgtacacattgtggtaggtaattagttgggaatccctaggacttcctgccattcaaagtaattagctctccctgccccatcactgctaccacttaatcacagtacctacaaaaaaagcaaactttattagtataaagtttgtatttgaagattttaacaactagaaaaaggactgttcattgtattttgttggcagtatagagaagagaaattatccttgaacgtgatgatagttagctatatagtgatatcaataaaaagacagcattatgggctgaagtgatgcacaatggttaaggatactggctgctctttgagagagcctcggttcaatttctagcaccctcatggagattgaaaaccatatgtaactccatgtaaccatatgtaactccatgtaaccatatgtaactccatgtaaccatatgtaactccatgtaaccatatgtaactccatgtccgggaggagaagacgacttctggttctggaggcactgcatgaacatgatacaaaagcatacattcaggcaaacactcatgaactaaaaattaaataaggaagtataaggactatagaagcttattttaaaaatccctgttccatagatggaggttatgtgaattaaggtatctaactctggatgtcagtaaagattcagcttaatttctcagcattcttaagttagaaactcttgttataaattgccattgcctaattttgattcattggcttccagtagaggccagagtaatcattttcttttttagccttaggtttatcaggggcattatcctaacaagttatttcagtgtatcttttcatgtgtgaaaaagaaacagtgctgtcacattgttaaattcagagccctgaggttcaacatggatcgttgcttgccttgggattcactgttggaagatacttggctaagaagagagtgaggatggccgagcagcatgacctagagacagatgctgacctcttgcctgagcaagaggagatcattcggagtgctacagaaacaataggtcagtgtgtgaactggcttgcttggctgcttcaaactttgagtttttaaaaaattttaatatggtatttttgtttcttcttgtaggactttaaaggaacaagcttttctataaaataatttctgttttttagtaaaaatgaaaatctgtgtgtgtgtgtgtttaacatgtttttatattttggtgccacttatggggaaagcactaccattcaaggacactaagcgttattgccatggtggcttattagtgcataaatgtcaacaagtggtcaatcagaaaacattatagaccttgattttctgatgctgccttaaaaaaaattaatacatggctaattgatttaaatcataagaataattagtatgtcactgtcttgtatttaaatattcttacaggttcatttttagacagtacatcacctctgttagcaattgctgcctgtacagccttgggtgaaatcggcagaaatggtcctcttccgatccccagtgaagggtctggatttactaaactgcacctcgtagaaagcttactcaatagaattccgtctagtaaagaaacaaacaaggcaagcctttttatttctttctcttctagaattctgtgttttctgttcatagttgtataaactaacaaaaccaagttatgagtatagtcatctttctatatccatccaggcacactgcagctagagtaagatgtactaatgtgttaaaaatgataaagatgaaactttgataaactttgcatttgcttttgaatcagggagatatgtataaactattttatatgttatcttttgacctagttattctaactccttaacagttaggctttcagtaaaattaaaaattcattgaagaatcattttggtcatacaaaagctggataataaaataatcagtttcatgatttgtataattttagggcagttctcaagcttatttttcttacagccagtttcttttgaagcagaatgaataatctgagggaaagaacagtggcagtttcagttgagatagttgttttcatagactttatggcattctttataattaaagtacctgatgttgaagaggaagataatttaatgagtagaaaagtaccagtttactataagttaaagaatattgtagttatattcttggtttagctgttacttaaaaccaaaataatcacaccacatagttttctttttacccagtcatcatcagccattgatgagcactgcagtgtgcccatggggtatgctctaagtttctcatgtattaaaaccaagactttaaaaagatagagtgaaataggcatagttatcatttctctgtgagataacaccgaaagagtttcagagagtttatataacgtgcctaaaggctactgggtagaagtgataatttgttcctgggtcctctgggcttgcaaaccacatttgcaaccttgacagtttaaatgataagcctaaggctttctttttcgttttaatttttgtaggtatgggtacttaatgggctcaattttcttttgtttttaatgtcttgtagatataatcttgtaaaattggatgcttttgtaacagcataggcatcagtatatgaggcagattgtctcttcctgtcatcttgggagtactgttttgaaataaagctgctatttatttaaaattaaaaaaagattttgtgctcttccagatgaaagaacgagcaatccaaacactgggctattttcctgttggagatggggtttttccccaccagaaactccttttgcaaggtctgatggattctgtggaggtacttatatttttaattattcaaataaaatgcatttttagttgttttgcttattatcagattttagacgtttgttattgggaggttattaacttactttctgtgtctgtgttatcacccgcatgcagtgccaacagataccaaaagtgggcattggatcccctgaaactgtaattgcagatggtcatttgctaccatgttggtgcttgtcttagtcagggtttttattcctgcactgtagccacccgtggccacacacgaaatgggttcctgagtgggaggctggagctgtatgggaggaaccagagagagaagaaagagatcaagacagatttctgatcaaggcccagtgtttactaagagtctgtgcttataaagggggaatgcccatccactgccacgccaggtttcttgatgctttgttaccaagttgttagcacttagtctgctagagctgttagcattaggtcgccaattccacaggcggtcagctatctcaggaatatctctggaagacaggttcagcctcatatcagtttaattgtaacctcttggaaaaaagcttaatttcgctgctgccgccgccccccccttcctcctgctcctcctcttccttgtcttcctcttcctcctcctcttccttctctttctcttcctcttctgcctcctcttttaaaataatgccaattccagttgtatttaagttaatgaaagctccttagattttatttatttatttgtttgtttgtttatttgtttgatgcacattggtgttttgcctacctgtatgtctgtgtgagggtatcagttagttctcctggagctggagttataggcccttgtgagctggcatgtgggttctgggaattgaaccttggccctctggaagagcagccagtgcttttaactgctaaaccttctctcctgcccgcattgttggattcttaacatgattttaatgtcattgttttattcacatgaatacaaaagtagaataacaaagtgatgacttccccatgaacttgctttatttaattactaatttcctgtttcctcagaacatagtaaacttaggtacttttatcattcctaaatataactataaagttttgattttatatatgtgtgtgtgtctatacaaattatggtatcaaaaataggaagcgtgtaattaacaggtaggtaaacaaatcaattattaaattcctgatgaagattcttaaaatatttttcctagctcttaaggtccccagagaagcttttgagcagagatgatgagatctaagaccttcagccctatttttctagattaagaagcagtagatggatgctccatgaagattgacaccctaaattaagaattgcagtggcctaaccttctgttctgtgtagtcatcgtggtcatgtcccacatgcgcgttccattctttatcgcattcttgtttttcttatgttaaaatgtttgacagtaaacagaaaaatgccagagggtaccaaggcagatccacttccgtgttgatacaatgattgctgtttgtaaaacatcatcagaatttctaaatgaaaatgtaaatatttgagtatgtaactgtacagaattcttaatatttggcctttgaaataatgtcaaatttacagtgacattttaagaataatgcagagaacttctgtatataccctttgatgtagatttaccaagttttagcattttatatttgttttatcattctctacctttttttcaggaccttttggaagagcatgaagagtttttataaaaatatagtggccactattcagtgtgaaattattacagtgaaagtgttatctaagttaacatcatttgctccttacgggccgatgagggactgatggtattgtgctcatttgaggcccagagcagtttaggtcagacatgtgagagactgagctttataatgttcattgatgcctctgaggctttacctttgaattttcccaaccccttacatagacctattatggttcccaaaattaaaaaccaccacatagcgattgtgtgctgagggggagaagccatttcctgaaggtgagaaatctgcaactcttccttagttctccattcctttatttcaccctcctttgcattactgagttagcttcagtgtggccaaaaaataaaaaataaaaaataaaataaaataaagcctgctgagaggtcaagcagctcttttatagaaatggatatttctctttctttcattgtaggccaagcagattgagcttcagttcactattggtgaagccattaccagtgctgcaataggaactaactctgtggctgcccgagatgcctggctggtgactgaagaagaatatatacctcctgctggtatctaatacttacctaattgatttacatttgctgagtggttttcttctctgttagttgcaaaagtaatgttttccccaaaaattgatacctgccttactaatttggtctgccaagaaggattaaagaagattgaacatagctgggcatggtggtgcatgcctttaatcctagcattcaggaggcagaggcaggaggatctttgtgaatacaaatcctgcctagtcaatgttgcaagttccagccagagctatgtaatgagatcctgttggggggcaggagggggagggagaaaagaaaaaaaaaaaaaaggaaagattgaacatgaaaatgagaactttctcagcctcttgtgtctaattccttactacataatgagccttctttgtcctctgctagtcctggaagtacaacagaatttagttactgtgtcatttgagagaccatacatgtatgtagttcttgagcatatggtaacagatccaaagatttcaaactaagatgatgtatgcttgtaattcctgcacttggaaagctaaggcaggggattgcaagttggagaacatgtgggatatataatgatatcagagccagtctgggctacacagcgagactttatctcaaaaacaaagcaaaacaaaacaaaaatcaacaacaacaaaagaaaaataatacaaggtctagtgagaacaatcagcaagttctgccaagcttgatggcctgcgttctatctctggaccccatggtgcaggagcagcttttgcaaagctgacctctgacctctgacctccacatgcatgctgtgtcatgggctctcatgtatgtgcacgtatgtgtacatgtacacaaaaaatgtgaagaaacctaatgttaacaattaaagaaaaaacaatagtgcaaaacaaaaaaatccaaaacacacaaatatttttttcagttgatttaaatttagaattgaaatatattttagtatcaaaccaggatttttgtttttactctttaaagctaaaagaaaaatcagaaagtatttgtattttatcttcttagctgggaaaattgaataagaatattttcatggtaacagtactattgtgaattgtatccatagtgaaaaatagttgctgtacttagtattatagttaacatttaacactgtagtaatatcttcatctactattttgtcatctatcatagagagaccttaaaagaaatagggaaaaagtttttctagtagtatatgtagggtgactgtactatgattggtggaagccaaactagttctctgaggcttctgtttgaatacatatacggtaaagcaagtcagcattttgttgggattgcgaaactgcgtagtaatggggaaagagacaaatatgttatagctggaggaagaaatgaaatccaaagttattgatcagcttttagatggaagtttagtttagaaagattcaataaaaaaatgctgagattgaagagactaggatacatttttttatccaataaactagagtcatttgaataatttaaaagattatttagcttacattagcttctggactttcttggtcacttggattttaacattgggttattgtgtgattgttgatgtaaatatgatttttaaagaaaattatatttgaatattttaattgtaatctttctttgcttattcctcaggtgccaaagtgaatgatgttgtcccatgggttttagatgttattttaaataaacatatcatcagccccaacccacatgtcaggcaagcagcctgcatctggcttctttctcttgtgagaaaactaagtacccacagagaagtgaaggtgagtttataatactcattggatatgtgatgaactcaggaaggatcccaaagtgtttatgaattaaaagtaggaagaaagtatatgaagtatggaatcattaaaaagtagcagaaattttgaaataattaccatgtgaggcactgaaggatgatgatttgattaatactggcaagaaaatgatctaaatgtgaagatgtaaaatcagaagggataagattgggcaggctcattctgggacagtggtcagtctgaacgcttagacaacctgtgtatggtacaagttacggtgatatggacgcctgtaacgttcactgcatggaaaggtcaagactgccttggtcctaagactctctggcctccatgtaccttaccagcaagatgcatgttttcctgaagaggaggtagaacttcagtgctctaatgcctttacttttctttcagtcccatcttaaagaaattcagagcgcatttgtttcagttctgtcagaaaatgatggtaagttgttggtaaatatttgatttgtcaccttcagtgtacttgtattttaaactttaaaagcgtgagtgagtgaattagagcacaaaaacttttgagccatgtcactacaacagaactagccacaagcctttaaccccagccagcgcgtgggaggtaaagggcaggaggaccatgagctccagaccatcctgagttagagatagtaaggctctctgcaatagaattagaaattaatttttttagtattaaaggtaattgtattaaggcaaaagccaatattaactaccacagtaccatctttccactaaagttctaaagtagaggaaatagatattctttcttatacataaattagaactttacattttttaatggagcttaggccttaacattagtgttaaagttttcctgctttgaattactttttcctctttattaaagccaggagaagttgaatatgttagaaatttaaataatagctttaaaacatcttattcagaacacatgaactagtattgcctctatttttctaaaattggatatgggtgtcttaaagtcctaggagagtattttatctctaatataaacaatatatgttgatactctgatactgtggtttttatagtgacactgtagttcattggtattttattagtttatggtcatgattctcatctttattaattgaggatttcttgtccattgacttgatttagttaattgagagtgcttctactttttatatctttacttttgtagcattttagagtaaagagaattacttgaaagaaaataattggctacaagacaaatttcttttagaatagcataattttgtctaccttttttgtagaactcagccaagatgttgcctcaaaggggcttgggttggtttatgagctgggcaatgaacaagatcaacaagaattggtgtctacacttgtagaaacacttatgactggcaaaaggtatagtgaatttaacatttcagctatgaatacttaagacattgggaatattatatggaagaaggataattccaccttctacttattaaggcattacatatcaatgattgtaaacagtttaattatcccagtgtatactgtttacttcagaaaatttcatacttgaatgtcctatgacagttaaagcattggattagaaaacattttaatacctttggctaaaaaaagttaaggtgtggtatgaagaaacttgaatgttattcatagtctaatgttgatgagtacacggaaggagattggttttgtaattgcttgctgctttctgttagttacctccatgagggaagggtagtttttatgtgtgacacattggctgtaattaatctgagaaattttttgcttatatttgattttagaaaatttgcagtctagtaggaaagaatagttttatatcttttataccctagacacaggtttttatcagtttgcaaatggattgtatccaattgtttattgttggtatggaaaaattgaagctaatttaaattctttctgatttgttttagagtcaaacatgaagtttctggagagacagtggtatttcaagggggtggccttggcaaaacacctgatgggtaagtgtgctaaatctaaacacattgatcaactaagggagaataggaatattgtttgttgatggataaataaaaatgacatggaaaaaaaccctactgtcttagattaggttttcttggcctctgagatagagatttgtatgttggaagattattggagaatacccttaggattgtctttgggagcagtgagcagtgttggcctgaagccatacctcactggacactggattcctgaggagcttcaggctaggatggcgtggcccttcaggggtgtcgagccacagagcctgggcctcttgccatacttcttaggcctttatgcctggccagtgagtaatcatttgtggcaggctgctttgtgggaggccatgacctcaaagaccaaagttagttctcggactgatactaggtctagaactgtctgcttctaggaagctgagtcctgaatagacatcttgcaacatagaactacgttaaattcatctaatttttttctgggaatactttctgtgtttgactagtctgcctgtttagtattttaaattaattttgatgttgtccctctttaattattatttcagtgtagttatattgtcatttttttcctcttaagaattgccagataacatgccacttgctctgtcttcctgtgacatttggaacaagagaatattaatattgtaggtggtttatctgtcctgtgctatcctatatcttactgttttcatattcaaagttctttttatatgcttgtttttctaaattcttctgagctctttgttttcttctttctcctctttttttgggtggacaaggtctcattatctttgttgtttttaaactagttggctcagttgaattctttggtacaactacagaggtacaaaccactgtacttggcttctttacgaattaaaaaaaggtgctaatttttcacaatgctatattatacctagaggaaatttagcatagagatactttcaaatcactcatcgttatgagagattgcatacaacatgatgaacttgcaaggtgtctccagagccaccaagagcttcacttccatggaacatgcaggcacattttaggtatcatgtttgttactatcaaataactgataaaaagcaatggagagtccatctggtttacagttggaggctgtaaggtctgtcacaaaagggaaggaatggcagtagatggctgcatggctgcaggggactctgcctcctaacctccttcctccatacaccaaagatccacctcttgtagatcctgccgccttccaaaacagtgccatgaactgggagccataggctcaaacacttgaccttatgggaggtatttcacaattaatttgcaacaggtatttactggcagaaagatttagaaattattgataattgaggtatatgactttttatatacttctcaaactagttttcagtctcctcagtgatgattgtggtattagtaactgagggaaatagaatttaaaagagccctgtaatattgatgctgaaatttatgtcaagccaaagatagctataaaaatattttattgtgtttttctttttgtttctaagtcagggcctttctacttacaaggagctttgctctctggcaagtgatctcagtcagccagatctggtatataaatttatgaatctggcaaatcatcatgcaatgtggaactccaggaaggtaagttgttattttatttcatttcttcaatttttgctggagaacaaactcggcatcatgtatatatgacaagtgctctactactgaattacatacccctatctcttactgaggttttattcttttactccaaaaccagacttgttacattagccttgtagtgccagttcatgtatagttaattttgaaaatctgcatctgagagccagattaccacattagtcattatttggtaaagctggaatactaagtaaggttctatttaggggtaaatttgagaaagagtatttgaagcctttttgtatttgctatgttaacattttattatgacagccatgtataagttagtctttattgttttcagggtgctgcttttggttttaatgtaattgctaccagagctggagaacaactggctccttttctgcctcaactagttcctcgcctttatcgataccagtttgatcccaaccttggaattcgacaagctatgacaagcatttggaatgcattggtcactgacaagtcaatggcaagtatctgtgagcctatgtgttaggaaaactctgtagcttgcctgtggcaccacacaggatttaaaccaaacacccgttgccccttgtatatttgtttcctttcattgctcgtttgctttttctttcagtgattctgtaatatttactgagatctcaaaaatgaaggcaatcataatgttcactggttggatagatagataaaagaacaatagtctaacctctggatatgatctctacagttttccctcctctttgttgggcatttcagctaatctcatctctgttgggtcctgggagcctcttattttcctggcatctggggctttctggtggctaccacagtgggaagagaagcccttggtcctgtgaaggctcgatgtctcagtgtagggggatgccagggtcaccaccctgggtgggtgggtgagcaccctcatagaatcaggggcagagggaggagagagggggtttgtggaggggaaactgggaaagggaataacagttgaaatgtaaataaataaaatacccaattaaaaaaacaatagtgtattacaaatggagtactatatgtttacagggatcactgatgccatggagagtgggtcacaaacatgcgtaaagagttattttagttgggaagacaaagaaatagttaattgcctacactgttttcctcggttctgtaatctgactgttggttgcattcaatcctcctttcagatatgaaggtttctcaggaactttctctgaatactgttgtcctcttagctttcttttactaactcctggacacataaatcttccatttactgtaatggtattactcagttcttccctggctcagacaggacctctactccatccctatttacagagttaacttcctgcatcatgccttcactggactgttactcacatgtaccataaatgtaacatgtccagtaaaaagctgaaaagacacctttcctttgttctcactgttcatgttatttgtccaagccagaaaacttgttatcttccttttttgtctctgtcttataatgcccccaatctcacatcaaatttagccacagtttctgttgattctgcttttctcatgtgtcccttgaacctgctcctgtccctgattcttcccgatgaatagatcaccatcatcctttccttctctgtgccgcatgtttaattatctatatagcagcaaaagtagttttaatagtataaattggattttggttaaaattcttaaatggattttttttttttagttcacatttcccaccccctacccccaatattggaatttgatcccaggttcttaaatgtcctaggcaagtgttctaccactgataatatttccctttaaaaaaaaaaaaaacaacttattttgatacaagatcttgatctgtttcaggctgggcccgaacctttgtgtttgcctcagccactcgaatagcttaggttataggggtgcacagctacttttagcttgcagtctactcttccaaattaatctgccattaatttgttatcaccaaagcttagatcaaactcactttccttctgaaccattatatattacttttgtaccagagtgcagaccactgagataccatcttgccattgaagtccagtgtagtagagcagtgcagtaatgagttgtcagacatgatttaccttaagaggatggttggggacatggaagacagtagccaaaattctctgagtggtgctcactccgaattgtcatggacaaaaggttggactgcagaggtattgtatgtatgccaaggaacagaactgagactaatgagaagccagagtggcaagatgagtcacagtgggctttgtgttgtataaagcccacctgattagactttattcccatacactatggaaaagaatcatcaagttactacaaaatggtgagagatttgcagactgagagactcagggtcactttaataatgaagtgatcagtgttgttggaaggtaaatactggattgttggattttacagtttgtatttaatccttttgctttcattaggtggataaatatttgaaggaaattcttcaagatttgattaaaaaccttaccagcaacatgtggagagttcgagaatccaggtatcacttggaaactgattagctggaaaatttcccttcaaatttctaagaatttttttttatatagtgtaataaaaaattaagttaaaaccatcatattttagttgagttcttcaactattaaactctacttgattttcttaaattagtttatataaacatattaaaaatttgtgatcatttgttaaattggtagacatcaagttgtataattcatggctttatattgtagggtgtacttatatattcagtttgtacacattcagtgcttgttatgtactcagtgataagccagacattgagagcacatagttgagttaaaagtgatgtattggtgtatcatttaaagggactgaattatagttgtaggaattgtcgttagtgatttgtatcatatgtgatagatatatttgaggtaatactagaataatcatgattgtcttagggtgagaggttaggactagaaatataggtaggagtctattattgtttagtatgactgtttggtagtaaaatactggacttgcttgatcatatatttgaaatcaagtttttattttcagctgtttagctctgaatgatttattgagaggaagacctttagatgacgtcattgacaaacttccagaaatgtgggaaacactttttagagtacaagatgatattaaggtattatagaagtaaatctacatttatacatgttcgtttatatatatgtgtgtgtgtgtgtatatatatatttatatatttttttttactaactgaaatcattaaaatatactatagcttttttcaatgtatgtgtttcaaaattctctagctagacaattttaggaaactgctttgtttctaaatttcagctttgatgtaattttttatgtaaaattaaaagtttggttatctttatttaggactcaactgaacagacttaaagtggtggctacagcctgcctttttcaatagaaatttcatgatgctgtagaaacaattaggagcaaatccccgttttgaagtaattcataatgactaaagttttaaattttaggcattcatttccaaatactgtgattaatgcaaaaatatatcagtttttctaggttattttacttatttcatatcactataaaagtgcttagggtgattatttggaaagggaaatggtttgtcttagctattttggaggttgttattttacctagagggactctgttgttgggtctatgatgactgaggcagtctgtcagggccaacgtctgaagtggaagaaaacatttactcaggataaagagcagagagaaggaggaagactctgaggcctcataatccccttcagaggcttgctctcagtgatctagactttcttccctattgctaagattctagtaacgcctttcacgggatccagcctttagcatgtaaaccttttgaggacagtcaagatccaactgaagttaaatctgtactaaaggatataaagctggactatcagaatttgaaactattttgacattcttaaaattagactactaggcttgtttttcttgttgctttctttattcattaggaagttttaattctttgagactcttcacagagattttttatgtatttacttttagaacatatcttatttttgactgttacagttaatagctatatttttacatggttaaaatagatcagatacacatgtctttcaatgggcaaagaggctaacagaacaacatatatttaaacctgttactgaaagttatgttttgctattttatgttaggatctaattagagagtggataagaatgagtgttgtctaatatgtataatggtaggcttttcgcatgttttaggagtctgtacggaaggcagcagaactggctctgaaaactctgagcaaggtgagaacactaatctcacagtgagatgcagtagggtagggtcaccatgaacttgacagtgcttttttagtttttatgtttttgtcatatgaagtagtgttgcgttgtaattggcttcttgtgtagtttactgttcttaacagtgaataagaaagcgggtctccttatactgtgtttagtgtatatgtatcttgaaccccttttgcttttggttccttaaatggtgagcatctgtaggatgccatatgaggtgtacttttgctttgaccctgaagaacacatgactcacttaaatgaagcaatatatgtcttgcttttaatatcttttccaaattgagaagttggcaagctttttgaaactatagtctgccccttagacttaattttgtaatttacactctaatgcttaagctttgtcatcgatcacattacagagcagtaaaagtatattttaaatcctggtgcctttcatgcctaggtttgtgttctttatcagaatattttcctgcaatctgtagtgatgaaatggttatatacacagaacatttttaaaaagtgctttcttaaatatttttcaccatatttttagctcctttgtttctcactctacaaattagaaagtcaaaaattaaagaatagaattatcatcaggttctctgtttagatacagcagtcctcttggactcaatactggtcattcctctatctccctacaaccgccatagtggcatagaaagtaaacttatttttcattgctgatagtgacattaaaaaaaaaacaaaaacactttgtcagagaaatgctttaatagttgtgaggccagcttcactaatgtccctgctctttgtatgtgaggtttgtgtgaaaatgtgtgaccctgccaaaggagcagctggccagagaaccattgctgtcctcctcccctgccttctggacaaaggaatgatgagtcctgtgacggaagtccgagccctcaggtgtggtttggttgaagtgaatgtactggaattacttagtttctagccagtttgtagaaaatgtgttctcttgaatgttagattcctaaacataagaaaaatgggctgaggagaatccgttgaggtaacttaagcatttatgaaaagatgtgggctaaagtattttatagtcatatttcatggggaccttaatttgacgaatattctgagttgcatattattctattggcattggcccctttccttagcaagtgcacatcttcctgttatgcctcatgtcttcagggccttgcttgttgagtataaccaactgtccttggaaaactagtatatatggtgactattaatggcttctaaatctactagctaaaaggcaaatgtggaaattaatgatggttcaggctttccaaacctgaactctatactatactatactctaataggataaaaggacacaacaggatgtgcattctgatgtggtgggataggatatattcagcattgcttatgaaagagccttgcatggtttcagaggcaaagtctacccatatttgctatatagtagctcagcctggcctcaaactagtgatcctctggcctcatacatcagaatgttggcattactggcagaagccatatttttaaaataattgaacctttacttggtttagtgtgtgtatgtatgtgtgtgtgtgtatatatatgtatacatgtatatatatatgtatgtatgtgtatatatacatatatatatatatatacatatatatatgatatgctaaataacacagctgaaataggatcagtacagttaaatgagaaaacaagagaaagactgggactgaaagtttcaagaatcaagctgggtgtgatggcacatgcctttaaatctactaactcatatatagaggccatcagatatctgtgagttcaaaaccagcctggtctaaatagcaggttctaggttagccagttctgtatagagtgaaaccttgtctgagaaagacaaagaaagggagaaaggaaggaaggaaggaacagggggagggaggaaagaagggggaagaaagaaagaaaaaaaaagaaaagaaaggaaaaagatagttagattgaagatggtagtggatagactttgagctctgaatttggattctagcaaactatcatttttttttcacccctctatgtgtatgtatgcttgcttaaaaatatctgtaattgccggatgatggcagtacatgcctttaatcccagtgcttgaaaggcagaaacagtcagatctctattagtttgaagccagtctggtctacagagcaagcttcaggacaggttattcagagaaactgtctcaagcaaaacattgcaagacaaatctgtaattttttaagtgccaagagatgagaaaccctactttccagttgccaagttaggctttgagccatgagtatatacctgaatacaagtgcaaaccatcctcatgattagattgtaggccttctcatttgtggtgaagggaatgagatggtgttttctgtgtgtctagcattaacactcttgtgaagatcagcaaaagtgcaggagccatgttgaaaccacacgcacccaaactcataccagcactcttagagtccttaagtgtgttggagcctcaagttctcaattatttgagtctccgggctacagaacaagaaaaggtaagttgatagcagaagtatattggtaagtactgctgaggtatgatcactaaccatctacaaaatgcctaagtaaaaatttacatgtagactttgatctgaagttgctctgttgtctttgatcagttattaccgggaaggatagaaaggaatcccctagaggcctcctcaatgaacggtttcctaggggcttttaaaattctttcatatttataagtcacaaaccccccaaatagccaatttaaaaacaaaatcaccacttgagaatcttttcaaaatctattggttgctgttttatcctagtaaccttttccttaaagaagctttccagtttcaagtggtcctatttatcaattgttgacctcagaccctgagccattggtgttctgttcaagaaattttcccctttgccaatgtgttcaaggctatttcccactttctcttttattagattcagtgtatttgcttttgtgttgaagtccttgttctacttgcactcgagctttgttaataaatatggatcaatttgcattcttctacatgaagactgccagttagaccagcaccatttgttgaagatgcttttttttctccactggatggttttggcttctttgtcaaagatcaagtgtccataggtgtgagagctgtagtgttatattttgaatgttttttttttttacatacattgtacattatctctttatactctcctagttccagtctgctcatctcctcccacctgcccaaactgagaccttttgcttggaactgtatccactgagctaaatccctaacttttggatctaaagagatatcctagcagttacctactcttacagaggactggagttcaattctttttttttttttttttttaagacttatttatttattatatgtgagtacactgtagctgtcttcagatacaccagaagagggcatcggatctcattatggatggttgtgagccaccatgtggttactgggatttgaactcgggaccttccgaagagcagtcggtgctcttaaccactgagccatctctccagtccctggagttcgattcttagcacccacatttgatacttttctgtaactttgccttttgtgaacatgcacagtcatttgcacatgcctatccttatactttataactcttgttaaccatttatatatttctctgaatttcgtttctattttatacctagtttttaatatttatgcttgtttagtgggatgattaggcctatataatatgtaatgtgggtgtgttctctcagttcactgtttgattgttaatttttataatctactcttataaattacccttttcatttgccttttaatactgttgtttcttctttactgggcattctttcctgtttcactagacttgccacctgctataaaatgtttactagtattaaaaattaggggacataaattctatccatctttttgtgaacctcagcaaattacgtttttgtgccttactctctggatagtaataacctttcccctagtgtaattttgatcaaactatcattgtaaatatgaatccacataataaagttaaaggattaagtggattatacaaacacccaattttgttttgtttttttgttttttttgacaatgttttaaacattatgtagaaacgcaatatattctctttttaagtggatagagaacctggaactaaagaatgctgaatagcttgcttagagccatagtatctttattaataaatacattgttacttaatttcttgtaacagaagggattgatcccagggccttgttcatgccaaactactagtgaggtgcaccaccagccctcatattttgtttatttttaactcttgtctaaatttctgatttttagagatatgctaactttacagttaaattgttaaggaaggtcagcggaaattagaatttgacttccatctgatttacatatcgattgtttacttaaaagcctttagtttggaaataaaaccctttaattagtgtttctatggctaattcataattagttgaatattctgagtatcttgagcttctgcttttcaggatgtaatggacagtgctcgactcagtgctgccaaatcctctcccatgatggagacaatcaacatggtgagtttccaaacacaactgaaatacaacccctttgcatctctttgggtacagttctccagaagagctcatgctgtgtaacatgagacaaacctaaggggctatgttgataaaatactgtgactacagttgtttctttcaaaattcttaagtttttaactggcatatacaaattttgcatatttatagacatttttcttaaccagtaataaaagtaaattttctgaatagcagaatttgtcaaattttgtgttagattaaaaacaacatattagtagatctatgtataactcatatctattaattttggtcttattttaggttcagtaatgttattttattattatttttattattatcatcatcttccgcctatctctgcttgagaaatttctttgttaaagattatgaaggtgtgagatcagagagattttaatgaagtagcacagaaggtgggcagcaggaattgagccatagtgatgtatatctttcagatgctggaaacgtagtgaagagttcgtggcactttgaggctctgggagtctttgcagagtcaccttctgggcatttcctgtagtgattattaagagcttgcaagctaccagaaactgtttgctaagcagatcacaaatgggacaaaagtcaggttttagtgtccaatggggactgctaagagtcgtatgttttagttttactattggggcaaatgagagaagtatttagcaagcatcatttggaaatattcataaataatgaagtgtgtgcccgtattttaaaaaaatataacaggctgtggtaaaatcatctaagaaactgacttatttggggtctagtaggctcgacttagtctggaaggtcagttttaatctaggtaatttgcatttgccatagattgatagagggggattgaaagagaggtaaccatttatttcctcttagtaaattaatgcttttcattattttgtttttctatttttaatgttgaaccatcagtgagtgaattttctgtttgtagtactgtagtagtttaatttttccagagcaaaatcaaaccagtgattttcaactttctattaaaactagtaggttcatattttgatataggtagtttttaaataaagatatggtactgacttacttgtttaggcttacttttatatttattcttttctcaaagtgcctgcaatatcttgatgtttcggtgctaggtgaactagttcctaggctatgtgagctgatcagaagtggtgtaggtcttgggactaaggtaagatttgtgtgtgtgtgtgtggggggggtatattggtgtttatgcacatgcatgtggaggacaagagtatctttattttagttttaccttttgggtatctcccactattgctttccacattatcttttgagaaagattctattgctgaacaaggtgctcactgattgcctaggctggctgccagcaagctcagtgaatctagctcttcctgcccccacagttcttaagactacagatatatgaacccagatttgtatgtggatgctaatgtgatcctgggtcctcatgcttgcacagtagatacttcacctactgagccatcttcctagtccatagaagtgtacttttataagagcaaatatgtgtttgtgataagttttttaaacaacaaaaaatgaccaccatgtttaacacttaatgtttctggccgggcagtggtggcgcacgcctttaatcccagcactcaggaggcagagacaggcagatttctgagtttgaggccagcctggtctacagagtgagttccaggacagccagggctacacagaaaaaccctgtctcgaaaacaaaaacaacaacaaaaagttaatgtttctgttaaaccatagtgcatgttaaatattttgtttctatggttacatgagtagcctaaactgtgtaactgattttaaagtatgtatgtatttattttagataaggtctcttatagcttagtctagtctcaaacttcctatactgggaggatgacttggaacttttgatagttctgcctgtatttcctggtgcagggattacaagtatcttgttgtgtactgtcatgcttacatgttatcatgctctgcttgtcttgctgtttttagtacaatcttttatggttaccatgagagtgctcttaaattttctgatactaccggttaatggacaagctcacttatctgttaaagcagtaatcattttagacagtattagaagtttccatgtaaggtttaatagatgtttggatagaaaaataccatttgtttgtttgagaatcttaaaaaggtcagatactcccgtcatctgcttatttttttcctactgttaaattttagttgttgttttagcccaaatctcatggtgtccccttttctttttcggtgtttttcttttttctatattcaatcccagaggggctattagacttcatatgttttatctttaaattattaatgcctaaaagtagtagtttggtagtgcatagagacatcaaatttagacctttgtttttgtgaccttaaaggggggctgtgccagtgtcatcgtgtctttaactactcagtgtccccaggacctgacaccttactcaggtgagtttgatatgtgtaggagcactgtttcatgattggttatttcagaggtttttttttttgtttttttttttttggtttttttttttttaaattttgtttttgtttttttgagatgggtttctctgtggctctggctgccctggaactctctctgtagaccaggctggccttgatctcagagatctttctgcctctgctttctgaatgctggtattaaaggcgtgcaccactgctgcctggctctttcagagttttaaaaagaaaattactgggtgatgttggcttgctttgcctctactgaaatctctgacccaatcattctgtaagcagacttttattgtgtcatcagctaagtttgtcagtgcataaagatgtaaaagtacctttcattctgcagaactttgtaactgttcatagctaattttgcatgagtgcttttctaaaaattccccttctagataggcttctaggtgggattttgtatctacctctcatttttgtacctttttcacaatattctggacagaagttaaattttaatttttgatttaaatgaaataaagaaaggaggtagcacaaataatatttaaaagacctaacctactatgcagtaaacctgattaatttcagggttatggggttttagacctaggaatataacataatatctggccaaccacacaattgactgaatttattatttctgtaggtaaacttatgagtgctttgcttagtggtctgacagatcggaacagtgtaattcagaaatcctgtgcatttgccatgggccatttagttcgggtgagttaactttcttattcagttaagcacaactctggtaattatacagaaatgagtaagaatgcttgcttttcagacttcacgggatagcagcactgagaaactgctacagaagctcaatggctggtacatggagaaagaaggtaccttttttttttttttttaatcattctaaatttagacattaactaaataagctgtatattgttttggtggaaacattttaaattgttttatttagatcatttatcctgaaaaatagttaaatgctaacaaaattttggtttctttagaacctgtctataagacgtcttgtgctttgacaattcatgcaattggaagatacagcccagatgtattgaagaaccatgctaaagaagttctgcccttagcatttctaggcatgcatgaaattgctgatgaggagaaatctgaaaaagaagagtgtaatatgtggactgaagtgtggcaggaaaatgtacctggttagtaaatggtggatgcagagtaaacgtgtttcctgagaaacacagctggaatgttgactcgtgttgtctgatcataacgctcccaagaacttgagcaagctatgtcacattttgagtgacatcctaatttctaagtttgcaaagtgccacgcagagctcttgtctttgacttgttacttactgtgtgagggagtataaactgtctaagcaaaggagacctttatgtgtaggttagctgagtgtaattgtgactttatgttggcttagggtacctttatagagctgtgtttttaaccttgatacacattatgatgatgaccttttaaaataacattcctggcagtatgtccaagttcatacattcctactgttacaaaaagaagccatactacccactgtctctcccattagcaggtggtatgtttctcagttgacagtcagtgctttaatgagtaacactgacttactcacatttaaaaattatcttttcaatttttttttcacttaagaggtgttatataactttttttcttctaaatgtaggctcctttggaggtattcgattgtacctgcaggaattgattactattacccagaaggctttacaatcacaatcttggaaaatgaaagcccagggtgcaattgctatggcatcaatttcaaaacaaacaagctctcttgtacctccttacctggggatgatcctgagtgcattgatgcaaggcctggctggaagaacatgggcaggaaaggtaaaggaactcatgccgaagagctgggcctggagcttcttgtagactaggaatcggattttacgtgacttggattatttttgcagctaggttttctagctagtggaggactttgcttgattatctatgatattttatatcaaagagtgtcccatatgttcttttttttttcttttccattttttattaggtatttagctcatttacatttccaatgctataccaaaagtcccccatagccacccacccccactcccctgcccacccactccccctttttggccctggcgttaccctgtactggggcgtataaagtttgcgtgtccaatgggcctctctttccagtgatggccaactaggccatcttttgatacatatgcagctagtcccatatgttcttgaataagtctaaagattgataatgtttttacatattcagctttacacgtcacctcttaaagtggtcaccattttgtgtccactgacctgagtgccctgagctgcttttaatcctaacatcaaagatgctcattggggaggcttgagagttgggaactctcaaggactatagagaagtatgcatagtgagcatcctgtgcggaacatgagattggggtagtatgttttctgttttgtaaaggccactattgcccaccatagtactgtggacatagtactgaatagcctgtaatcttggttgctggttcttggacctttataaattaaagattcatgtgcatagtgcattaaaggtgagataaatgttagtttgttgttatggtcgtaaaatactcatagggtagtaataatgtagagaatgtaacatgtgggtttaatagtatttcttcatctttaacttatcaggaagaactattgaaagccattgcctgtgtagtgacggcttgcaggtaaatattcttttgttgaacatatcattttttgaaatgattaaagctgtagcttttcttaactattctgatgtttttgtgtgaatcctgtagtacagagttggaaaagtctgtgcccaatcaacccacaacaaatgaaattcttcaggctgtcttgaaggagtgttgcaaagagaatctcaaatataagattgttgcaatcagctgtgcagctgatgttttgaaagccaccaaagaagacagattccaggagttttctgacattgtcatacccctcatcaagaaggtaatagctaactgtgtcatcattcaggtcttcagctgtcctgtctatatgtttttattaggacaagtttagttgtaaaatagcggaaaaatccaaaaacattatgcctcagacaagatagaagaagtttgtctcttacttgatagatggaagccccataaagtattcagggatcctattcttagacattattctcatggtctatagtttatctgggtcccaggcagatgacagaagatgaagttagggtcacagtgagctcgtactttctctcaagaaaagctctggaaatggaaacatcattttgattgatgtcccactcacaagcacttaaccacatagtcccagttggcagcagatgaggctaggaaaggtaagctttcatgtggacatttgagtttccacctgttggaggaggatgagtaccaatgtagtgagtgagcagccttgaaaacaaggaatactatgtgctgtaaagttcatgtctgcattgtcctgaggaaaattttggttagaaaaaagatgactggcctaatttgaaaaccactgtactcagtgttttgttttgttttaataaagtgggcatcataaggaaggaggaatgtcgttggtctttttgtttatttgttttggttttctgagactggctctttgttttattgtagtgctagctatcctggaacccaccatgtagctatgtagacctcaaactcacagagatccatctgcctctgcatctcaaatgctggaattaaaggcatatatgccaccatgcctacttatttttaaagcatgaaatatttttaagtattcttatgtcttctgttgctcctacttcatatatttgttttctttcaataataaggctgacttggttatttcgctgataatgtgtaggagatttatattttaagtggattatattgcctacaagctgattgaattacttgtgacctttttaccagtttattaagaatttgtgtttgaaacattgccaagttctttccatctttatttaattctcttgttccaaatgtaggtctttttaggttatgctcaacatactacataattttccaacttttatatacaaaatgtttaaaagtattcctcagccaggcagtggtggcgcacgcctttaatcccagcactcgggaggcagaggcaggcagatttctgagttcgaggccagcctggtctacagagtgagttccaggacagccagggctacacagaaaaaccctgtctcgaaaacaaaacaaaacaaagtatttctcagctttattagatgtgtataattttaatacaaatggagaactcctgttagagaactcagcatttagttcttggtcagtatctcctgtaaaacactctgcttgttttaatagtataactgtaactttattagaattccctcccctcccctcccctccttcttctcctccctactcctccccttctctctctttatcccctcccctccctctcctctgatacattctagaactcacttgaaagtatgggagtccgtaccaccaaagctgaagatgaaaatgagaaggaaagagagctgcagctggagtctctactgggcgcctttgagagcctgggcaaagcatggcccaggaacccagacacccaacgtaagcactggaacacaaattttttagaagtgctataaccagaagtcacttagtaacaacacattttttttttctgtgtggcaaagtaatattctttagatggtctgagtattaatagtgagaatttctctatatccattttactcattcatcagcaaataagtacatggatcactgtattgttagggatagtgcaagaaagtatcacaggagctagagagctagcttagcattcaagcatacttactggcttctcttccagagaacctgatgagtttgatgcccagtactcacatactggctcacagctgtctgaaactcctgtctcagggcatccaagggcactggacacccatgtgaagcagaaatacacaagcagacaaaaacactcatacaaaaaataaataagattaaaaataaaataaatctttaaaagtatcatggactggataacttaaataacaaagttagttcccccctcccccccagctcccagttctggcgagtagacgtccaagatcaagtcgttggtagggttgctttcttctgagatttctctctctagcttctgaatggttgccttttctgtcttcatatggcctccctctgtgttgctatgacctgatctcttgtaaggggattggattagtatccacccatatgattcttttaatagtttatcttctagtacagtagaataatgttgggatgcagttgagtgcataacaaccatgaagtactttatgtagatagtttgactataaaaagagttttgttacttttctttgtgttcctaactattctctgatagactcacaattacctctcaaaatcggtcttctcagaatcaccagccttgacatcatgtcttcagtaagctagtgatatctgttttattgagaaactcatgacagagattttcagaattaaacatatatttatagaagattaattaagccatgattattagttcaagttgtagttataacacattgacaaggtcattaagtttgaacagatgctatttgtcttgttctgcgaagacattccgtcccaatgatagtctttgtgttaattatttgtaaactcaggcataacattttctttgagcccatcattctttgtttaacatatgaagaatttttcaaaagaagtcatcaatttgtgagtggtattatggactgtagtagaaactgcatgacaccattagcatgagtaactcttgcttaatagccaaagaaagttaaaataagaaattccgtaagaaggacatcacacacaaagacataggagttgtacatttgtttaacagttaccgaggagaaccaagcattttctctaagaacgtcagtgttgcataatggcttctcacatttcacagtgtcagctgtaatttctggttttgtccttttaaattagagaaataaattacaaggtgttatgaagcaatctcaaggtagaatttttaaccccttcctctcatgttttatatttaaaccttattaaattttatagtaggtgtccatgttatggcccattggccacatgtcaccagggtagctatgaatgtggcctgatgttgacgtgatagaagcttggaaagccctgttctaagcatttaaaatcaacttctatttttatttttgttgagtttatactcctatcagtatagtattaattgtataatgatggtgacaattgtgattgggactaatttatgataaaagactactaactgttgataaacctacagttggctgagtacttcagggtgcttaagggttccggatcttttggctttataaagggaatttacaatggaaggggagtgtagctaagctgttggctctgttctgaggaggacaaaatgccttaagagcaaactgttagaataggggtgtgtgtgtgtgtgtgtgtgtgtgtgtgtgtgtgtgtatactaatgttaacagtttggggaaaattctgtgtctttagttaaattgtccctcacgttactccacttttgtctttgttttaatgctactttctgttttctctccacctcttgtcatctcccactcttcacatacttcttcctctgtcccacttggtcatctgggcaggttgttatcggcaggagctgtgcaaactgatgtgtgagcggctaagactcagcacgtggaaagtgcagctaggtgtcctccagtcaatgaacgcctttttccaggggtaatgtgcttcatgattcaggtttttattttatctccctgttgaatggttttctcatacagtatatcctgattatagtttattctccttctactcctctcagctcctccccacttcccctctcctcttatccactccttttatgtctctcaggagaaaagaataggcttctaagagataacaaccaaacgtgacaaagtaaagtaagatgaaacagaaaccatcacagcaacccaataggaggaagagtcccaagagctttcacaagagtcagagacccacttgttctcacagtcaggagtcccataaaattctaagctgataactataaaatatatgcagtggaccaggtgtagacccatatagccctgtacttactgcttcagtcttcgtgagctcatatgtgccttacttgattttggttctggggtcttattctccaggtgtcctcctcccttctggctcttaacaattattctacctcttcctaggtatttcctgagctctgaggggagggatttggtggagacctcctatttagactctctttccacataatgtctggctgtgggtctttgcatctgttcccatctgcttctgatggaagcctctctgatgatgactggataaggcactgatctataagtataacagaatatcattaggagtcatactttttattttctttttagaccagtagtgtttggttttacactgggtctctgggctatctgggtccctggttcttggttacccaagcagtgttgggtatgggtttcttcttgtggagtggtccataagtcagacattggatgaatattcctacaagttctgtgccaccattgcactagcttattgtgcagggaggatggattttagatcaaaagttttatagttaggttgttgacttttctattttggtagattgcagtgtaccttcccaaaccaaagagacaagaacgtagtatgaacacttcatataggcaccagcttatcttcaccatgtttaatgacttgtgtgggtatatcctctccattgggcccctgctttcattttgcattgaaccacccttcgtcttagcagcaaccaggttgtttggggatttccatgggatccccttgaccaacagctcgattgagtacagcccagtcctgttactgggatccttgcctggctacaagagatggccagttaagacttggtatcccccattactaggagtccttgttaggatcgccttcataaagtccagatggtttccactgcagtaggtttccacatgaccatccaggtgccccccagttccagctctctctccccatactttccctccactctatctcccctataccatgcctttccctgcctgctcccatcctcattctccccaagtctgcctataaaacctattttcccctctcaggtagatccatgcatttcctcagacctacctcttcctttacctaacctctctgggtctatggattgtagcttggttatcatttacttaatggtaaatatctacttctaagtgagtatatacaaaatttatctttctggatctggattacttcattcagaatgatttttctagttccatccatttgccttcagattccatgatgtcattttttaaacagctgagtactccattgtgtaaatctatacatgcttgtaatcaatttagatattactagtatcggaagtaacatgatgatatgtacggatagaagttatgctagaaaagttttcaattgtatatatcactttcatacttgaaggttaatgcttctggaagaggaacacgcagatcctgaagctctggctgagattcttctcgaaacatgcaaatcaattacttactctttaggtgagtaaggaaccagaacttgagtgatttgtcattgttgttgttgctgctgctgctgctgctgtttattttgtttttggtgctggtgatcaggcacagtccttcatgctggacactctaccactgagctacattcttacccctttttcattctcagttaggtctctctgtgctaccttggctgagattgaatttatggctccagtcatctcaggatctagacttctggaacaactactgactgttctgtttatgtgccatatgtcccccaacaagggtattttatgtagcattacagtagaactttagatcgtacctttacatcagtattaacacttacttagaaatacttgctagtttataaaacagttgttaaaataggttaggtagtgcctgtgtatacttggttttacctgagatgtttaaaaacgtgttgcttacaacttgtccttttattactaaattcttcagagtatgttcctttttataacatcattatggtatcaaatctatacagttttgcttagctctgcatctctccacctaccctcaactttagttgctcagttacatgtaatcccagctaaacatccccaaccgctctcttgtaggagcagcctagggccccactgtctgaggtctcacatggttggttggtcaccttttctccctcagaagcgtagcaaactcacacacactacctcactcactcacacacacactccctccctcctcccttcatctgcctctttacctaaggagacccggaagtcccacctattcttcccactcagcaattgactcatgtctttttcattgaaagatcaagaaccaattggggaatggggccttagcatcagaaccacccctacaacatactttaagattattcaaataatctcctcttcaaaagtgcatctaaacaatccataaaaatacactaaggccatgtaaatgtacttctcttccagggcttttgctttagatttttacatgcattgatgattcttctatgagctgttttatttctgtgatgaattttacaacttttgcccttcgtcacattaaccatttagtagctggcattttattttgaacaagattcttttctctttttctttatttatgcatcattaactggtattaatttataccccttaacttctcagtgctttatatttacttttaggatttatttttaattatgtttatgtacaagtgagtactaatgtcaacagagaccagaggtgttaggtcctcactgaaattacatgcagttgtgagctgccaatgtgagtactgagacttgaaatcttggcctctgcaagaggattacgagctgagccatctcttcagcccctgattattttgttaattagtttgtttttttaggtgtcctagcatcagcatgttttcaagctgattctcctgtccttgtgatgggtcactatcagttttcccaatacttcttccctgccatggacttggatacatattaatttttgttagacagttgatcaaaaaatttgatgccttttataaaatagtgtgtaccaaccaaacttgttttatttataatctttggaaatagcttgcttttgtagatatagaatagaaagctaacaaaattgtccttttaggtttcaaggtgtccctagatgatattcttcagtaaaatgaggagaatcatgcagatcaagacttgtcttagttgtaacataatgattgtacatttgggataatacttttgaatctcgaatctctcacataaaagttttaactttttatcattcagtaacatttaatgttggaagttgtgtttttaaagcatactcttgaattgcatattttttttcatagaaaataagacctactcatctgtgagaacagaagctttatctgtggtagaattactgcttaaaaaacttgaaggtgagttcttcataaatttgattagagcaccataaatccaggatatgaaacacttagaaaatttttttatttctgtttttgcatatatggtataaaatacatattaatgtatctgcacatacaagtagactatagagaactaaaatcattaaattttaaagatttcaatctgttctttatgtttatgtatttctaatgagttactaagctatattatctcaaagtaataaagtttgtttctgcgtgaactctgacatactcttggttaattacaagaaattgttggcagtgatagcgtagacttgtttgtgtgtaaataattagacacagcaagaagagagtcaaattattttatcaaagacacccacttgagttaccatatttgacaacagcttgtttttagtcctatttcttttctttctccttattcttcttttagaaaccttataaattttgtgttatgtcagtggtagaagaaaaacagctttcttgtttttcttcccagagttatatatctgttactggtttcaaaagagacccctcttctgtgttcacttccttctctttttcctattcctgttccttcagttaatagtgaagaagatgaaacagttttcatcacagccttgtgactttggtatttgtactttcccctcttttttctgctgatactagatatcatatgatctatttttttcttgataaaataaaacagcataggcacttagccatatggctgaattctcagttttccaggtaaatactattatttctagatgacaaaagtgagggtaaaccgctttcttgaagctggaaatggtggtacaggcctgtaatcccagccttgatggtagagataggaagataggagtttaaggccagcttgaactacatgaaaccctgctacaactatagtacttgcttgaagtcacatcactagaagataacagagctttataaatggagttaagatttcctgtgcgttcttgtttttaaaaatatctagtatttacatggttctctaaagctttcttgtaagaaaggagtaataaagtgttaaactatacaattataaaaccttttaaggtacttttttcatgtatgttactaaatagcattctgttgtggctgaggtaactgtcttgctcccatgccttgatactccattcttccctctgtgctgtggtatagttcatctccccatgccttacccacacaagggaaagggtggaactctctgacctgctttcaggctgttgtcaggaattgggcttggacatctgtccaacctgtgattgttatatactgttctgttattatagagttgctgtgtggttgtttggggagtagaatatatggaaatttttcttttttttaattctgtaaagattttctattttctttccattcagaagctaaacaatgggaaagtttgacagcagaatgcagaggacttctgattgagtctttagctactatggagacagacaacagaccagagctgcaggagaaagcctcagtattgaagaaaacacttgaaagtctggaatgaatgagaaggggaagaaacaaacaagtgccatgttcttttgggattggaaatggtggtattttaaaaaaaaaaaaccaagtgggggaaagtaaaggttactctgtagcatgcatcattccgtggctgaaataaaaagaaaaaaagccttaaattttgctccttattagctttattttacttgtctttaaagtctgtgggtaagcgagcttattaacttgggtttttgatatgtctggcaaccatcattgctaaaagaactgaaactactataaatgaaatacaggacaaacaggattaacatcttagaactacatccatgttaaaatccgtgtagtcagggatcctgtaaatcactcgatgtgtcaccttacttcttgcactccctatgaagcaggattggggatgacaaagcagctttctgaggccaggagccaaggccacagacccaaagtttaatatcctgtcttggatattttctcaacctgttaccaaaccagtgtttactctgcccctatcctagaaactcccaaagtgaggtacatttagggagtcatacaatacttcctatactagagctaaactgaccctaatcactggattcttgaagtcacatgctctgcatttctcgtgcatataggtggtcaatttttaggaaatggttgttcaggatgtttataggttgagaataatttgagttccataaaattttgacagatgtccttttactggaagatgaaaatagattggagcaagattagagcaagtctgtctgtatttgtgatcatgtatttttccaaaatctaaaacagcagtaaaaattagagattaccttgatttagaccacttaaaaatcttaaaactgtaacagtaacttaacattttctactcctaactgtcatgcatacagtgtgacttggaaggacagatggaaagtcttttagataactgagaatttctgttttttaagtgcccgctctcaaattagcatgataccacttcaagtaaactgttgttgccagggtctttttcctgctttctgctgctcctgtacctgctgaagggtgcagggttggtttaacttaggtgtctatagtaagctaaaaactctagcttgtctttttggagcacaagactgatttatatattcagtactatctccttgatgacatcaacacctggaatctttatgttcactatttttggtagaaactccatgtttagtttggtagtctccagacgagtgtatttcaaaaaatttttaactgtgactcacaataaaaataacttaacatttgattcataatgtgtgtgtgtctgtgtgtgtgagtgttggtgtatgtatgtgtgaatgtaaaacctttaactgaaatgtttcatgaagaaatgcttagttgctaagtttgatagactttcatctctgtgtctcactgttgtaaatgttcttcagactcactaaatcatttcctgattcacaaactaggttgctatttaagtttgaataatactgccactgataatacctaaacttctactgtatttgagactgtttctgattgaaaaaggctttctaactaaaatgttcattgctcactcagtatcatcttggctgatactgggctgtagtagtgagtttgtagaacatcatgaattttaaagaatctgttgtagaattgcatttaagaatggctttcgctttagtgaaaaacaaatggcttcaaatgttttttagaaagctctggcctctcgggatatgatgggttttggaccagcattggatgcactaaggacctacctgactttaattgttgtatccaggatgcttccttggcaaggatgcagtgcaggtcaagttgttgttgaagatgagagggtaagggcaagaataatgtacttggtttgtagcaagtgttgaaacctcatcaaattttatgcttttatagtttcttgttatttaacattgggggtttcccttggtgctgagatggtgctaagacacctgaaccttagtgcaattgcattacatttcttttacgttcctgagcactaattatatacttaatacttaattatatacttaataccttcatgttcgccagccccatcattttcacagctagtaatgaatgctgtgttactgtttcaaatacagcttatgtttgcgatacatatatatgtttattttaatcaggactctctaattgtggaacacgtggtaaaagtacctgtacatgcatatatcatcagtccttatttgccaaagctatctcgaatgacttgatttcctctctctattcatttctgtttgccatacaaatataactagtttggaggacttgttccttattcctgccattagtgcagtaactgtatctttattgagacatggaaaagatacctggattgtagcagttggattaaccatgaaaatggtctacagttttggtggtcaagagtagctgtttgattgaatgtttgtgtcttatttatagttcctaggggattttgtctataacacagtccacttaagtaaaagggtaccaaatccccattgctttgtccttcttttttttttttttttttttttttttttttttaactcatgtatttacagtaagaaaaagaataaagatgtgacctcactggttggtgccctatcagcagttgtgctgtgtgagcactacctgcccttgtggaacatttctacctgctgctgtcacagtaattcatgctgcttgttaagttcagggagttattttgacattggcacttactgaactgtgcaatctgtcattaaatggatgtatatgtaacagatttttgtattttatatgcaacttcatagatcctctgcaatatgtacttagctacctaagcatgaaatagacttactggaaagaaaaaaacctcactccccaaagatattaaatggtaaataaaagctgcatgacctggtgttttgaagtagtgcttttagtttttactagttccgcaggaaagtaatctgactgctaacacattgactagctcagcaaggagagaagccttactgcctggtgctctcagctacgtctagttaacagttgcaggcttaaatgtttgggattccaagtcattatgaactgctgctgccacatcttggaagaaaattatttcacgatacagttttctgataaaagtgactttccatgagcaagtggaaacaacaggcggttctgttgatcaaggtgaacatatatcactgttgagagcatacttccagtgtggaagataggattaaaataaaacatgttgcttagtcccagataaacgtttaccagcctgagctgttaagtgcctttagtaatcttatactggtttcaatttgatgagaaagaatgttacaaaacatggaaataaccagtctttcaaatgatgtttatagaaatgtgtaaccgttgtaatggtgtgttcagggattttggatttgcagggggcagaggggagggtaagatggttgatgaaatgttttcactagatgactattaagaagaggcgaaactaggatattctcgggaaagaacatgactaatggtaaagacagatgaaaagcatggaaaatttgcaatgtgatgaagaaaataagcagctcacaactctaaccctggctttcttgcctgggagggggccatgtagctgcaaccagaaggtaagtcaggcagctctgttgatagcagattgacagctctgaagaagatacccatagtcttcaaaagccttaaatatggtgtgacagtgactcctgcactgcaggctaacataagagaaggaatcttccatttttctgtacatctcaggttgctttatagccaggtacctttaccttgagagggaacctgtttgacatggagcaaccttggagatgtgagaaaagacatctcaaggataccctgccacagtatcttcatggcaaaaggctgtgagaggcagctgtgcagagggtcagattttaggctttgaggagcatgtggaagttgtggttgatcctgccttctgtggctaccgctggttactgcagaggccttgacaaatattgcttagcccgagacttgccttttctgcatgtgcggtttgctgttaaacgagacagttgggatgggttactagggttccataaccttctccctacctcagggtgacttatagctagagaaggtaatcccagcagagaccgctagggaatattttgaaaacttaaactgggagatttagaggaaatgaataaacatttagatacatatggcatgccaaaattgaactgtagggttaaaaaaaaagtcacatgcaaaagagaggcagtagtgttttaggaaaagagtcaggttcaaagtgtcattaaacacatgcttgggggaaatgtgggaaacaagtacttttctgattcagaaaagtggtcagacttacgaagatgcatcgctatgggtctgagcaattgcactaagggaaaggggtaactattcttcctatctctgtaatgtggtttaaggtaaagcagccttcccagggcatgcatggtcccttagtcgggtgattgactggcctaactagaatgttaggtctccactcaggccagagattccattctcagctagaagtaatgcttctcattgattaggaaatgggctgaaattgggggcttggggtggggtggggatgttgatatatcctatttttaccagaaacttcagtggtccagtcctgaagctgctcacagaagcatttagtgcctggaatagagttttccttaaagacaggctccaggcagggggcattcatttaggagataaggcccctgtgttcccttctgatattcctggctagagaaccaagggcattgctggaactgctgcagtccccaaaagggatctgtgctctgagctgctttttcaatttctattttctgttctaaatgtgattttacttagaagaccccaaaggcttacagctaatatcttcagcaaagtattatgctacaaagatcaacatagctctccttatataccaataatgaacacgctgagcaagaaatcaggaaataattacactcaacagacaaaacccaacagaaaaaacatacaagaataaacctaatgaaaggttataaagtcctctgcaatgaaaactataacactgaaggctctagaaaatgtaatgttcatggattgacagaattcagtacataataaaatgaatatgctaccaaattcttcacagagctagtcctaacatgaagcaaaagcacctcaaataactaaagcagtccagaacaaaataagtaatgccaaaaatatcatacttgttttcatattatactaagaagtgaataaaaaatatgatgctaacattgaagcagatacatagaccaatgtctgttagttacacatctggattacaaacggtgagcttgctcctgtgcatgggttggatgatcgagaggaagataaagttttaacaacttgataactataggcattagatttgctttatcaaatatataatggtacacaaatggatttgtcatatctaaaaaggtagtcattgttggctgaaaaattgtaaaatgattgattagaaatatcagaaattgattagaaatttccccaatggaatcaaatcatttgttttctttgggtttgtgttgctattaaatggaaattagtgttcttgatgtgacttttggccttatttttggtaccaaatattatgctacttatttttatgtaattaaaactatattattgtgaaactttgaatagtacctactgctttttgtacaagatgatggaatatttttaatgtaattttaacaaaatgagttttcctttaaatctcatttttaaagaaaaaaaggaagtagaatgccaaatagagtcttaaggacttagtaaagtctatgaaaatcatctcacttctgtattaaattacttcattagcaaaatttaattattccctgatttggttcttaattgtgtcattgtataagcatcgagtccatcttactactgtgatgtaactatggctcacagggcaaatccagcctgctccctgtttttatagataaagtatcattggaacatagcagggtctgtctgtttacaagtctattgctgcttccatgcagaggtgtctggaattatgacagaaatcataaggtccaccaaacctgagttctatctcagaattgatagaagaaaatgagaagggtaaggcatacaagtggatctgtttcatcactagttcctttaaagcttacttaaatagactagtattctgtgagtgcttttaagttcatcaaaaactggaaatcagtttggcgattcctcagaaaattggacatagtactactggagggtccagcaataccattcctgggcatatacccagaagatattccaacttgtaataaggacacatgctccattatgttcatagcagccttatttataatagccagaagctggaaagaacccagatgtccttcaacagaggagtggatacagaaaacgtggtacatttacacaatggagtactactcagcagttaaacccattgaattcatgaaattcttaggcaaatggatgcatctggaggatatcatcctgagtgaggtaatccaatcacaaaagaacacatatgatatgcactccctgataagtggatattaacccagaagcttggaaaacccaagatacaattcgcaaaacatgaaacccaagaagaaggaagaccaaagtgtggatactttggtccttcttagaaggaggaacaaaatacccatgaagttacaaagtgtgtaacagagactgccccacttggggatgcatcccataaacatccaccaaaatcagacactattgtggatgccaacaagagcttgctgccaggagcctgatagagctgtctcctgagaggctctgccagtgcctgacaaatacagaagtgaatgctcacagccatccattggacggagcacagggtccccaatgaaggagctagagaaggtacccaaggagctgaaggggtttgcagccctataggaggaacaatatgaactaaccagtatctccagagctccctgggactaaaccaccaaccaaagaaaacacatggtggaactcatggctctagctgcatatgtagcagaggatggcctagttggtcatcaatggtaggagaggcccttggtcctgtgaaggttatgtgccctagtatagggtactgccagggccaggaagagggagtggatgggttggtgaacaggcgatgggggaatggatgggggttttcggaggggaaactaggaaaggggataacatttgaaatgtaaagaaaatatctaataaaaagaaattgatttgtgatggttgtcatggattgagacctgtgacatcaagtttcagcaagagaaaagatacttattttttaaaatgtaacttttttttggtggttgtttttcgagacagggtttctctgtgtagctctggctgtcctggagctcactctgaagaccaggctagccttgaactcagaaatcctcctgcctctgcctcccaaatgctgggattaaaggcatgcaccaccactgcccagtaacattttaatctttgatttttaaaccatatctatctgttatatcttccactcaaaaacagtaataaggtaaaaaaaaagtattttagtcaatgaacactcattacatttgataatctgatgtttctggtgtactttaatttagaatgttacttccttatacagtccaggtcaagtactatatagaatattttgtaacctaggtttctctttctccaataccacattttctatgaataaaaattcacacacacacacaaaagaaattgagttaattatacagataactgctcacaaaggaaataccatgcctagatggtgaatttgaccaaataccttaaatgctacttcctcctaaaaaacataagagggagtatttcccttatcattttatgaggccactattagttaccctgataagcaaactgagaaagaagtaagatgaaaaactgcagattaaaatttcattataattacccgcaaaatgctagaagccaggtgaagtaaaagtattattcatcataaccatatgaaattatcccaagaatataagattgccttaacataagagaattagtataatgcatcataattaaaaaaaaaagatacacacctcatgatatgtccactggatgcagaaaagtgtttggtaaaatccagcactccatgagaattttttaccattaggaatagaagaaacttcataaacatggtagcagcatcaacagcacactcagcatacagtattaataccacatcactgtacaacgtgggattgcatggtccatagtgatgaaaatctgtttcacgctaagatcagaaatgggattcagatgtttactctttaaaaaaaaaattctgtgtatgagaacactgtagctgtctttagacacagcagaaaagagcatccgattccatttcagatggttgaaagccaccatgtggttgctgggaattgaactcaggaagagcagtcagtgctcttaactactgagccatctctccagcccatgtttacccttattaaatttatgcaacattgaactgacagttctagctggggaaattggtgaagaaaccaacttggagaagaaaatgaaagaaaatttccagatgatgatattaaatatagtgaacattctaaataatcagaaagtatattagagctaacaaaccagtttggcaaagcagagaatacaagactgatttataaaaatcagtttattcatatataatgtcaatgggcagtctaactgaaactaagaaaattttcatttgcaaaataattttttactcaaaagaataaaaaccttaggaatggatgatgaaacaaatgtaaaaattacacaatgggaattcaaaacattattgaaaaaaaagaatagaatagctaattaactgagaagatagtctgggatcatggttagaagacttactattgttaactcttccaggttcaacacaattgctctcaaaattggaaatggattctttgcagaaaaaaagactaatcctagcattcatatggaatgccagagaccagaataaataaaatgctttgaaaaacaacaaattggattattcacatattttttaaaaaaatgtactgcagaaccacagtagttcaatgtctatggtattgttataaggattggcatgtagacgaagggggtagaatagtgatccatatttatagtcttgttttcagcagagaaagttgcttttttttttttttaaataaatgatactggtaatggatgtttacctgcaaatgtatggagttggacttcttccctgtatcagacaaaaatcccaaagttttgttagatataaagaatgtaaaaactaaaactatgtgtgctggaaagatggctcagtggttaagagcactcactgctcttccaaagggtctatgttcagttccaagcacccacatggcatctcacatctgtctgatgccctcttctggtgtgcagatgtacatgcagacaagtacccatatacataaataaatctcagaaaaaaaaaaaagaaactcaaattgtaattcttaaaaacaagtgtagacacaaattattgggttgggggggggggagtattcttagataccagaaactcaagtaacaaactaaaatataaatagaactttataaatgaaaacttttgtatgtgttttcataggacactgtcaaaacatacaaagacagctcacagtgagatagaaagaaaatactctaatattacatatctagtaagtatcatagaatataaattgctgttgagatggatcaatgggtaaagtgattgttgagcaagtatggagatttgaattcggacactcaacatgtaggcagacatgccagacaactgcatg

SEQ ID NO: 1488 - DNA, 5051 bp, Mus musculus
gtctcctcgggcccggcccgtcctccacctcgctgggtcgccgcagcatcccgggctatggagaccggctccgactcagattctttatacaattgcatatgtacgagtggatgaacataccattggtgatccagaggacttttgtcaagattggataaaccatgtatcacattgattgtagagatcagctcgaacgggtctttttacgacttggccatgctgaaacagatgaacagttacaaaatattatatctaaattccttcctcctgttctgctcaaactgtccagcacccaagaaggagtacggaaaaaagtaatggaactgctggtccatctgaataaacgtataaaaagccgccccaaaatacagcttccagtagaaacactattggttcagtaccaggaccctgctgcagtttcctttgtcacgaattttactataatttatgttaagatgggctatcctcgcctgccagtggaaaaacaatgtgagctggcccctacgcttcttactgccatggaagggaaacctcagccacagcaggatagcttaatgcatcttttaataccaactctttttcacatgaagtacccggctgaatcatcaaagtcagcttctccttttaatcttgctgagaaaccaaagactgtgcagctgctcttggactttatgctagatgtccttctgatgccttacggatatgtgttaaatgaatcccagagtcgccaaaattcatcatcatcatcacagggttcttcttcaaacagtgggggaggttctggaatcccacagcctcccccaggaatgagcttttatgcagctaaacgagttattggtgacaacccgtggacacctgaacagttggaacagtgcaaattgggtatagtgaagttcatagaagctgagcaggtgcctgaacttgaagctgttctccacctggtgattgcttctagtgacacacgccatagtgtcgcgacagccgcagacctggagttgaaaagcaagcagagcttaattgactggaataaccctgccatcattaataagatgtacaaggtgtaccttggggatataccactgaaaacaaaagagggagcagttctaaagccggagctgaaaagagacccagtcagtactagagtgaagttaaagattgttcctcatctcctgcgctctagacaagctgctgaaacgttcccagctaacattcaggtggtatatgatggactttttggtacaaatacaaactcaaagttaagaacactgtccctgcaatttgtacatcacatttgtttaactcgaatgccccatttattcactaaggatatagctcttgtgcagcagctctttgaagccctctgtaaggaagaaccggagactcggcttgctattcaggaagcgttatctatgatggttggagcttacagtaccttagaaggagcacagagaactttaatggaggcacttgtagcttcatacttaataaagcctgaagttcaagttcggcaagttgcagtgaaatttgccagcacggtgtttccctcagatcatataccttccagatacttgctcctactagctgcaggagacccacgagaagaagtccatggtgaagcacagcgcgtattacgatgtcttcctggtagaaataaaaaggaaagtgcttctaagcagatgccatcttttccagaaatggtatattacattcaagaaaagatagttctgtacttgcgcatgtgcctggctcatagtgcaggggtggtacccacttcccagagtttggctgatatgcaagatcatgctccggctattggacggtacatacgggctttgatgtcaagcagccaggcgacagcttcatcttctaataagagtggagaaaccaaccctgttcagatctacactggcctgcttcaacagctgctagcgggggttggaggtttgccagtcatgtactgtctattggaagctgtgtcagtgtatccagaaaaattggctaccaaatttgtagacaaaacagaatggatcaagagtctgatgagtagcagtaaagaagaaatgcgtgaattggcggctttgttttattctgtggttgtgtctacagtgtccggaattgagttaaagtcaatgatagaacagctgataaaggccacaaaagacaatcatatgaaagaacgagcaatccaaacactgggctattttcctgttggagatggggtttttccccaccagaaactccttttgcaaggtctgatggattctgtggaggccaagcagattgagcttcagttcactattggtgaagccattaccagtgctgcaataggaactaactctgtggctgcccgagatgcctggctggtgactgaagaagaatatatacctcctgctggtgccaaagtgaatgatgttgtcccatgggttttagatgttattttaaataaacatatcatcagccccaacccacatgtcaggcaagcagcctgcatctggcttctttctcttgtgagaaaactaagtacccacagagaagtgaagtcccatcttaaagaaattcagagcgcatttgtttcagttctgtcagaaaatgatgaactcagccaagatgttgcctcaaaggggcttgggttggtttatgagctgggcaatgaacaagatcaacaagaattggtgtctacacttgtagaaacacttatgactggcaaaagagtcaaacatgaagtttctggagagacagtggtatttcaagggggtggccttggcaaaacacctgatggtcagggcctttctacttacaaggagctttgctctctggcaagtgatctcagtcagccagatctggtatataaatttatgaatctggcaaatcatcatgcaatgtggaactccaggaagggtgctgcttttggttttaatgtaattgctaccagagctggagaacaactggctccttttctgcctcaactagttcctcgcctttatcgataccagtttgatcccaaccttggaattcgacaagctatgacaagcatttggaatgcattggtcactgacaactgtttagctctgaatgatttattgagaggaagacctttagatgacgtcattgacaaacttccagaaatgtgggaaacactttttagagtacaagatgatattaaggagtctgtacggaaggcagcagaactggctctgaaaactctgagcaaggtttgtgtgaaaatgtgtgaccctgccaaaggagcagctggccagagaaccattgctgtcctcctcccctgccttctggacaaaggaatgatgagtcctgtgacggaagtccgagccctcagcattaacactcttgtgaagatcagcaaaagtgcaggagccatgttgaaaccacacgcacccaaactcataccagcactcttagagtccttaagtgtgttggagcctcaagttctcaattatttgagtctccgggctacagaacaagaaaaggatgtaatggacagtgctcgactcagtgctgccaaatcctctcccatgatggagacaatcaacatgtgcctgcaatatcttgatgtttcggtgctaggtgaactagttcctaggctatgtgagctgatcagaagtggtgtaggtcttgggactaaggggggctgtgccagtgtcatcgtgtctttaactactcagtgtccccaggacctgacaccttactcaggtaaacttatgagtgctttgcttagtggtctgacagatcggaacagtgtaattcagaaatcctgtgcatttgccatgggccatttagttcggacttcacgggatagcagcactgagaaactgctacagaagctcaatggctggtacatggagaaagaagaacctgtctataagacgtcttgtgctttgacaattcatgcaattggaagatacagcccagatgtattgaagaaccatgctaaagaagttctgcccttagcatttctaggcatgcatgaaattgctgatgaggagaaatctgaaaaagaagagtgtaatatgtggactgaagtgtggcaggaaaatgtacctggctcctttggaggtattcgattgtacctgcaggaattgattactattacccagaaggctttacaatcacaatcttggaaaatgaaagcccagggtgcaattgctatggcatcaatttcaaaacaaacaagctctcttgtacctccttacctggggatgatcctgagtgcattgatgcaaggcctggctggaagaacatgggcaggaaaggaagaactattgaaagccattgcctgtgtagtgacggcttgcagtacagagttggaaaagtctgtgcccaatcaacccacaacaaatgaaattcttcaggctgtcttgaaggagtgttgcaaagagaatctcaaatataagattgttgcaatcagctgtgcagctgatgttttgaaagccaccaaagaagacagattccaggagttttctgacattgtcatacccctcatcaagaagaactcacttgaaagtatgggagtccgtaccaccaaagctgaagatgaaaatgagaaggaaagagagctgcagctggagtctctactgggcgcctttgagagcctgggcaaagcatggcccaggaacccagacacccaacgttgttatcggcaggagctgtgcaaactgatgtgtgagcggctaagactcagcacgtggaaagtgcagctaggtgtcctccagtcaatgaacgcctttttccaggggttaatgcttctggaagaggaacacgcagatcctgaagctctggctgagattcttctcgaaacatgcaaatcaattacttactctttagaaaataagacctactcatctgtgagaacagaagctttatctgtggtagaattactgcttaaaaaacttgaagaagctaaacaatgggaaagtttgacagcagaatgcagaggacttctgattgagtctttagctactatggagacagacaacagaccagagctgcaggagaaagcctcagtattgaagaaaacacttgaaagtctggaatga

SEQ ID NO: 1489 - protein, 1619 aa, Mus musculus
MYHIDCRDQLERVFLRLGHAETDEQLQNIISKFLPPVLLKLSSTQEGVRKKVMELLVHLNKRIKSRPKIQLPVETLLVQYQDPAAVSFVTNFTIIYVKMGYPRLPVEKQCELAPTLLTAMEGKPQPQQDSLMHLLIPTLFHMKYPAESSKSDFNLAEKPKTVQLLLDFMLDVLLMPYGYVLNESQSRQNSSSSSQGSSSNSGGGSGIPQPPPGMSFYAAKRVIGDNPWTPEQLEQCKLGIVKFIEAEQVPELEAVLHLVIASSDTRHSVATAADLELKSKQSLIDWNNPAIINKMYKVYLGDIPLKTKEGAVLKPELKRDPVSTRVKLKIVPHLLRSRQAAETFPANIQVVYDGLFGTNTNSKLRTLSLQFVHHICLTRMPHLFTKDIALVQQLFEALCKEEPETRLAIQEALSMMVGAYSTLEGAQRTLMEALVASYLIKPEVQVRQVAVKFASTVFPSDHIPSRYLLLLAAGDPREEVHGEAQRVLRCLPGRNKKESASKQMPSFPEMVYYIQEKIVLYLRMCLAHSAGVVPTSQSLADMQDHAPAIGRYIRALMSSSQATASSSNKSGETNPVQIYTGLLQQLLAGVGGLPVMYCLLEAVSVYPEKLATKFVDKTEWIKSLMSSSKEEMRELAALFYSVVVSTVSGIELKSMIEQLIKATKDNHMKERAIQTLGYFPVGDGVFPHQKLLLQGLMDSVEAKQIELQFTIGEAITSAAIGTNSVAARDAWLVTEEEYIPPAGAKVNDVVPWVLDVILNKHIISPNPHVRQAACIWLLSLVRKLSTEVKSHLKEIQSAFVSVLSENDELSQDVASKGLGLVYELGNEQDQQELVSTLVETLMTGKRVKHEVSGETVVFQGGGLGKTPDGQGLSTYKELCSLASDLSQPDLVYKFMNLANHHAMWNSRKGAAFGFNVIATRAGEQLAPFLPQLVPRLYRYQFDPNLGIRQAMTSIWNALVTDNCLALNDLLRGRPLDDVIDKLPEMWETLFRVQDDIKESVRKAAELALKTLSKVCVKMCDPAKGAAGQRTIAVLLPCLLDKGMMSPVTEVRALSINTLVKISKSAGAMLKPHAPKLIPALLESLSVLEPQVLNYLSLRATEQEKDVMDSARLSAAKSSPMMINMCLQYLDVSVLGELVPRLCELIRSGVGLGTKGGCASVIVSLTTQCPQDLTPYSGKLMSALLSGLTDRNSVIQKSCAFAMGHLVRTSRDSSTEKLLQKLNGWYMEKEEPVYKTSCALTIHAIGRYSPDVLKNHAKEVLPLAFLGMHEIADEEKSEKEECNMWTEVWQENVPGSFGGIRLYLQELITITQKALQSQSWKMKAQGAIAMASISKQTSSLVPPYLGMILSALMQGLAGRTWAGKEELLKAIACVVTACSTELEKSVPNQPTTNEILQAVLKECCKENLKYKIVAISCAADVLKATKEDRFQEFSDIVIPLIKKNSLESMGVRTTKAEDENEKERELQLESLLGAFESLGKAWPRNPDTQRCYRQELCKLMCERLRLSTWKVQLGVLQSMNAFFQGLMLLEEEHADPEAEILLETCKSITYSLENKTYSSVRTEALSVVELLLKKLEEAKQWESLTAECRGLLIESLATMDNRPELQEKASVLKKTLESLE

SEQ ID NO: 1490 - DNA, 143343 bp, Homo sapiens
agggagtttcaccatgtaggccagggtggtctcgaactcccgacctcaggtgatttgccagccttggcctccctaagtgctgggattatagatgtgagcctttatgcctggccccaaagggacaatttgacgtatcaaattagataatgaggatgtaaatgacttaaataactgggtatctttttctttccttctttctttctttctttttttttttttttttgcaaaaagcaatatccttttcttttttcttttcctttttcttgagacagtgtctcactctgttgcccaggttggagtgcagtggcatgatcatggctcactgcagccttgacctcctgggctcaaatgatcctcccaccttagcctctggagtagctgggaccacaagtgtgtgccagcatgcccacctaattttttttttctttttttgagatggagtcttgctctgtcacccaggctggggtgcagtggcacgatctcagcttactgtaacctccgcctcctgggttcaagcaattctcctgcctcagcctcctgagtagctgggattacaggcgcacaccaccacgcccagctaatttttgtatttttagtagagacggggtttcaccatgttagccaggttggtctcggattcctgacctcgtgatccactaacctcggcctcccaaagtgctgggattactggcgtgagccaccgcacccagcccatgcccacataatcttcaaaaaattttttgtagagatggggtctccctatgttgcttaggctggtctatcctttttgttaaaagagacatttccaataaaatcttctttttatgtataatgactctcaaaagctgtaacataaaaaattgcacggggcgtggtggtgcgtgcctgtagtcccagctactcaggaggctgaggtgggaggattgcttgaggccaggaattcaaggccagcctaggcaacatagcaagatcccatctctaagaaaaaaaatattattcattaatagttcgatgcctaagaaggttgtaatatatatatatatatgttgttttgataaattgtgtactgcaactaattatgattactcaatctaaaataattttttaaatggtcatagaaaaatttttttaaaaatataatttggccgggtgtggtggctctcgcctgtaatcccagcactttgggaggccaggtgggcagatcacgaggtcaggagatagagaccatcctggccaacatggtgaaaccctgtctctattaaaaatacaaaaattagctgggcatggtggcgtgcacctgtagtcccagctactcgggaggttgaggcaggagaattgcttgaacctgggaggcagaggttgcagtgagctgagattgagccactacactccagcccggtgacagagcaagactccatctcaaaaaaaaaaaattaatttatatatgtatttttgttgaagaaaataatgaagtgaataaaactttaaaggttaaaactgtattgcattcatttaaattattgtgagggaagtcaagtcaaaccacaagttcaaggagaaagagcaattatgtaacatgtcttgttcatgtatttttaaaataatgatgatggtagatatctgtgaaatcatatatatgtttgcttctatggttcctggcttatgactccaatagcccttgttataatgttggggtgctttaggcctcagaagcaggcctcagaaaacagaatctcgggcgggtgtggtggctcaggcctgtaatcccagcactttgggaggctgaggcgggcagatcatctgaggtcaggagtttgagaccagcctggccaacatggcaaaaccctgtctctactaaaaatataaaaattagccgggcatggtggtgggcacctgtaatcccagctactcaggaggctgaggcaggagaatcgcttgagccctggaggcagaagttgcactgagctgagatcttgccactgcactccagcctgggtggcagagtgagactctgtcacaaaaaaaaaaaagaaaaaagaaaaatagaaaaaagaaaacagaatctgtctctctctttgaccttctcctgctctcctttttttccccaaagcaggaatcttcttcccgtaccattccgtcttggaggttggcagtaaaaaaattctctcacctgccttgtctaattgtagatcataagactctcatttcaggctgggcatggtggctcatgcctgtaatcccagcactttgggaagccgaggtgggtggatcacctgaagtcaggagttcgagatcagcctgaccgatgtggagaaaccctgtctctactaaaaataaaaaaaataataaaaataaaaaaagactctcatttcagaaggggtcctgccccatacctggatgaaataatgctatacacagagaggcaaagaagaatctgaacagacaggcctggctgggtttcaactcagtctattagtattaggtcataccctttttgtccagtcacatttctacaaggttgtccatctttcaatcatgcctctgcaatgaagtcttcataaaacacctaagaggatgggggtacagacagcttcttggtagctgaacaaataggggttccaggagggtgtcatccctggggagggcatggaagctccacaccccttttcattctttgccccatgaggcttttcatctatcttttgtgatatacttcataatataccagtaaactgtttccttgacttctgtgagttgctctagcaaatcagtcgaaccaaggagggggtcatggatcctcagtttatagccatttagtcaaaagcacaggttaaataacctggagcttgcaattggcattgtaagttgtggggcagtcttgtgggactgaaccctccacctgtgtgatctgacattatctctaggtagatggtgttggaattgaattagaggctatctagtaggtgtctgctacagtattgcttgcttgcttgttgtatgggaagaacctacccccccgcctccatttggtctcagaagtctttttgttttgttttgttttgtttgtttgttttttgagaaagagtctcactctgtcgtcgggctagggcacagtggcgcaatctcagctcactgcaacctcctcctcccaggttcaagcgatttcctgcttcagcctcctgaatagctgggattacaggtatgtgccaccatgcccagctaatttttgtattttttagtagagacagggtttcaccctgttggctgggctggtcttgaactcctaacctcaagtcatctgcccacctcaacttcccaaagtgctgggattacaggcgtgaaccacaatgctcagcctaaagtctgttttgattgcgatgtgagcacagagaaaaaaatagtttgtgtttttaacctcgcagtatcaaataaataaataaataaattcaaaataaattcaaatgtatttagaaaaaatcttatttagattctacagatacattttaaaaagtgataaaatggtctttattttaaaatgctgatatttacaatataatttgttgtcaaaatttcctcttttcaattatttaagttatgagaaaaaattttaggtgccaacataaaaatgcattattggattacagtgtttttcaaaattcttttaggggaacacgaactttgaagtcattgtctaaaggaaaccagaagagatagggatattctggtatagggctacattttctttcctttttttttctttttgggatggagtctcgctctgttgcccaggctggagtgcagtggcgcgatctcggctcactgcaagctccacctcctgggttcatgccattctcctgcctcagcctcccgagtagttgggactacaggtgcccgccaccacgcccagctaatttttttttctttttgtattttcagtagagacggggtttcactgtgttagccaggatggtctcgatctcctgaccttgtgatccgcctgcctcggcatcccaaagcactgggattacaggtgtgagccaccacacccggcctagggctacatttttaaaagggggaagattgcctcctagtagccgtggtttagttttatattggaccaggtcagctttttcctttttttccaatggtatttgagagggaaaataaagtggatggtggggtttgcccaagattgggaattgactggcaccgtgtgtaagataaaaacccaggggaaagaacttgaaggtgctctagtaagaattcattgccaggcctggcgcagtgactcacgcctataatccccagcactttgggaggccgaggcaggtggatcacccgagatcaggagtttgagaccagcctggccaacatgatgaaaccctgtctctactaaaattacaaaacattagccaggcatggtggtgtgcgtctgtaatcccagctacttgggaggctgaggcaggagaatcgcttgaacccaggaggcagaggttgcagtgagcctagatcatgccattgcactccagcctgggtgacaagagcgaaattcagtctcaaaaaaaaaaaaaaaaaaaggaaagaaaaagaactcattgccatccctgggttttagcttaagactggagcaggtgatattcaggagaggacacatggaccagaaagtagttgaaacatttcagacgatgagactctaaaatgtactctgagttcacaggaattagagagtaaaatagtggaaggattctaatcatggttggagatggatgtttctgagtgtgattttttttagaaagtgcaatattttaagtcatgacatggctttatgtgcagtgaaatatgtctttaataaatgactgaaaagagcagagatgaagatcttaggtttgaactacattggctggttggacccagtccctgactttttcagcaaccaaaacaaatggcatgtgagatttatttatgtagaattttggcttgtctggaactctggaggtccaaattgaattcaattccaaattgaatcacttgggataatttaattttctagatagtttagaattaatccttttaggcacccaaaatttcttattacaatcgttttagatgaaaagcttactaaaatatgctccgtacttggttttttgatgctaatatacttgacataattttactacattttttttccttttttgtagagacaggggctatatttccctaggctggtcttgaactcctggcctcaagccattctcctgcttcagcctcttaaaatactggtattacaggtgtgagccatcgtgcctggccgtaattttactgttttataaggttaggattagcaccatgaataccatctattcaagagaaatgactcagtgcatttcgtactttataaatacccccagaatttaattttttaaatttatttaattatttagactgagtttcactcttgtcgcccagactgtagtgcaatggcgcaatctcggctcactgcaacctccaccttccgggttcaagcaattctcctgcctcagcctcttgagtagctgggattacaggtgcgtgccaccatgcccagctaattttttgtatttttagtagagacggggtttctccatgttggccaggctggtcccgaactcttgaccttagatggtccacctgctttggcctcccaaagtgctaggattacaggcgtgagccaccgcacccgacccagaatttacattttgagttcttatatgttcatttatttatgattttattgtacagatggggtcttgctatgctgccctggctggtctcgaactcctggcttcaagttatccttccacctcaccctcctgagtagctgggattacaggtgtgagcctagctgctgtttcttcttttttttcttttcttctcttctcttctcttctcttttctccttccttccttcctttcttttttgagacagggtctcactctgttgcccaggttggagtacagtggtgccatctctgctcatggcaacctctgcttcccaggctcatgcaatcctcccatctcagcctctccagtactgggaccacaggcgtgcaccaccacacctggttaactttttgattttttgtagggaccatgtcttgctagattgcccaggctggtcttgaattcctggcctccaaggatcctcctgcctcacagccttccaaagtcctgggattacagatgtgagccattgtgcctggcccagcctagcttaataatttgtatgcttctttgtttttaggtgtctgttagcacttgtcatccatgtatctgcccagaagaagaatgctttcaaatattttgctttaacgctggaaacaagatttttaaaaatcttgttagaactgtatatgtgtttgatgtgaagacagcctacatgagaggagaggggacaggtttttagttcttggattctatgatatcctattttggtttctcagtagcctcttctctggctcctgttttcctcctcaccccaattccttcttgcctctgtttttgacagctgaagtgaattctagacaggaactatctcaaggctgctgttattcaaaacctaagtgtttcatatgaacatgaagctatttagtgggaaaaatgaactacaagtagtttgatggaagaagcaagtataaaaaagcttagagctttacacagtagtgatcagaagtagcactgtaagttgctataaactactgtatgtaatgagactttaagatctttttttgcctaacaattccacatctacatctagaaatatgtgattacataaagatatgtataagaatgttttacagtagtattgtttagtaaaaaactgtaaacaacctaacagctcatcaatagggaaatggttaaatacattttgttggtacttatcatgcagccatttaaaaaaaaaatgaggccaggcacagtggctcacgcctgtaatcccaacactttgggaggccaaggcaggtggatcatttgaggtcaggagtttgagaccagcctggccaacatggtgaaactccatctctactaaaaatacaaaaattagctgggcgtggtggtacatgcctgtaatcccagctactcaggagggtgaggcaggagaatcgcttgaacccgggaggcggaggttgcagtgaactgagatcgtgccactgcactccagcctgggggacagagcgagactccctctcaaaaaaaaaaaaaaaaaaaagaggtagttctgtacatactgatcctagtgattaagcaagctgactctgaatccacactgcccaggttcaaatcccagctccaccacttactttccagtttgtggcacattagatgtgttcctcaaccatccagtgccataaaaatccctatttcataagattgttgtgggggttagatgaattcatccaagtaaaacactagaatggtgtctggcataattattattccattagccattattatcattactgatatgaaaggacacctgtaatacattatttggtgaaaagataacgttacataatatgggaagtagagttccatttttgtcaaaactaacaaaaatctgtgtacacacattcatgtgatttgtacacgcagagaacctggaatttcttcataggaggaactaaggatttgttaactagtcttgcctggaggttaaaattgcctaacggccaggcatggtggctcacacctgtaatcccagcactttgggaggccgaggtgggtggatcacctgaggtcaggagttggagaccagcctggccaacatggagaaaccccgtctttactgaaaacacaaaattagccggacgtggtgacgcatgcctataatcccagctactcgggaggctgaggcaggggaatcgcttgaacccaggaggcggaggttgcggtgagccgagatcgcgccattgcactccagcctgggcaacaagagcgaaactccgtttcaaaaaataaaataaaataaataaataaatgaataaaaataaaataaaataacaaacccattgttttttactcagattctgtatttatctggggtggctttggaaggatccatttgaaattatgggaagtcaaatttccccaaaccagtctttggtgcagctactttctatagtcacggaaacagtaaggaaaggttgaatgcaccaaactgttaatagggattatttatgggcatgagtgggatgaggggggatggtgggtatgcagttgggagaagacctgtatacacctctctattgtttgtaagtagttcattgtgtatttattttggaggcaacatcaaataaaagaggagcatacatgaaaaaaggggttggttaacttagtgtagtatgaagttacaaacaaaaaagggtgatggtagtgcagtgttttgaattaacatggaacaatgtgtgtgaaggaataattgatccagaactttattgtagaaacctgtccccatcaaagccatacatggggctgtatatatatgtccagagaaaaggtcttctgcacacttaactgtaactgttagtcataatttctctgcagagtgggatggtggggctaggaggaaggactttcacttttaattttatgatactccaaatcatttgcattttttttttacaaaaattatgtataatttttcttttttttttctttttgagacggagtctcgctctgtcccccaggctggagtgcagtggtgcgatctcggctcactgcaagctccgcctcccgggttcaagcgattctcctacctcagcctcccgagtagttgggattacaggcgcgcgcctccacgcccagctaatttttgtattttttaattagagacagggtttcaccatgttggccaggctggtctcgaactcctgacctcgtgatccacccgcctaagcctccgaaagagctgggattacaggcgtgagccaccgcgcccggcccaagatcatgtataatttctataacaaaaacaataaaggaaataaaaatgtcttcagtgttgtaccttgtacttggcctatgttacaacaggaatgacatatattccatttttaagacattacttagggctttatagatttctgctttaaggaataaatgcaatttcaatctatttaagacttgatttcttcttatataaaaaaagtatctgatcttgtatctaatttgttatgacagtaccatcacttaaagtacagcaattatgcaacccctgaatttgaatttcattttgcaagtgtacatgacctcacggacaaagcgaaggcagaaagttaaaatcagcatatcgaaaataaatcactctagttaccgaaaagaacatagggtatctgaacaaaatctcagagctcacataggcatagatacttccatgtgaactttaggaatcttgccttatctaacttttgcagggctgagtggaccccctgctcccgctagccgttttgggagcaccagccacctccacaccagaactgggctgtcgggggccgctgcggcgcaggggctcgtccgggactgagtcagcgccggggccgagaagttcggcgggaggcgcagggcggggcttcctcccgccgactccgagcccggctctacttttctgagtccacgtctcttcctttggacaggcgtgtttccccaggtcgggcccagccaacgtgacagccgcagacctcggaaaagggcgctccggccccgcctcgaggatttcccccggccgctagggcagcccgggcccgctcggcccagcccctcacggactgcggcgcgcggctccccggggcccggcccgccgaacgcctcgctctacagccctcacctcgcggcgccgagcgcagcgtccgcggcatggagaccggctccgactcaggtcagaggcccgcccccgggccgcgggggactggccctgcgcgcgcggcggcgcggttaggccgggccgcccgcacaggccgccgcgtgtcgagtccgcgcggggagcgcacgcggggcgggcggcgacaggtgggcaggacgagccgcgagcgagcgagggcgggcgggcgcgcgaggggcccggcgggggggccgctgggaggatggctcagctctttctaaatataaaaccggcgtgagttgggcgagcgcggcgcggagtcgcagagccgccgcgcgggcctggcgcacggggattcggccgcacagacggcggcggcggcagcggcagcggctccgcagaggcgcgaggctgcgggagcgcccgagtcgcgagctcgcgggggcagcgaagggcgacgctcgcgacgcggaggacgcaggcggcggcggcgggcgggcctcggggcacagcgcggtccgcgccgagtgaacggaggcggctcgcggcccctgccgcaccgcgagccgcgagccccccggccgcgccctgcccccccagcccctccctcgttccctccccggcgcaacatggctgcggccgccgcctccgcctcccaggatgagctgagtaagtgccgcggccgaacctgcggccgcgagccggaacgggcgccgcgcggtgccgggggccggcggccgcatgagggctggggcgccaggcccggtgggcgggcggcggccgcggcgtacggggagctggggagcccgggcctggcggacgggcggggcgcggaccgtcgccgctggcgtttgtaggcctcaggtttgcaccgtcacgttgcgaaattgaaaccggagccccgggcggagccacctctgcccgcgatccgccctggcccggggtcgggggagcccagccccctgcccactgagcctcggctggcgggagggccggagccccggggtgacgggcagtgtccgcccgtcccgtctgaccccgcctggccccgggtccccgacggctggttgagttatagaaatggagctttcgggaagggggagaaggtgcctttttgtgacactctagtaatcagccgaaaggtcacgaataggcggtgaccctcagatggagcagggagggcggagagggtcgccggtcgaaccgcaggagaaaccacggggtgacagcgctttcagaaaggagagttagtgccccctcgatcgtacgcggtgcagccttcccggggacggcggtccctgtctggggagagcggtggtcaccctgaatcccaggccgccccgcccgccgccggggttcgcctcaatgctttgtgggaagtgtagttccggggcgccgcggacccacgctggggtcataaataccgaagtttcataggacataggacatgtgagataatttctgattgcgttttgagtgttctcccccccaagggttttctttctttccctttttttttttctcccaatgctgcccttcagtttatggcaaaaacaagaaaggtgttatttgaagatgatgtgggttttaaatggaataaagcatgggtgaggtgttgcaagctttatgaagcttacgttgttaaagccgcttctgaatttccatatgaaagtagttatacacgtaatgtatgtttttctggtgcttgtcagtttaaagccacttttatatacatgatctcacttttgccctcatagcaaccttgtgaggcagataggtaggaattatccttgttttaaagaggaggcaggtttggagagattaagttccttgctgctttgacacagaactggtggagcaggagtactgtttgctttttttgaagctgaagtaaacacttggtgtgatcctgagcagattggagagtcggaggagacaaggtctcatggtgcgattagagagagaagcgggctacagattgctcttctgtcggttccacgtggaagcaccaccaggccttctgagatcagttccatgttttgttttaattggaagaaaagtacacataccataaaatttcccgtcctagccattttttaagtgtacagttcagtgggattgagtacattcacactgttgtgtaatcatcaccaccatccatttccagaactcttcgtcttgtaaaacggaaacttgatacccattaaacaacaaatcctcattccctcctcccttcggcccctggcgaccatcattgtactttctgtccctgtgattttgagtattcttcctacctcgtgtgaatggaatcatacagaatttgtgactggttttatctttatttagcataatgtcctcaaggttcatccatgttgttgcgtgtgtcagaatttcttttccttttaaaggttgaatgatattcccttgtatgtatatatcacatttccttgtccatctatctgtctatggacacttgggttgcttccacattttagctattgggaataatgctgttgtgaacatgggtgtacagatacccctttgagaccttgctttcagttcttttgggtacatacccagaaatgtaattgctggatcatgtgatagttctagttttaaatttttaaggaaccactgtactgttttcttttttcttttttttttcttgagaccaagtcttgctctgtcgcccagactggagtgcagtggcgcgatctccgctcactgtaagctccgcctcccaggttcacgccattcttatgcctcagccctccgagtagctgggactgcaggcgcccgccaccacgcccggctaattttttgtatttttagtagagacggggtttcactgtgttagccaagatggtcttgatctcctgaccttgtgatctgctgtgatccacccgcctcggcctcccaaagtgctgggattacaggcgtgagccaccgcgcccggcccccactgtactgtttttgacagtggttgtaccattttacattaccaccaacaatacacagagttctaatttctctatatcctggccgacacttatctatattgtcagtagtaaccatcctgttgggtgtgaggtggtctgattttttttcaattgctatgctgtatgacatctgagttcctgttgtagaaccaaacacattaaagtctgaattgatagcaggaatgggaacaaaactagaggaagaattggatattctgaagtggctgaagtatttgtgtctatgcagtgtgcttccatacattcaggtactggttaagatgctgatagttaagggatttcctggctctagtacctaatggaaagttaggaacaaataattccaatccttgccttcttcttgttttgttcagttaaattgtcagtcatcagccacagatatcggtggacttggtttctgtatttcttcaggagagactgaatacgttgcagttgataccttagaataatttaacttgaaagcatatacatgtacactggttaagaagtttcatataaaccacttttagttttagaatgggtataataaaatagcagatgctgataaaatgtgcttttggccaggtgtggtggctcacacctgtaatcctagcactttaggaggccgagatgggtggatcacctgaggtcaggagttcaagaccaggctggccaacatggtgaaaccctgtctctactaaaaatacaaaatttagcctggtgtggcggcacgtgcctgtagtcccaggtactcaggaggctgaggcaggagaatcacttgaacctgtgaggtggaagttccagtgagccaagattgtgccgctgcactccagcctgggcaacagagctagactctgtctcaaaaaaaaaaaaaaaaaaaaaagaaaaggtgcttttaagaattccactaaaaaaaaaggagagaattatccaaatattttctatcatttatgactagtagatgatagtaaaagcaaactactagatgccagcattgttctcttccactaacattttattgtaaaaaatcttcaaacacacagaaaagttgaaagtgaacattcgtgtacccaccacttagattctatcattgatagtcaaataactttatcatatttactattatagcaaactttgtcatttgtccatctcagtagatttttaaaaattgttaaagttttttttttttttttttgagacggagtttcagtctgtcacccaggctggtgtgcagtggcgcgcgatctcggctcactgcaacctttgccgcctgggtttaagcaattctcctgccttagcctcctgagtaactgggattacaggcacctgtcactgcgcccagctaatttttgcatttttagtagagacgaggtttcaccatcttggccaggttggtcttgaactcctgacctcgtgatccccccacctcagcctcccacagtgctgggattacaggcgtgagccaccatgcttggccaattgttaaacttttttagttttactttattttttaaaaaatagtagtaaaatacacataacataaaatttaccaccttaacaattttttttgttgtctttttctggagacggagtcttgctctgtcgcccaggctggagtggaatggcgccatcttggctcactgcaacctccacatcctgggttcaagtgattcttctgcctcagtctcccgagtagctgggattacaggtgtgcgccaccatgcccggctaattttttttttggtagagacaggatttcaccgtgttggccaggctggtctcgacctcctgacctcatgatccgcccctcctggtctgccaaagtgctagaattaaaggtgtgagccactgtgccctgcctgccttaacagtttttaagtgtacagtggtattaagtacttattactccatctttttttatgcatttcaaagtaaattggtgacaccaacacaccttccccctaaatatttcagcaccagcattgttttaaatgctttgtatgtattattcctcagaataaccctgaaaggtaggtaacattattattgctgctttatggagagagaaacaggcttcttaggtcccctgggtcctgcagctggaaagtagtcccagtgtcctcagtctctagtatgcactcacagccatccttgaggccatcttacctctttgcaccatagtcagagtgtgtatgatgaacagttcaaatcagatgcattgccagattctcagctagatgttaccttaatccaaccatttgactgttgtttatcattgctgttgggtacaaaagagacaccaaagcccaccaaaggaattacaatactattgaggaagaggaagaatatgtgtaaacagataagtaaggaccaaaatatgactgtatgatatggataatactaaagtaatatcatatgtgattcccaggtctgttattttgagatgtgtagctggtaaaactgcatttctatagatttcaaatgaacattttctgccttgcatttgaagtaatttacgtcatatcaatttaaatgaaatctgcaactttcagttatatctgctaccacactttgtaggagaagcaaaattgactgttagggttctcttttattttatttatttatttatttgtttattattttgtttttgagatggagtctcgcactgttgtccaggctggagtgccgtggtgcaatctcagatcactgcaacctctgccttctgggttcaagcgattctcctgcctcagcctcctgagtagctgggattacaggtgtgcgacactgcgcctgacttatttttgtatttttagtagagacggggtttcaccatgttggccaggctggtctcgaactcctgacctcgtgatccacccacctctgcctcccaaagtgctgggattacaggcgtgagccactgtgtccggcctatttattttttttgagtaataccattgagcatgaagttgccagaaggctgggtgcggtgactcaagtttgtaatcccagcgctttgggaggtcgaggtggtcagatcacttgagtccaggagttcgagaccagcctgggcaacatggtgaaaccctgttactacaaaaaatataaaaattagctgggtgtgttggcatgcgcctgtagtcccagctacttgggaggctgagtggggaggatggcttgcacccaggaagtcaagactgcagtgagctgagatcacaccactgcactctagcctgggtgacaaagcgagaccttgtttcaaaaaaaaaaaaaaaaaagttgccaaaaataggcaggttaattttggggtgagacttgttattgttagcatttgttatcctttcacaaacctcatgtttgagtcagtgattataatagaagaatagtaaagctgtttatttattgtgtgtttaccgtgtgttctaattgttttgcatgtatcaactaattgaatcctcagaacaaccctgtgagtttggtactggtactgtctcaggggtagagctaccctcattagacagttaggacttgaacttagattctctgattgcaaaatttgtattaattctgccctactactactgtgttattcctgtcctgcatgggagaatatatagttcataacaagatcaaaatggctttttgtgtgtgtgtgtgtgtctaactagtatccagagagaaccttctgtagtgtataaaatgtggcaatcggggccaggcgcagtatccagaaagaaccttctgtagtgtataagatgtggcaatcagggctggagcggtgcctcacacctgtaatcccagcactctgggaggccgaggctgggggataagttgagagcaggagttcaagaccagcctggccaacatgatgaaacccccgtctctactaaaaatacaaaaaaattagccgggtgttgggacgtgcacctgtagtcccagcttcttgggaggctgaggcaggagaattgcttgaacctgggaactggaggatgcagtgagctgagaacgcaccactgcactctagcctgggtgacagagctagactccatctcaaaaaaaagaaaaaaaagaaaaaaggaccaggcgcggtggctcacgcctgtaatcccagcactttgggaggctgaggcaggtggatcacctgacgttgggagttcgagaccagcctgaccaacatggagaaaccccatctctactaaaaatacaaaattaggcagacctggtggcgcatgcctgtaatcccagctacttgggaagctgaggtttagagttcctgaggtttgaggtcaggagttcaagactagcctggccaacattgtgaaaccctgtctctactgaaaatacaaaaattagctggttgtggtggcacacgcctgtagttccagctactcaggaggctgaggcaggagaatcacttgaacctgggaggcagagattgcagtgagccaagattgtgccactgcactccagcctgggtgacagagtgagactcccacttgaacccgggaggcggaggttgtggtgagctgagattgcatcattgccctccagcctgggcaactagagtgaaactccatctcaaaaaaaaaaaaaaaaaaaaaaaattctgatgttactgaacagaacatagtagatttttgggtatgttgccaaaaaagaaaaccattagttttgactgttaaaggcagttctgaaatctagtttgtaaattagtttaggtcagagcctgtagctttctttccttatgcttagagtgattataactattgcaaatgaaatgaaattcaatgcaagacatgtggctagtttttctgctaatactatcttctgccactttatggaaaagttgacattatagttaatatttcaggagtgggttgagagatttccaacagggaaggaagcatttgagacttttcacctggtcagctgtttagtggtttcgtattctgggctttataattataaggcatccttagaatctgatcttcgttgggataaaggcaactcatgaaggagcaacagcctataatcttgaaggatgcactattcaatttgaccatttgacatagccatgggaaacttcagttgcaaaagttggccagataatcagcatgtcaggtgtcttctgagagagcctctgctagtgctgggaatcctggtagctcttttagaggatgagatttgggaagctgtgtgttgaacatgattctgtgaccatactgaaatagcccctaagagctaattgcttaaatgaccagaatacaggcttccaagctgatctttgtagaaaggccaaggcaagcctgtatcatttaaattttagttacttaaccaaataggaaagttaagatggaaaaatgaccacggatatttctattttttattaatttccattctgatttttttactttcactgcattctgggttttttttttttttgaaactagagtctcactctgtcactcaggctggagtacagaggcacaatcttggctcattgcaacctctgcctcccaggttcaagtgattctcctgtctcagcctcctgagtagctgggactacaaggcgtgcaccatcacaactggctaatttttgtatttttagtacagatggggtttcacaatgttggccaggctggtcttgaactcctgacctcaagtgatctgcctgcctcggcctcccaaagtgctgggattattggcttgagccactgcacctggcccaccacattctgttttgaattatgctttcagtaaactataatatgtgatcaaggccattgtcagtgagaatagttggcacaggagcattgaccttgttcagaagatagatgttaaaattgaagtcactgccagtgttctcagatggtttgatccctgttgctgagctctcgtttcagacctggccttgatgcttcccattttatatggcttgttttgcccatgtattttttcaattcaataagcagacttttaaaattgagtaaataatgtatggtgctgtcctcagagggcttataattcagtgcagagacagatttatgtgcaaatgtaaataacatacacaaagcacggtaagtaaactgcctaacacagttctttggaaacctcaagaaatgagaatggtatttgaggctaaaggaaaaatagcttgagctgagacttggagatagggaaatattatgcaaaacaaaaaaagctgagtaagtctgttatgatgggaatgggggtgctacggctgtgtgaagtactgggaaaggggatcagctgtgtggtttgagacttggcccatgctgcctttatgatttgagatcttggacaaattaccttacctttgcaagtctcagtttcttcctcataaaattggaatgacaagattcactcatagtattgttaggattaatgtatgtgaaaatgtactgtgtaaacacttaagctcttataaattattattatttttggtgtgggatgtaatagcagatgatgctgtggagataggttgggaccagcatgttgtaggaatgccaacagaactagtttggactttgttctgtagacagtagagaaccatcagagcttttaagcaggagcgtaacatgagtaggtctgttttgtacgggtaacaggtggcattggtgtaacactgattgcaaggatccggagatcaagagcagcaagactaattaggagggtatcacaatggccaagtaaaaagaaacttagggtctgagttgggacagtggaagtggatttggcaaggagttaatataatgtaaaatccctaaaatagggagaaattgttggctgacgagatgagggttgttgaagaagggaggagttagagatgaatctaaatctgacctgagactagaaggtggaggagtaacagagagtgtagcctctagacagatttaggaaagtgaaggaaagagagaacagattcaacagataggtagtctgtgttcagcagaaagattatttgttgaatgaatgggttgaattattgagcccccatgttgttcagggagactgctttgagtagtggctaaaacctctggaactggaatcagagacagttttgaatcctgattctgatacttcttaatgtgttcttgaacaagggacctaacttgtaggcctcggttttctcatctgtaaaatgagataataaaacttacaagatttttttcttttcttttcttttttattgagacagggtctctctctgtcacccaggctgaagtacagtggtgtgatttcggctcactgcagccacaatttcctggtctcaatccatcttctgacctcagcctcctgagtagctgggactgcaggcgggtaccaccatccctggctaatttttgtattttctgtagagacggggtttggctatgttgcccaggctggtctcaaattcctgtactcaagcaatctgccctcctcggcctctcagagtgctgggattacaggcgtgagccaccgtgcctggccaggattgttttaagaatgggaagagatagcacatcttggcacatggattgcgggtgtgtgggaaccttggttctgaagctagggagacagtgtgggaatgattcccatggtagagctgtgggaatgggcatattgttcacagtcagctgactgggagccacgtgtatacgtatttaagagcgagaggaagataatcagagaaaggagatgaagagtgctaagagaggtcagcggtggccggggttatgtctgtcagccatttgcgttctcatatgtaatgtgctaaaaacatgtatacatgtttagtaacacttcttataaaactattatgtaattgaaacacttctaattaatgtaacagtttatatatttatgatatatatacacacatatacatatatgataaaatatgttgcattggtattagagattttaagtcttcagcaaatgattatcagtgtattttttgaagtattagcatgttctcagtaaatttggtttgtggacataggccttattctttctcaaatttgatagtcattataattttttttcctcatactgaatttgcaaagcagggcatcaaagatctaacaagaaatgaaaagtgcttatttttttcttaaaattgtagctatgcatatacatctgttaattgtatttttttggtgttctaaataatagattctttatacaattgcatatgtacgagtggatgaacgtaccattggtgatcccgaggatttttgtcaagattggataaaccatgtatcacattgattgtagaggttagtagatttagttccttaggatgtgtgcattttttttgtagcagcatttaaaaatgcataggttatcaggtagcaatttccccccaagatcttcatgttttttttttttccttttctagctagcctgagaaaattggtgaagttcatgttaatttacaaatgcctgaagcctctattctctgtaatgctaaacataaaaataatttgcaaaaagaagaaaaagataaaacttgaagtctttttttttttttttggagacagtgtctcactctgttgtccaggcaggagtgcagtggggcagtcatggctcattgtagccttgatctcccaaggctcaagtgatcctcctgcctcagccccaccgagtagctgggactacaggtgcatgccatcacacctggctaatttttatatttttagtagagatggggttttgccatgaaggctggtctcgaactcctgggctcaggcgatccacctacctcagcctcccttggagatgttatttagcactgtgcacaaggaaaagacgatgggtgatcgtttacaaacaactttgtgtgccacaatcacaaaaagtcattttacatgctcgaggaatgccatcatggaggtttttgttttttaaattttttaatttttttttgagacagggtctcgctgtgtcacccagactggagtacagtggcacaatcatggctaactgccaccttgatctcctgggctcaggcgatcctcccacctcagcctctctagtagctgggactacattttgttttatttttattttttgacacagggtcttcctttgttgcccaggctagagtgcagtggcacgatcatggctcactgcagccttgacctcctgggctcaagtggatcctcccacctcagcctcccaagtagctgggatcatagttgtgtgccaccatgcctggctaatttttttttttggtagagacagagtctctgtgtgttacctaggctggtctggaactcctgagctcaagctatactcctacctgggccccccaaagtgtcatgattttaggtgtgagccaccatgcccagccagttgttctatttgtgagaagaggtatgaaggaggcatcttcatggtaattggatgtttctaattctgccattttgtcatgcattgtgattttgagaaaagccatttaattctacttcattctaaggcagaataagagtatggtgtcattttcactcttggatgatatcagatggtcttttgattgaaactctgtaaattcagattgtaattctctgatatcatggactcaatatccagtgagttcctgggattttgtagcttcaatccaaaagtgctttttgttgctatcttctaatttaactgttagaccccttctccccacccctcctatgcattctactatgttttggtatatatattgctgctgatgatacaaaatgtcttattcatttaggtgaaattttgagggatgggataattttaaaaccagaattcaactttaaaataaattttggcctgtttttgctgttttcacaaatctttattccttgggcgtttagagaaatgaaaaattgggagatgggaagaattgtttagaagagcagtgaggacattgtttcttctctcctagattctttaactcctagagcttttgggcttgtgattgatgtgttaatgtcattatgatatactgaaggcaaagtgaagctacaactgctaggatttaaatagtgatttaaataaagaacattctagggcttacacacccatatgagcattgttctaagtaattagctgctttgggtggatcttaacgatcgtacattagacttttatgcagtctgaactcttgcatagtatatattatttcctctaagctagctttcacaagctgaagtaatctttcctgcttgtcacctcctaaaaccgatttctaactgagtatctctgccagctgctgtctctgggggaaagggccttgtggacctcagtgttgggagtctagcacttactcattaaatctagggcttctgtcttgtcacctggcccagtcttgccaagctactcctatgatttcctccccttcctctgtgtgtgtgtgtgtgtgtgtgtgtgtgtgtgtgtgtgtgtggcgggaggagaggacatgatggggttgtggggaagtgggtgcggggtggtaagcaatatgatcagggaggggtagccttgttttgggctatgctggattggcagggagtttgaagtagcctggaatcatatgcaaaaggctgggcacagtggctcacgcctgtaatcccagcactttgggaggccgaggcgggcggatcacgaggtcaggagtttgagaccatcacgggtaacacagtgaaaccccatctctactaaaaatacaaaaagttagctgggtgtcgtggcacatgcctatagtccccgctactcgggaggctgaggcaggagagtcacttgaacccgggacggggaggttgtggtgagcagagattgcgccactgcactgcagcctgggtgacagagcaagacttcactaaaaaaaaaaaaaaggccagggaaagaaagactcttttcctcttccctgtttaaagagcctagcctgtagtagatccagatgcaagggtttccagattagggtatctgcctgggcccttgggggacagactggtggactagggaacagaaagataatctgtctgattgccttaattctggggtgggcagagttactagcaaaggactccatcagcagggacctcctgctcaggactttgttgcctgtgaaggtactcattgccacctcttgggccctggctggagagaggcagctcctgcaggaaccttgatggattgtctctttctggtaatggatcttctccccactcccaacttatatttatgttttctgctagactgcctgacattctccttttaagtacatttgcatctgttgagttctgtaaaaaaggctggggatgggggtaactctttacaaacaggagtagagatcacatttctagacattcttttttttgagatggcgtcttttttttttttgagacagagtctcgctctgtcactcaggctggagtgcagtggcgcgatctcggctcactgcaagctccacctcccgggttcacgccattctgctgcctcagcctcccgagtagctaggactacaggcgcccgccaccatgcctagctaatttttgtatttttagtagagatggggtttcactgtgttaaccagggtggtctcgatctcctgaccttgtgatccatccacctcggcctcccgaagtgctgggattacaggcgtgagccaccgcgcctggcgggacggagtctcgtactgtcgcctgggctagagtacagtggctggatctcggctcactgctccacctcccgggttcaaatcattctcctgcctcagcctcccgagtagctgggattgcaggcgcccgtcaccacgcccagctaattttttgtatgtttagtatagacagggtttcaccatgttggccgggctggtctcaaattcacctgacctcgtgattcacctgccttggcctccaaagtgctgggattacaggtgtgagccactgcacccggctgctttgtttttttggagacagagtctcgctatgttgcccaggctggaatgcagtggcacaattttggcttactgtaacctctgcctcctgggttcaagtgatttctcctgcctcagcctcccaaatagctgggattacggggcctgccatcacgctcagctaattaattcttaaagaagcatcctgctggcctcatttgggttttgccaagtattagcgtggcttttggggaattgagatgatatttcagatagatgaagtggactttaacttccggttagtatctggttagatttataattcacaggattgatctaccagaaaatactagtattacacacaaaatctagatgccaactagggcttccttatttttccatagttttagcctcaaactcctaattgtactgactgtcagagtccattctcttccctaccttccagcctgatatttccaatttttgtgaattccctatactttagtttcttattcttttcttagtttctgggctcccacttctgaaaatgtttcagcttggacgtgaaacacacacacacacacgtttgagcttggacatgaaacacacacacacgctcgctctctctctctctctctctctctcactcactctctttgcccagaattggtatgtcctaggaaaaggccttgttttaagagtgcttgattttctgcccttttactggttcaccccttcctcttcatctttttctgttctcttcctttccttctctcggcagtaactgctgcatctctgctggtttggagtcacgtcgtatacagttgtctagtaagatttagtatcttctccacctactttctcgcttaaaccatgttataatttagtgtgctagaaggagcattggactgtctagggtttgaatcagccctgccacttagtagttttggaatcttggtcaacagaatgttttcaaggctctgtttcctcaactgtaaattggagctaatactacttgctttactagaagttctttacaggcaggtactgtgttccagtgtgcgcttggagggtaaagccctctctgggttcagcttgtttgtttttgttttgttttgttttttgaggctgagtcttgttctgatgcccaggctgaagtgcagtggcgtgatctcggctcactgcaacctctgcctcctgggttcaagcagttctgtctcatccttcctagtagctgggactacagtcacatgccaccacgcctgagtaatttttatatttttaatagagatggggtttcatcatattggtcaggctggtcttgaactcctgacctcaggtcctgggttcagcttctgaatctgtgtatcattcacatggtgacctctggcaggtcagttaggtggtgagtctataaatgcatctataagtgcacctcacaacatttttctgaggctcagaaggccatgtgaaactgctttgtgactgtgatgtattttatatacttatatctgtgaatcagaagaaagtaaataccattagagagaatatttctttctgaaatcgtctattatagtgtagtatatttctgtagtaacttgatagatcttttaaaaaatatcgtgtggtgttagcggtggtcttaggtattttcagctttctcttcaatttcagcttctacttaagacctctaacctgatttgtattttaaaatttactttcatattcaggaaaaaaatattttttgtagaaaatttaagcaaccttaaaaaacctgaaacctgtcactcagaaattcacgcaagtaattcgtgctcatgaagtaagttagtaatgacacataattaaacaaaccagaaagaatcctctgaaattcaaccaaacagggataacattgccttaaatagaatcctttctctattccttttgatagtatacttttcttgtataattttaaaggactattttgatgttcaggttgtcctgaaaggaaactgatttctcttctcttctctcttctcttctcttttctcatctcttcttttttctcatctcttctcttcttttttctcttctcttttttaacatgctttttccattaataatgatgtgagggaaaaataagtaattgtaggtttattgttttttctagtcctgtaagaaaatagcttttcctccctaatttagaagttaaagttgtgtttttgagagagatctgaagaatgtgctgaagtctttaaacctttactggtcgttttctttttatgcgggtaggaggagggagtgttccttcttcgtctttagatagagaaactaaagacaggcgaataagataaatttgaattatttaaaggaaaataaatgagctgggtgtggtggctcacgcctgtaatcccagcactttgggaggctgaagtgggaggattgcttgggcaaaataggatgacctcatctctacaaaaaataaaacaactagctgggtgcagtggcatatgtctgtgattctagctacttccaaggctgaggtggaagaatggcttgagactgcaatgagctgtaactgcatcactgcacctcagcttgggcaacagcagaaccctgtctccaaaataaaaacgtgtgtgtgtgtgtgtgtgtgtgtgtgtgtgtgtgtgtatttagttatttatatttttagtagattttttttcctcctacaagaatgtcatagttaacatgagctaaactggatttttgttttgttttggaattttaagattctcagggttttgatacttttcctttgagatcaaatgttctttttgttctttctttttttttattttttgagacggagtctcgctctgtcgcccaggctggagtgcaatggcgccatcatggctcactgcaacctctacctcccgggttcaagcgattctcctgcctcagcctcctgagtagctgggattacagatgcacaccatcatgcccagctaatttttgtatttttactagacatgggtttcaccatgttggcctggctggtcttgaactcctgacctcgtgatcacttacctcggcctcccaaaatgctgggattacaggtgtgagccaccgtgccctgcctctttttgttctttcataggctttaaggttcctttcaagcttcaaagttctgtgattaaaaattttttttcttgtctttaaaacatggatttttgatttttgaaaaatatttgctctgtatactttttttttttgggacagggtcttgctctgttacccgggctggagtgcagaggcatgatctagctcactgcagcctcaacctcctgagctgaagcgattttcccacctcagccccctgtgtagctggcactacagggacgcaccaccatgcctggctcatttttcaattttttgtagagatggggtcttgctgtgttgccgaggctggtctcaaactcctgggctccagtgattcttctgccttagcttcccagagtgctgggattacaggagtgagccactgcatatgctggcctgtatgctgtttttttctaatcaaaaaatgtattttcactgaaaaatatttgaaaagtattaagaaaaattactgatgtattttctttcactttttatataattatatcataaaataaaattatcatggaatatatatatatatatattcttttaaaaataacgaattatttcaaccatgaaggaaagtatggagagtaatgttgacatggagttttttttgctcttgtagcccaggctgcagtgcaatggcacgatctcggctcactgcaacctccttctcccaggttcaagcaattctcctgcctcaacttcccgagtagctcggattacaggcgcccgccaccatgcctggctaatttttttattttaagtagagacagggtttcaccatgttggccagcctggtctcaaactcctgacctcaggtgatccacccacctcggcctcccaaagtgctgggattacaggcatgagccactgtgcccggccttggagagtaatcttattaacatttatgtatgtctgactcatctttgtcaaatttttacattttctgctatcagcttcaggtcttgtattttattttaattaattaatttatttattttgagacagagttttgctcttgttgcccaggttggtgtgcagtgggatgatttcgactcaccacaacctccacctcccgggcttaagctattctcctgcctcagcctccttgtatttttagtagagacggggtttctccattttggtcaggctggtctcaaactcccgacctcaggtgatccactggccttggcctcccaaagtgctgggattacaagcgtgagccaccacgcccggccttattttatttttttaaagaaataaacattgcagatgcaattcaaaccccctgtgttactccttatcatatcatttttcttttcttcccttttttcctctctttcctcctcccctccttccctctcccttttcattcagagattgtcattactgtgatgtatcgtacccaatatgttttgtgtttaaaaactttccataaatgggactaaactgtacatatccttctgcagcttattttgtttgatcttagatttttcagatatggtcttgttggctcatgtaacatgtaatccttgtttatttatttccatcgttgtgtgactctgcataatttattccttctcatgttgactgatatttagattgtttttatatttttgcttttactaatcctgggctgtgaacactttcacacatgtgtccttgtgcttgtctcttcctgggagagttctttttttttttttttcttttgagataggatcttgctcagttgcccatgctggagtgcagggacacgatcacaactcattgcaggcttaagggattctcccacctcagcctctcgagtactgagtagctgggactacaggtgcataccaccatgcctggctaatttttttttttttttttggtagagatggagttttgtcatgttgcccaggctggtcttgaactcctgagctcaagcgatctgactacctcagcctcctaaagtgctgggattaaaggtgtgagccaccacactcagcccctgggagagtttttttctaggacggtgttacataaagtgttgtctgagcattagggagttatttcttgcaaataaggaacttgcatcaaaatgtaaatcaactatcactgttaatttatttaacacttcttattctagaagcactttttcaataaaaagtgttccttatctctttgctgactggtgataaacagtttgtagatgggcttcttgaatggcagaattgctaggtggaagggtatgttcctcttcaactttgctagagatgtctttactgcagaattgctcttcagagattgtatcaatatgtaccccatcagtagtggaccagagttcttggtttgtttcccatctttgccaacatttggtactgttagatttgaatctttttttttctgatgtgtagtccattgttctctgattcttaatggcatttttgtcaatctcaagttttcatgtattcccagttctctttctgtgttctctgttttaatctattgatttgtctatttgctgaccggtgcttttgtcacactcaatcttaataattgtcatagctttataagtcttgaaatctgattgagccactcctactgcacttttatggaaaattgacagttactcttggctctttgctgtttcatactctgttccattcatattccaaaggaattttataatttttttcagctttcacaaagcactctgttttctgtagagaatgtttgactgttgggggcttcccatctttgcaatattgagtttatttgtgagcattagtgctgtttaccagatatttctagttctctcttttgggcacaaaatagaatttagtgctggggacacagtgagagacatgtgattcaccacagaagtttcaccacagaagggttgaattgagccagaaggattgaggatatggcactaactagcggtgtttgagatggtgttggctctatcagccgactgtagtgagcagagccctcctcctgatctatgactgaggcatggtctaagtgagaaactaatgttggttgtttttaagccatggaaatttgggggttattatcactaacctatcctgacatggaaatccatgaatgtagttgggtgtggtggctcacacttgtagtatcagcactttgggaggttgaggtgggtggatcacctgagtgaggtcaggagtttgagaccagcctgaccaacatggcgaaactgcatctctacaaaaaatacaaaattagccaggtgtggtggcgcatgcctgtaatcccagctatttgggaggctgaggcaggagaatcgcttgaacctgggaggcagaagttgcagtgagccgagattgcaccactgcactccagccttggtgacagagtgaaactctgtctcaaaaaaaaaaaaaaaaaaaaaattccatgaatgttgtgcttctccattaatttagatcttatgaattatagttaggattataattttctctgtaaaggactatgacatgtttcattagatttatttccagataacttgtagttttattgccattgttaattatatgtttttaaaaactacattgatactttgttctcatttatctcagttgacttctgtactctgatcttgtatgcaacataattaactttcttattttacataccctatcccataaatatcatgtaatctgtgaatactgacagtttttagtatctcctacttccatattgcattttctagcagttccagttcaatttgcttggaagtgatgatagtgcacatcttgtttctgattttgtatgagatatatttgctgtagattttacatagatgctttttgtcagattatgaaagtttctttcagtgacggttatttccagctccacagttataaactactctttgggacagattctgctaatcatatttttcagactcccttaccatctagcttcttgttttaagatatcttttcctatctcgaggtaatgagaatattctttatttctctagaaactttattgttttacctttgacatttagatttatgatccatctggaattgattttctttttgtttgatgatatggtttggctctgtgtccccgtccaaatctcatcttgtagctcccataattcccatgtgctgtgggagggatgcagtgggagatgattgaatcatgggagtgagtctttcccatgctgttctcgtgatagcgagtgggtcttaggagatctgatggtttcagaaacgggagtttgcctgtacaagctgtccctttgcctgctgccatccatgttaagatgtgacttgctcctccttgccttctgccatgattgaaaggcttccctatccacatggaactgtagttctccattaaacctctttcctttgtgaattctctagtcttggatatgtctttatcagcatcatgaaaacggactaatagatatggtgtgaggtagggattaaatattgttctcccatattggaatacagttgatttaacaccatttattgaaaagaccatcatttactcactacattgcagtgacacctctgtttaaaccaggtgactatatacctgtttgtcttttacacattttctattttgttcaagtggtctacttattttttgttagcatagtatacttttaattactgtagtttttattttatgtgtttatttttttgagacaaggtcttgctcttttgctcaggctggagtgcagtggcatgatcttggctcactgcaacctctacctcctgggctcaagcagttctcccacctaagcctctcaagtagcagggactacaggtgcacgccaccacgcccagctaaatttttttttttttttttggtagagatggggtttcaccatgttgcccaggctggtctcaaactcctgagctcaagcaatcagcctgccttgccctcccacagtgctgggattacagggctgagccactgtgcccagcctactgtagttagccttgaaatttgaccaaagtcttctagctgtttttcctcttcaagatagttttggcaaatcttggtcctttgcatttctttaaattatagaaagaatcaacttttttttttcttctagtggtatccacacatttaaagattattcatccactcattcattgattgagatagttagtatcttcctgtgttgcccaggctggcctggaaccactataggctcgagccactgtgcctggctctaggatcagctttttagtgttacccaagttatctgatggattgtgcttggattatattgtctataggtcaatttggggagaattgacatcttattaatattttctaatctgtgaatatggtgtatcttttaagttttccttaatttcttgtagcggtgtattttagttttctgtgtagaggtcttacacatttttccctagattaattcccagctattcgatgtgttttgatgtcattgtaataggtgttttcaaattttgttttctaatggtttattactattatataggaaaccaattgatttgtgtattttgttattctattaatttttccatagattgttttggattttttgtgtaccaatcattatctttaaataatgaaaatattatttcttcctttgtaatcttaatgcattttatttttctttgtcttattgctctgaataaaatttgcagtacaaatttgaatagaattggtaatagtgaacatctttaccttgttcctgaactcagaggaaaagtgtttggtattttacctttagatataatgtttgctgtaagtttttataaaaatctcttatcagattaaggaagttctcttttcttccttgtctcttcaacatgaatagtttgttcccatctatttagcatgaagagatgttgaatttgatcaaatgccttttctgtatatattgagatgatcatatgattgttattctctattgtgttaatgtggcagattacactgattttcaatattaaaccaactttgcatctttggaataaatccaatttttgtatgatgtattatcctttttatgtatcgctggatttgactcatattttttacttattttatgtattatgatttaaatattattttattatctcatttgcgtctatattcatgagaaatatcttttatttgcttttatctttctggggatacccttgtttggtatcaaggttattctggcctcttaacattcagggatgtgttcccctgccatccctttaccccacctttttctcttctctggaagaagttatgaaggagaatttaccagcgaattcataaggtcctgccatttttttgtgtggggaggtttttaaataatacagttcatatttgtggtaatttagaatgaaccagttttttaaagcagaatttataattgtgagttgtatcattgtggtctgtctttagaagtaattaaaaaagccccttaaaatcatgtaattatgactttgtactaagttatgcctccgtatgatgagctcttgtgtctctgaggtattgtcacatgggatttttagctttctggcctggctcagttttcctttggtggtagtaaatggggttattaacatacctagcataggattcctactctaggtgggattctactaataattcatattttgctcccagctgatggaatgtgtgttctcaaatatttcgtagacttctgatttattaaaatacttatttttgtagtagtagtcagctttatttaaaaaggaggtaaaattagccaaatatgatggctcatacctgtaattccagcactttgggagtttgaggcaggaggatcgcttgaggccaggagttcacaagcagcctgggcaacatagacctcatttctacaaaaaatacaaaaaagaaaaagataataatttcttcttgccactgagcttaaggggaaaaaaaaagaaaaaggtaaaattaaaggaataatgtattctgagagataattatatacaatatttatataacatatggaaaatattttatatcatatataattactctgccaaacctaaccagttaagggcatagccctccactagactgaatcgacttcatatgccacctacaagttcctgttatcccagagccaccctcacttttgacctattggatacagatttgggggtctccatggaccccctcaggtttaatcattagctagaacgagtcagaactcaggaaagccgtgtatttatggttatggttttatagaaaaggatgcaagttaaaaccagccaaagggagagacatgtagggcaaggcctgagagggttccagatgcaaagcttgtgttgtgtcagggtactttcccagtatagcaatgtgtgataatacacacaatgcactgctgatcatagaagctcaccggctcacctgaactttggtgtccagggttttattgaccaggtgtgattgattgattggatcattgcccatgtgactcaatttctaacaccccccccaccctcctctccctctccaacccttccccttgtccacctcccctaatcacctggctgaaaacctgcaagatgattagtctttctagtgtgatcaacccccatcctgagttatctcttagcgtaaacaatctggggcccactatgagttacttcctcagtgtaagttatcaaatgtgattagagggtcccaccatgaataacaaaggcacttcagttactggggaaatcccaagggtttagtgctttcctctcaggaacatggacagaggtcacctaaattctttattacacaagaatataaaagctacatctgtaatatgatagccatatataacattatataatgtttcacaacattcttatgaagcaatcttatgctgttcctaatagacaagttcattaataaccttagagaggtttagtttactaactaaaaccagtaatgtatctgacatgaaaatataggtccgttggctcctttatatcttagactctcggagagaatcattagttgggctttcacaagtctatattaataatgtatagtttataaataatagcccatttagaattgtccccataatatatgcaaaggaggaattttatacttttttaatgtgtgtttctcatgtgtgtatgtatatgcacacaaaatctagatacttcttttagcagaaattctccttagttggttgatgtgaaataaaggatattttcctaaatcacatttataactgaaggtttggaaaacgttgtctgtatatgtttgtattttttcagtgattagacactgatataaatgctataggggtagggggaagaaaggataggagatttattttttatttgtttgactgtgtggattaatgctgctgtaaatttatattcactaacctcaattgggtcctttacactttcttcacatttgtagttcattttaccagtcaattttcttctcttcttcactctggggcaagccttttcctaccattgtcacgctgcccacttgccctctgctctccaaatctcagaagaagactgtgccttctattttacagaaataatagaaaccatcagaagggaattctttcaggcccttccataaaatttataagattgattttatcaacagcagtcttcctgtttccctcctgttacaatggcagagatggccttcctgtcctatctaaggtaattcctcagaccttgtgctgaatcctaatctctcccatattctcagggtcacagtctaataattttttccctcttcagtttctttctctctagtggctttttccttttgctatttaaatgtgctcagagctcttatttgattgaaataatgaaaaataactgttcccctcccctttcataactaaaagtttctaaagagttgtcatttactgtattcctcacatcctttttaatcttccactgattcctctaccctgtacagtctgcttttttctctaccacttcattgaaactgcttgagccaaggtcaggtgtgaactctattgctgaattaactggattcttttcaattcttatcttgcatgatctttttgcatcatttgaaatggttgactgctgtctcctaggaaaatctttcttaattattctgaccccacgttttctttttatttttgtctgttgcctaccattccctttttcagactttccttctcctgcatttaaatgctgttgttcgcaaacagtctgtcctaggccttctgttattttctttctacatgcagttatcatatacttgtgaggtaagcctggacaacatccatgcctcttccctctccactctttttacccatgaccaccaagctcttacgcatggtagagtttcagtagatacttgaatgagtgacctagataggagaatgagtgcttgactgtgaaactgggagggtgctgggccttgaaggaggagagaattttgatgagcaggaaggaggaggagaaaggttgaactgcagctggtcacatatggagttagcttcttattcatagtagtgagttccctctagtgttgttttctgacctttgaatttgtatgtttttccatttttgtaataaatactgcctgaatgagacacattctagtgaacgtttggatattctttcaaataaaacttcctgtataaggtgtagtatgtacagtatgtgtacctgatagaaaatagggtcattcttggagacagttgtatggtataggcaaggatttttagactaaaggtcagaagactccattcttattcttactctgctgctaattaatctgtgaccttgggcaagtccttaaaactcactgtgcttttttacgttatataatctttcagtcttcttcagttctgttttcagtccagtacaaatctttctttatgcaggcttcaaaattaattttcttcttgacttggggggtagtcacaagattgtttataataattcattaaaccatgcatttatgttttgaatgattttctgtatgtattattacatagttaagaagattttaaaaacccaccaaagacttgtttcctacatccctccatataccaaaagaaaattccagatggatcaaagacttgaatgcagaaagcaaaatcataagtgtacttgaaagaaaacataggtaaatatacctgccaggagactcccagttcgcccctagcttcagtgattgtctagtaggactcacaggattcagcatatatttgtactcccagctaagatttagtgtagcaaggtcaccaaagggaaaagtcatgtgagtgaaatctggaggaaaccaggtgcaagcttccaagaatcttctggtggagtcacacagcacatacttgattcctccagaagtgagttgtgacagcacctctgaaatggtatccaccagagatggtcatcagagactcagtgcctcaggtttttatttggggctggtcatgttggtaccttcttcctaaaatgtaccaaaattccgccctgaagggaagctgatgttcagcataaacaatattatttgcacagacaggcacaatgaaccactcttagcagttctgggaatggtgggaaccctgctgaaatccaggtttccagatatcagccatgggccagcctcagctagaaagcacatctttctttctttctttttttttctgagacagagtctcgctttattgcccagactggagtgcagtggcacgatatctgctcactgcgagctccgctccctgggttcatgccattctcctgcctcagcttcctgagtagctgggactacaggcacccgccaccacgcccggctaattttttgaaattttagtagagatggggtttcaccgtgttcgccaggatagtctctatctcctgacctcatgatctgccctccttggcctcccaaagtgctgggattacaggcgtgaaccatgtgccaggccgaaagcaagtgtttctacaggtagcagtcctgggtctgtgtaaactcttctctgcacaatataatatttaaaagtattttgcagtgaaaatgacttttctaagcatgcctagaaactccgaagtcatatagggaaggaatggtaagtttaactatactcaaaagacttaggccgggtgcagtggctcatacttgtaatcccagcactttgggaggccaaagtatgaggatcgcttgaggccaggaattcaagaccagcctctgtcttgaggccaggaattcaagaccaggaattcaagaccagagacctctgtctctacaaaaaataaaaaaatcagctgggtgtggtggcgtatgcctgtagtccaagctacttgggaggctgaagtaggagaatagcccaggaggttgaggctgcagtgagctgtggatagcgccactgcactctagcctgggtgtcagcaagaccctgtcttatttaaaaaaaaaaaaaaaggaaaagaaaaatatagcagttatatctgtagatgttgacctttcttcttttttgtgaaacttgaacaagcttatcttttatttaagtatagatgggtctgtaaagatgacgtaacagtgttagattgattcacctcaaaggtagaaggctttaccttttcctctggtgtagccagcctgttttagcaggaccctctcacatggtggttggtgctctttcttcccattcccatgttctcataattttattgtgtttaggatgttatatttgcctgtctcgtgagggagagaagatgttaggtgctatgctgggcatacatagaagcatccaaatgattgcatgaaaaggaacagggactggatattccacaccctcctgccgccgcaccccacccccccatctccccccaccgttttctttaactttgacagagattctctaggtcagtttattatgaagagtttaattttctgcctttgtccacagaacacttcttttacagtttctgtagctcagatttgtagtttctatggcctaaaagctgtaaggccctaaggagctgctcctttacctgtaacttctgcaaacactgtgggttgaactcagcattcctgagaacttcttttacagcagcattcagcatttatcaaatagaatcactggtagtctcagattgagcctttctttcctccctcccttttttctttttattattaattttttaaactaaacttgagactttatttggattttaccagttttttcattaatgtccttttttcccccccaggatcctgtgcaagggaccatttagttgtgatgttttccagctttctctggtctgagacagttttttagtcttttcttatttttcatgatcttgaacgtcctgagcagtactggccaggtgtcttatagaatgtcccccagtttgggtttttctgttgttgtactcatgattagatttgggttatgggtttttgttatgaataccagaggggtaaaatgcctttcttgtcacatcatttcagggacacgtgatatctgcacgacatcatgaggtttaccttcttactggactaagatagtatttgacagttttctctactgtgaagttaacatttctccctttttgtattctaaagaagtagtcactaaatctagtctaccctcaagggggagggtgggcaggaattaagctccacctcctgtagggggaaatagccacatatattattttgaattcttcctataagaaaaatttgcctcttcccccccagtttctttcatcattcaataattatttccatcagtatggactcatgtagattgacattttggcttataatccaatgctgttatttattttgttccttctatcgtcattgcttgggcaatgacgttctttcaggttggttcctgtatccctttgacttgttccatgttccatttctttatttttgagacagggtcttactgtgtcacccatgctggagtgcagtggcatcatcatggctcactgtagcctcaacctcccaggcccaagcagttctcctacctcagcctctggagtagctgggaccataggcactcgccaccatgcctggctaattttttccttttttttgtagagatgggggtgtctctgtgttgatcaggctggtcttgaactcctggcctcaagcaatcctccctccttggtctctcaaagtgttgggattataggcataagccactgtgctcgaccccatgttccatttccttttaggcactacaagacgcttcaggctcatcttgtttttgacctgccccaatccctaaactcagacctttttccaaggagcttggttccttttcctggagaatggtattgaaaaacaagatcaattctgggtgttaggtatgcttgttgctactaggatgtcattgcttctgcccctctcaggattgatcgatcaatctgttgatctgtctgtctgtctatccatgtatctatctacgtctctgtcattgatccatctattgagtgatctatgtctatctaatctatcttcctgtagaaaattattgtggaaaatttctggcaaacacaatagtaattctcagtatctgttatgaagcttgaataattatcaattagtggcaattttggttttacttacataacccctccccagtgtctcctcattatttaaagaaaattctactagctgttatttcgcctgcaaatatttccatctttatctctaaaaaaagattcctttaaatatatattttaaattgaagtatagtagatacagtagaaggtatgaaagtgtagagtttgatgaatttttataaatgtatttatctctataatcacgcagatcgaaatatagaacatttttagctctttagaaaactccctaattcccatgacagtttttgtagggacctttaaaaaacaaacctaaccacaataccattatagtacctaaaacaattttaacagtaattccttaaaatcaaatatctagttgtttgcataggctcccctttcattcccatcttcctgcttgccgctgcagtgtactggttgaagaagttaccttgtctaaagtttatcacagtctgggttttgctgagagtatccccatggtgtcacttaacatatgtctctcatagtggctttcttggggaaacttggctatttttctaactaggtaaccctaatacagtaatgggcagtgatcctgtctttggagaaacttcatcagtaagatgatttcaccagggatagatatattgtccctaataactgatggtatctgattaaagttttgctgccttgctctactaactagttccagaagatgcctttagaaatcttgtatcctttccagtatccagttaaaactgaataacgttgcatgtgggagagaactttttgttcttggttttgttttcttccattctaaagggtagaccagggtagaacagttaaccttttggtggtggtttgttgctgtgtcaaaatatctgtatagggctagctgtggttaaagtcctgactgaaggattgcagtacagaaaaaaagaataagctataaaaataattggtcttggttgtgtttggcttgctaagttctctctttttttctttttatattatagatcagcttgaacgggtctttttacgacttggccatgctgaaacagatgaacaattacagaatattatatctaaattccttcctcctgttttgctcaaactctctagcacccaagaaggagtacgtaaaaaggtaagcatgttgggacagctgggggaattaaatgatgaataaatgaatatacattatcaagtgagttttctgttcccattattgagttctaggtttgtgatcttaattatggcctttcaaaatggagagtaagtctagaaccagcttttatgatttaaaagtagctcttgtatccttagcacagctgcatttagcaccaactgtctacttggcatcagtgtcagataatataattgagataattatcctggaatgtatggaggcatgatctgaaatccatgccattgattccaatatgaaaggcatgtggtaatggggcaaaaatattctttagttaattgttgacaatgattataaccttaactaaaagtaagcaaaataaaaaaaaatttaagcaaaataattttatagctcctgtttcaggattctgcaaagtactcttacaaaaagttggataactgtcacatcagattttcattttctttctttttttgttttttgagatagggtctcactctatcacccaggctggagtgcagtggcacaatcacagctcacagcagcctcgatcttctgggcttaggccctcctacctcaccctcccaagtagctgggactacaggtgcagaccaccatgcctggctaatgtttaaattttttgtggagacagggtttcgctttgttgctcaggctggtctcaaactcctgagctcaagcaatccacctgcctcggcctcccaaagtgctgggattacaggcatgagccactgtgcctggccagtattttcattttttaacgaaactgttctacatggaacatttcccccttgatttgtagaatatttcattagtcttccagtatatttataataggtcatccagtctttgagctatggtcaggttttattccttgggccacagtaattggcagtgacttcctggaggtctgccctgagagggattccaaggtctgatttgggttcagtgcagaaagagaatctttaggaatgtcttttatgtttatatctctttacaggagggaatgggcattcttgtcatatatttggcatgtctgcagttaatccttctttgctgagatagacgtgcatttgattatgtcactcttctatttaaaacccttctgtggccttctcttactattaggatagcaaggtctaagaggcccttcgtgagttgatttctgtatacttcttagccttatcagttttgttatttagcaaatatttactgagtgccttctatatgccaggtcttggggatatggtgatgaatgatgacaacacctagttggggaaatcagtataaaacagtcaggcaaatagtacatagttgaaatttgtgatacatgccaagatggaaaaggaaatatattcttatgaaagaatatatttgggatataatttagactaagtgtggggtataaggggaggcctctgtggtgtgcaggaagtagccaggccaagaggtgggggagaccattgaagatagaccctgtgcaggtgttctgagctgggacagagtgtgatgccttcaggaaattggagaaggccacagtgatgtccccagtgcatgagacgaagcctgataggaggaaagaggtattccaggggcactgatttgaaagggtattgatggtagtgcctccatcactctagctgttggctggagaaagacttggagtaggggccaagagtggagacctggagagcaaacagggaacttttgcattagtccaggcttagtatcgtcagtagtttttaactcatttacttatcttagatttttttttgtttctttgtattttatttttttatagaaagtcattcatctctgtccatctactttaaatgttcagttgtgtatcattcacttctatcatactattattcttttttaaaaaaataaattttattatgtatatttgacgtttacaacatgatgttatggaatacatacagattttaaatgtttactgaagcaaatgagcatatctctctcacataattttatgctattcttaatattctgttatcattatttcaaatgggaaattctattcttgtttctggttttattactaccaaagttttaaccttttaatgggtcattttaaaaggaaactcagcttttagattaatgttccctttttaactgtatttttttctatttttattcaaattatttctttttttagataagtttttcttgtgtaaagttttaatttatataataacctggcaatggttcttatgtgtcaagaaaagtgctaaggacttacatcctcatgagattatgtgaagtaggcatccccattttacagatgaaactgaggcttggaatgattaatgaacttgtttaaggtcaaataacaaatggtcaggccaggatttgaacccagggcttttgaacttcaaaaggtaagcttggtcatcaagttaaatgctttattctttatttatagtatgttaaaaaaaaagaaccaaaaatgacctcagcttatgaatttctctttgatgactattttagttatatgtaatagttatgttgatgtgcagtttggtcattttatctttgacttatttataagagtgttgtttttagtttcaaaatatttgatataaaatttgcctggttttattgcattctggtcagagaccatagtgtgcaaatgttacagtccttcaaagtgtattctaatgtttgtaagaaaagcctttcagaagataaaaagaatacttcctgtttgtggaatatggagctcagcatgcgctaaggccattcattagtaacattgtgcattcatgtcttgaacctgtcttccagtcctattataagttggtagtactaaagtataatgtcctactgctgttacagtttttctgatttttctttcagttttaataatcttggcttgctgcattttgatgtacaagtttaacatcttgtctttattaataattatagtattttatgtttattttttatcttttgaattccatttaaggtttttttctccaaaacctgttttatccaaaattagtattgttaaccattgttttccttctgtctgcttgataaaatatttgccccagcctgcaattttaaccttatttactttgtctgtatctcttagtacaatggaaatgtcacatatttttgagatttgagttgagggcatttacatcagttattgtgattattaacctatttttaaagttttaagaaaaaattttattgatacataattataccatatttatgggggtacatgtgatattttgatacatgcatgtaatatgtaatcaaataatttagtatttaggatactcatcacctaattatttatttttcctttgggttgggaacattttagatcttctagctcttttgaaatatacatgattattaacctgttttatcagttggtctgtttgtcctttccctctctgcctttctttccttctctcactttctcgttatcaaactgtcaacactggtgtcttcaaggggctgtgaaaggacaagggaaaagggatgctttagattttccacttgatttattattataaatgtatctttctattataactttaaaaagcaatgcagaataaagtaataaggataaatgtaatcattttgaacttaatatatttaatatatttaatttatactaataaaatagcatttttatttgtgcatgtcaaattggttaagttggaaaacttttggaataggggaaatggaatcaaacagctaaaatagcctgttatatattaagcattgtgctaaactctttgacttatcttttcatttaatctttacagtagcctttgaaatgttatctgaattccacaagttatttttaaatctttcttggtttatggaggattccagacaagatataaccatatttaggaaattcgccgatatttaacatgacaataatgctactagaaaattaagtaattaatccatttaaaattcaaaataggccgagtgcagtagtagctcatgcctgtaatctcagcactctgggaggctgaggttggaagatcttttgagaccagcctaggcaacatagcaagatctcatttatgccaaaaagaaagaaaaaaaccatgcatggtagcatgtgcttatagtcccagctactgcagtgactgagataggaagattgcttgagactaggagttcgaggctgcagttggctatgataatgccactgaactccaccctgagtgacagagtgagaccctgtctcggaaaaaaaaaaaatcaaaataaatttattattaaaaaaaagcatgcaattgtgggcaagattctctgtctccatcgataataattttctatagagtccctctaggaatcagcctagattacaatgtcagaagagggctctttcctttagactagttcctcctgattgttttctcttgtcgcctagcggtatcacagatccaggacaggtaggaagctcggatgaagtatggatgacaatgcaagtttctagcttcttggaaggtatcatgtctcactgacaaacactttcgctgatgtgagttcaaatatcagtgtttgaaaaggttaaaaaaaatgggctctggagtcatattttgactttgctatttgctggcccagtatccttggacaagttacttgaggcttctgcttcctcatctgtaaaatgggaatgacaccacctcactggttgttgtgagaatcgtattagataaggaatgcctgggggaagagtgcatagaaactgtgataaatattagctattttaatattactatttatcattcattcaacaaacattgattacagagttgttattattcttaaacataattcacctatttcattattgctgtagatctcttggaattttttgctgtcggtgtcaaacatctctacagctttctttatgcatgctttgaggctagagcacgaatttcagaaatgagggagaatagtgtaaacctggccctgcagaatatttatcttaaattcttgagtctttcttaggcaaggccttctaaaaatcttatttctcaatgctcgatttcttttctgttggcagaaatctttttattgtagtataattgaggccatttgatatgagcctctgtacatccctttctatccatgcaaactgttgacttgtcaattcctattttgctctcttttcccacttaaaggagaggaagcttgttatttcttacaaattatttgatagtatcagatgatattcagaatacaataaaaatgcctcagactattcacaatagcaaagacttggaaccaacccaaatgtccatcagtgatagactggattaagaaaatgtggcacatatacaccatggactactatgcagccataaaaaaggatgagttcatgtcctttgcagggacatggatgaagctggaaaccatcattctaagcaaactatcacaaagacagaaaaccaaacaccacatcttctcactcataggtgggagttgaacagtgagaacacgtggacacagggcagggaacatctcacactggggcctgttgtggggggtggggcctggggtagggataccattaggagaaatacctaatgtagatgatgaattgttgggtgcagcaaaccaacatggcacgtgtatacctatgtaaaaacctgcacattgtgcacatgtaccctaaaactgaaagtataataaaaacaaacaaacaaaaaacaactcccagacaaaaataaaaatgcctcagtattttgccagaatccttttgtaatccagaccttgcttttatgaactcttatcgttctgggcttcagtcagatgcagtgtgccccataccttcttataactgatactctgcttggaactcattaaatcttaaggactcagtgttcctgtcacttcctccgtgaagtctttcttgatatagcagatacttttgtcttctggaaacccactgtatcttgtatgtctctcttttcatagtattcatggtgtgttgcaataatctgttcttcttgagggacatgcttcagtctaggcccaacttggatctcaactttaactaaaggacattgtaaaaataaattcacttggccaggcgcggtggctcacgcctgtaatcccaacactttgggaggccgaggtgggcggattgcttgagatcaggagtttgagaccagcctggacaacatgatgaaactccatctttactagaatacaaaaattagccaggcgtgatggcgggtacctgtaatcccagctactcgggaggctgaggcagggggattgcttgaactcagaaggcagaagttgcggtgagctgagatcgcaccactacactctagcctgggcaacagagcgagactccatgtcaaaaaaaaaaaaaaaaaaaaagccaggagcagtggcttacgcctgtaatcccagcactttgggaggcagaggtgggcagatcatgaagtcaggagttcgagaccagcctggccaacatggtgaaaaaatacaaaaattagccgggcatgctggcacgcgcctgtaatcccagctatttgggaggctgaggcagaagaattgcttgaatcggggaggcggaggttgcagtgagccaagattgtgtcaatgcactccagcctgcacgacagagcaagactccgtcttgggaaataaaaagaaaaagagaaattcactagtgcatagatttttgggagacagtatttttgaacaagattcatgtagtgtatactccctttctgggatgtaaaatttataccctttaaaagaacaaagtagctactattcactaacatagataacatctgataaatgaattttaagatgagtggtttttaagatatgatcaataactttagttcccatctctctgtattttaggtaatggaactgctggtccatctgaataaacgtataaaaagccgccccaaaatacaacttccagtagagacactgttggttcagtaccaggaccctgctgcagtttcctttgtcacagtgagtgttgtattggaatattttctgacttacagcaaattttctttcctaacatttattagatgtcatcaacatattggcaagtttagaatttcaccttagaccacttctaaatgaaacatgagttttttttttttttaaatgacacactgtttttccactgagtaccaatccagaggaaatgctgctttacagtagcagggtaatgaatggctatttactttgggcaaaggaatgttggtgaaatgacttgtcaggtatgttgttatataaaagaatgatttgatttttggtaggagactgtatgaaatgggtctgaatagagggaaatgttatacggcttgggcacgaataaagcctaatggaagaaaaaattagtaaaatggcaagaagatacatgaaagtgaacttaaaaaaatcttttgtgtttttgatgtgtatattcagaaagatcttttttataaagtggagtaaatctgagtctggtaagaaacattccttttaaagtgttgtcttcataaaaattaaatgtaaaatatgttgatgctgtgtgatggcaggtgatgttttttttcctggtccttgtagttcctagcactgaggcagaatcgattgaatcttacctaacatctggagtcacaaaccttttggagcctgttattggtccagacgtcattttgtccatgtctgttctggatatttggctcaattatacatttcctttctttaagcaaataggaacactgtgtgccaataaaaatgccaaatataatttatttgaagaagtaatcttatgaagcccatttactttagtaaagaattcttcagaggccaggcacgtcggctcatacctgtaatcccagcactttgggaggttgaggccagctgatcatgaggtcaggagttcaagaccagcctggccatcatagtgaaaccccatctctactaaaaatacaaaaattagctgggcgtggtggcgcgtgcctgtagtcccagctacttgggagactgaggcaggggaatcacttgaacctcagaggtggaggttgcagtgagctgagattgtgccattgcactccagcctgggtgacagagcgagactctgtcttgggggaaaaaaatgaaaaagcttcagaaaagcaaatcttaatcttatctgtaaatccagatacgtatttatgggtttgcttaaaatccagtattcacacagattatagtgatacaggttgagtatcccttatctgaattgcttgggatcaaaaatgttttggattttggaatatttacgttatacttacctgatttagcatcccaaatccaaaatctgcaatgccccaaggagcatttcctttgtgtgtcttgttggcactcataaagtttcagattttgtagtatttcgaatttcagattttcaaatttgggatgcttgaccttgcagaaacacacagtactcagtttcctttggttcatcatgcattggtgagttactggagtgaggaaccacagagtgctgcagtatactaagtttgttttagtcatttgaccagtgggaaatggcagcctaggatttgtcaacacctgatctcctcctagcttgtaaggattaatgcaacagactgggagatctggtgctaatatgtagtgtgtaggtgtaaataggttgattatttctttcttcttcatgataagaaattgcatatatgaatgctttagattagtccatgctacctcacattaggcctactttaaagcaagcattttgattaagttggactggaatttttcctctgagatacagtagttggtaaaggtgcaataaacgtggagggaggatgagtcacgtttacaatgtctttgttgtaaccataactctctaagttatcaatcatatattttcattgaaatcatagagtatttccttcacactcacttgcttttctcttattgcattagaattttactataatttatgttaaaatgggctatcctcgcctaccagtggaaaaacaatgtgaactggcccctacgcttcttactgccatggaagggaagcctcagccacagcaggataggtatgatttcctcaattaactaatttccctcctacaggagtcaacaactgcctttcaaatattaattcacatatttggttttacttgagcaaatgggaggtcttgagctgttttagctgacaaataatagaattttccgtggtacctcaaagttaccgttttgttaatactatcataaaatttcttgatgtgaacattgaaaaatgtgcagaactaacatttatctaagtctgtgcatttttttggctagttatcttgaagcagttaattttatgtgattgcaaaaattagaattaaaaatcctttgcatcaaaacaattctatcttggaagatataaagtttcacagtggttttcctaaggaacagagcactcgtttgtattattttgggaagtggtgcggtgaaaagggttttagataacatcatttgtttctaggcttaggcaaaagttctttgttctagctctgtcatagtgagaatcatgatgaagagtgcagaaatgtagaggaaagagatggagttagatcatgttttcagttcaccttttagagcatattcattttttaaaaaatactgtaatacagaagaagtttacaagtaaaattaatagacattacaagtactgtttgtaattgttgtcagatgttttaagagtatcaaaaggtgttaatgaaaggaattactgagacctgttacttaaattcatgcagtggaaattttaatgttgtattcaaaatattaatatgattgatttttaatttttagaataactttagttgtggaaaataatttttttttttgagacagagtctcactctgttgccgaggctggagtgcaatggcgcaatcttggctcactgcaacctctgcctcccgagctgaagtgtttctcctgccttagcctcctgagtagctgagattacagatgcctgctaccatggccggcaaactttttgtatttttagaagagatggggttttaccatgttggccaggctggtcttgaactcctgacctcagatgatctgcccaccttggcctcccaaagtgctggggttacaggtgtgagccactgtgcctgaccgaaaataattctttttttttttaatttttattttttattttttatttttttatttttatttttgttttttgagatggagtctcactctgttgcccaggttggagtgcagtggcttgatctcggctcactgcaagctccgcctcccgggttcactccattctcctgcctcagcctgccaagtagctaggactacaggtgcccgccaccgcgcctggctgattttttgtatttttagtagagacggggtttcaccatggtctcgatctcctgacctcgtcatctgcccgcctcggcctcccaaagtactgggattacaggcatgagccaccgcgcccagcctggaaaataattctttttgaaaagacaagtaagttgaactttacttaaggtttcatataaaatctcttgtggaaacttcagatattaacactgagcccatttgatgtatttttttcaggtaattttagtcatgagccagattggctaaatgctaatcatcactcaatatactgagctttcaataaaaaagaattctaggccagtccctagattaggactttgtaaattagtagtgttgaaaaggaatgtctcttgcttaaaactgccagtttttgttacgtgatttttgttttgtctgtgttttgcatgtataaaaatctcattttttaagtagttgcaataaatgtaattgttttttcagcttaatgcatcttttaataccaaccctttttcacatgaaataccctgttgaatcatcaaaatcagcttctccatttaatcttgctgagaaaccaaagactgtgcagctgcttttggacttcatgctagatgtccttctgatgccttatgggtgagttaaaaaataaaagcaaccttgttcttgactgcttttactacggggagttaagtactattttaaatgattaaactctcactagtaaatgaatgcatctcaacatccatttacgtttacaaagatttttttcttctaaacttcagttccactgcttatcggctttacaaatgctgagttgccattgtgattttagactctacctgcctaagatgaaatcagtctttccccataaaaatagttcctgttaggccaaggtgggacgattactgggggctaggagtttcagaccagcctgggtaacagagcgagactctctctcaaaaaaaaaaaagtttctcttttaaatttactattaatgctatgatggttctctttgccacctagccatacaatgataaattgtctccagcttttctcttctttgttgctgcaatatcatttgcataatgcctccttccttctccttgctgtgtctggaactcttcccactgctatcatctagttttgcctcttttcaactcttgtcataatttctttcccagcggctccacttcttcaaatctctctacaccccctctctatgcttttcccgatttgcaaaacacagatctcatcaggcaacaccttaaaatccttggtttctcatatccagtcattaatacactcatgcatttcatgcacgcttatgtgtccttgctgtttatttttaagagaacgcctttctgtctgcctagaatgcttcttcaaaaaagaaagaaagaaaacaacaaaaagacactttgaaaaacagcatcctggccaggtgcagtggctcccacctgtaatctcagcactttgggaagggggggccgaacagatcccttgagcccagaagtttgagaccagcctgggcaacatggcaaaatcctatttctacaaaaaatacaaaaattagtcagccctcatggcatgcacctatagtcccagctacttgggaggctgaggctggagtattgattgagcctgggaggttgaggctgtagtgagctatgatcatgccactgcactccaacctggtgacagaacaaataccctgtctcaaaaacaaaaaaaaaggaaaaaagaaaaaagcatcccaaactggcttaaaggtcaactccgtttgtctctgacaaatttcttgccttagacagatataactgcactattttctgtgtcataaaaacacaaaacacccgcctatatggccactgtgtgtttttgctgcattgtagacatttccatctcccctagtagatggtgagccccttgtagtcgagacctatttcatgtagctttggtctctggcatggagcccagattgtgatctacttctggtctacttattttgtccatctgccagataaatttttccaaaatgctgttttcatcttctttctttcctgatcacaaaagtatgtgtacatggtaagctaggcatgtggggctccatatcatttgtttctcaatccagaaatgagagttcatgcggtgtgatgaacaaatttgttctcctcctgcccctcttgtttggaagcccaattttctgggccttcagtcactccatgttcactgtcaccacctgttatatcatttcttatttctcagcagtttctttgcatctgatagaatggcagatgctattacatgtgttaggttgttactgtctcagcttactccagatggcagagactcgatcttacatctccttatattcctctgtcttgtgtttaggatgatgtttgtttgagatagggtctcagtctgtcgcccaggctactgtgcagtggtaactcaatgcagccttgacctcctgggttcaagcagtcctctcacctcagccttctgagtagctgggactacaggcgtgcaccaccacacccagctaatttttttgtattttttgtagagatagggggtcaccaaactcctggactcaagcgatcctcccaccttggcttcccaaaatgctgggattataggcctgagccaccacacccagccttagggtgttttatgcagtattaagatgtattaacttattgattgatttacttaatgccaccagtcttgctataacttagaaataaaaaaacttctttttatatttgttaaatcaggaggcagccagaatgacaggtgatgatggctttggtagataaaccttgaaattcagatttaccttaggaacatgatgtaaccaagccagtgattcctcacatttttcttactaatgagaacttgggtcatttatataataacattaaagcgattccttaagagatttttaaaaaatagataaatttaggaattgaatgaatatgacatgtaagtaatgtggaataacttactatcctatcaggttctaagtgttttcttgaacttttattatagtggatattttattataatatccaatatgataatggaatttatcatcatagatctttagttttaagagatttgaattaatatttatatcaaaaacttcattttgtagatgagtaataccagtttaattggatcaaaatgaatttcttagaggtcttatttctcctctatagaagctaaaatgaaatagggatgataaattaaccaaggcagtgcaaagggctttgaacatgtaatgggaaaagtcagttcttgtgtaacttttcttctttgggcccttttgagttttttcattttagggactttatgtgcttatgtggtacgtgcttatgtgcttatgtggccgtttggaggtttcagtggattttctaatgtagggataaagacctcagttcagggaggattgaaggtgaattacaacttcgtagaaatgagaatgactgtaaaaatactctcctttgggtatagtgcaatagctcctcccagtcccctttgtcaacaaacttttcctcatatttggcagctcaaaactcaaaatgtgattctggagtagccattagagcaatcatttatagattgagagtgatgaaaatatttatattcattgttggtaatggttgtagttcatttgtaaccaagttaaatgacgtgctctctggttaatttgctgaagatacatcttttttagataccttaaaattttttttatgatgaaattttaatttcaagtgttcattcttctagtaaaatacagtaggaggacagtatatgattgaatgttttgtatacatatatagttgtaaatgcttttgtatttatagagggttaaagtgttatttcctttccagttacgtgttaaatgaatcccagagtcgccaaaattcatcttcagcacagggttcttcttcaaacagtggcggaggttctggaatcccacagcctcctccgggaatgagcttttatgcagccaaacgagttattggtgataacccatggacacctgaacaattggaacaggtatcacacaaggcttgctcataatagtagttgattgtggacactttcccctatgaagttcatgaaccgtataaaacataattctagtatattcaggctctccagtgaaatatgtttgaaagaagcagttgatgtaatgtgttcttttcatgctagttatttattaagccctaggggcagggaggagtgggacatactgtttagtttttctaatactgcttacatatgtcaagtataaagcacaactcacttataaattgaatatgtttaacttttgtcattttatttttttttattttttaacttttgtaattttaattttttaattataggtttaattttcatctagcttttatggtgcagttaaaatacaatttttcttacattattcaacttttaagggctgtacgttttatgtaaagtgaggagccccagcacttcacaggtgacaatgtggggaaaagcatgactccctgttatattacttcttgggaatttaaaaattggcattaaggattttattctggatttaaacaggacacagatgttctctgagcagcttttaaaaatgactggtgctctacagagaaggtgccttactgtgtctgtgtcatcaggcacttcagggaagaacagatgagatcagtatgtaattattttggaattcaagcaacatgggttagtcttctaatccttcctttatttctccatggcagtctaaatgatttgatccctttttttttgggaaatgtaagtgaccattgattaaaacagtattcccaggagaggggaaaagaggcaagtggggcattcttgccattcacaaatttatagaatgttttattgagtgagggatataattgatttgatttccttcttcatgttttatggatcttttttttttttcctccttaaactattatgtaagtaagaaaggtaaagaattaacagaggccgggcgcagtggctaatgcctgtaatcccagcactttgggaggccaaagtgggcggatcatgaggtcaggagatcgagaccatcctggctaacatggtgaaaccctgtttcttcttaaaaaaaaaaaaaaaaaaaaaattagctgggcgtggtggcgggcgcctgtagtcccagctattcaggaggctgaggtgggagaatggcgtgaacccaggaggcagagcttgcagtgcgccgagatcgtgccactgcactccagcctgggcgacagagcaagactccatctcaaaaaaaaaaaaaaaaaagatttactgaagctactctttattgagtgcaatctatgtgacaggcaccgtaccgggtactttgaatacaatatctcatttaaccctcggagcaacccagtaaggtatagaaattgttagttccattttctgaaaggcatggaggttttgagatttaccagggtctcacttttagtaccaggctttgaacctaggattatctaagggttaaagctacaaatgctggagaaaaattgttattgttcaattacaatcttaaattggtcattatttgccaatatgcctctgtatgtgttttgtcagtttcataatctagtgctgaaacgaacagtttagtttcagggatgaaagctattttcctctaattttaaaatatctctttgttttatactttttcttccaaggaaaacatgttttttccaattataaacaatgtaaatattcaagtagttaagaatagtagagaaattaaaaattaaggggctgggtgtcgtggctcgggcctgtaatcccagccctttgggaggctgaggtgggtggatcacttgaggtcaggagttcgagaccagcctgagcaacagagtgagaccccgtctctattaaaaatagaaaaattagctgggcgtggtggtgcatgcctgtaaccctagctacttgggaagctgaggcatgaaaatcacttgaacccaggaggtgggggttgccgtgagctgacattgtgccatgacactccatcctgggcgatagagcaagactctgtgtaaaaaaaaaaaaaaaaaaaaagccagatgtggtggctcatgcctgtaatcccagcactttgggaggccatgttgggcagatcgcttgaggtcaggagttcgaggctagcctgaccaacatggcaaaaccccatctctactaagaaaacaaaaacaaaaattagccgggcatggcggtgtgtgtgcctgtagccccagctgctggggaggctgaggcacgagaattgcttgaacccaggaggcagaggttgcagtgagccaagattgcaccactgcactccagcctgggcgacagagggagactctgtctcaaaaaaaaaaaaaaaaaaaaaagttaactggaatcctgtcacactagtttgtcatctgtctacagttttgctctgtgcatgtgtgtgtgttcaccgttttaaacaatacatttctacttgtcatgtaatacattatttgtagtttgctttttatgttgaataatattttggatttttaaaaaagtaattctttttaatgtttgtttacaattatatgtgatatgttttaaccagtctcctattgatggacatctgtatcattttcagttttctttacacattttttgtttagtttatatctttgtgtacttgacttccatgtgtcctttttgtggctgtacaaatgtttgaatcttttctgttgtagctgttgttaaaagtaagttgtatcgagcaggggagggaaggcaggcccttttttgatctgttatgcttttttaagttgcatttttttctcatttaataattgtaaactttattaatcctagtatatgtaaaaactgttatgtgactgattttttaagatgaaaatgaaactttattttttcaggtgtatttatcctaaatagagtcatttgtagtgaaattcatagcatcttcacattgcatgaagttctaagcagaatctctctagtctgtttcatttcagccagtcaattaaattgaaaactgtttgattagaatttcacttgcattgagtagctaacatttgaagtcatatcctttgtatgtaagcaatagagtgaaactccatggaatgtgagttgtttagttcttttttgaactgtcagaaaaatccatggagcactatattcctagtgtaccaccctcttatctggaggccccaaatttggacttcaagacttcatcactctagagaggctgtgtaacctcactagggaggctgtgtatcataataattttggagtcagagaggcttgggtttgaatcctgccatcgtcgtttaccagtgtcttaatcttttaagccttgcctcggtatttttagctaaaaaatgggtataatgattgatttattattgtgaggattaagtgaaattatgaatatatgtgctttagtacagtccccggcacattgtaagcctaagtaggagctgctactgttgttactgctcatctttggcttgtgaccacactgatatgttaagcagtactttcagtgggtgtcctttgctcccctgactgttctttctccttcccttcatttatctacagtgcaaattgggaatcgtgaaattcatagaagctgaacaggtgcctgaacttgaagctgttctccacttggtgattgcctctagtgatacacgccacagtgtggcaacggcagcagacctggaattgaaaagcaaacagaggtaactacttccctgtaaactttcaagattgaaaggactacatttctaaaaacttacttgacacattttttgtttaaggattttttgtaatgaggcattcaacttagaggagattattaaatatacctagtttgtaatcaagtttgctaaagagttgaattctgtgtaagacagagaagaaaatctgtgtggagatgctgtttatagctgcaataggttaggaatgtcatcacaatcaatgagacttttggctaggtagatgaacttaaagaattgatgttaagaaaagtgtcagttccaagaaactaatttttatttttttctgtgtctcaaaccattcgagattacttttaataaagactatgtatgtattatggttaatacagtgaaaattacattcatgaaaagagttgctgaatagattctaattcacacacgaggagatacagataggaaatagacttatagaaaatattctgtataagaaataaagtcaatgaaaaataaatgaatgaagtcaatgaaaaataaatgaatgggataccagtagcagtggttaaacccatttacgtttctattgaaactgcgatttttatttttatttatatatttattttttgagacagggtctctctctgttgcccaggcaggagtgcagtggcacgatctcagctcactgcaacctccacctaccaggttcaagcgattctcatgcctcagcctcccaagtagctgggactacaggtgctggccaccatgcctgcctaatttttgtatttttggtagaaatgggatttcaccatgttgcccaggctgctctcgaactcctgagctcaggtgatccacgcagcttggcctcccaaagtgctgggattacaggcgtgagccaccacgcctggccaaaactgctatttttataccctgttgattggcattataaattgaaatgaagttttggaaagcagtttgcaataagtaatgaatcataaagatatttctatccttttatctcaatattctgggaatttatcctaaggaaattattcaaaagcagaaagagatttagaaaaattttatagatttgttcattatatcattttctatcattgttaaaatatgaaaacaaattcagttttccataatggggatatagttaagtaaattactgtatgtatctttatggaatattatatatttgccaaaatatgaatgaagttaattactactaagtttttagtttgttttactaaagtgtttgttttgtctgaaatctctaaaccacaagtattatgaaagaaaagcaacggcggagcttgaggattagttagtagcaatcagctgaggaaagatgtaggtgaatcatatctaaaacagaattgtagaatgcctctgaggatagcggaattgtggctattctaagaagaagcatatttataaactatgaaagaagataaatccaaaaagcagttaaagtagcttcatctgttgtgtttgcacaaacacaggatagcttgaaagcagaaccaatgtcaaagggcagagagaatatagtatggtaaaccagtcaaatgaaaggaaggattacattattgctaggtttatgaaatgagtgggtgggatctgctgcagagggtgggaacgaatcaccaatcatcttttttttttttttttttctgagacagagtctagctctgtcacacaggctggagtgcagtggcacaatctcggctcactgcaatctccccctctcggattcaagtgattctcgtgcctcagcctcctgagtagctgtgattacaggtgcacaccaccgtgcccggctaatttttgtatttttggtagagatggggtttcgccatgctggccaggctggccttgaactcctatcctcaggtgatccacccgcctcggcctcccaaagtgctgggattgcaggtgtgagccaccatgcccagctgtcaccaatcaccttatatctgaattcaccttattgtggggcccaaatagaattaagtcttagtgactgatagcataactactctgcagaattaaaactgcaagtgtgtactggtagataaggaaggagggggatgctgggaatcacagtgacgttagagaaatacggtggcttgcaagcttcctagatgtggctttaatttcatgggtaaaaatttttttgtcactttccttatcacttttgaactgccaaatggttaaacagacgaatcctaccctgccccaggcctctttgaacaagtgtagtaaagctctgctctgttggagttgctccatgccattggcctgagaacccatctatgtaggaacagtgtccagtgttcttgtggtaccaaattgtgccattggatacaataatctgttgagtctgggtgggataagtgatttgtatttgttttggtttaaaaacatactttgatagaaattagtccctttcttttccttctcttctacaatgtcaattgcccatttcatttgtgtgtttctaacattttcttttgttaagaaatgttggggctataatttttttgaaatcactgaaggagggggaaaaataattttaacaacctgtgttgaaaccttccatagcttaattgactggaataatcctgccatcattaataagatgtacaaggtgtaccttggagatataccactgaagacaaaagaggtaggttgttttgatttattctcacatcagcgtaaaaagtagtttgttgacatgaactgcgtatttatacattttcttctagtttcatttaagctgaatctgtgctataacaaaatgctagttttaagtcatgctagtttagatgaattaaaacctggtaatttagtttactggatcttgtgttgtaaattcagattcctaaataacaatgacaaactgtctagagtagggattgacaaattttttctgtaaattttgtaggctttgcaggccttatggtctctcaggttgcagctgctgaactcttgtaacatgaaagcaactataggcaatacataaccgaatgagcatggttgtgtgccggtaaaacattgtggatactgatgtttgaattttgtgtagttttcatatattacaaaatatattcctttgatattttttaaccattacaaaatgtaaaaatgatgcttaactcatagaccttatcagaataaatggtgggccagattcggactgtgggctatagtttgcagacttctggtctagaatctagaacaaaagataggtccttctaaagcctcaaagtaagacctttgccttactaacgtgagttctttttagttcactgtgtttaaaagtattccaggtccaaacccagatatacaaggattatttgtttgcatgcttgcattcttgctcttttttgtttgagttggggtttagctatgttgcctaggctggacttgaacttctgggcttaagctgtgctcctgcctcagtctcttgagtagctgtgactacaggtgcacaccactgcacctgtctgcctttttgctttttaaaccataaatacttgttttaaaaatcaatattagccctggttagattagattgagtgtggtaaagcagaaataacaatgaattgggaatcaggacctatgaattctagccccaaatggctgtacacatgaatgtgctggggaggaaaggtttggctgatcacataacttttcctggcctcatgttcttcatgtagaaaatgaaggggttggattagattagtggttctcacagtgtggtccatggacctttttagggtcacaaaacaccttttaggcagtctgtgaaggccttttctttttgtactgtgtcaatatttgcactcatggtacaaaagcaatggtgagtgtacttgctaggttcctaccacatatcaaagccatgtcaccagatgactaacagttattctattcttcagtgttatgtactcatttaaaaaaaaaaagagaataaaactcagctttacttaagaacatccttgatgaagcagtaaaaatgactttacttgaagagtagacaggcaaattatagctaccgagatgggtatttggtgcatactttctctaaaagggaaaaaaatgagcttgttacttcaagaaaaacaacatgatttattggcaatgataaaagttagctttcaagcaaaaattagagttttgagaaacttgtattcaccacagtgatttgatagcttatcagtacttagtagatttttctgatgccgttagaacacaggtgatatgagcacaggctttgtgaaaaaaaatgtatgtatgaagaaacatttgcttaactcagtgagccagtattgtgcacatgaagaatgatgttacaaaagcatataaggacaagggagccattcagagtaagataaccagtggaatatagtataagagtatacaaaagttcattgatatggtttcaactccaaattgcaactaaccttttttttttcattttttaaaaataagcaattaactgttaagaaattattatttgtcaagttttggtgtagtatgaaaaaagaatgtccacaattacctaagaaagctaaaatcatctccacttttccaaccacacatatctgtgcaagcgaggtttttgttacttatttcaaccaaaacaatgtattatagcagattgaatacagaagaatatataaaaattcatttctcttgtagtaaggcgaacattgaagagattagtagacaatgtaaaacagtgcttctccctcagtacaattttttttgctttggaaaatagttattttttataaaaatgttagttttgaaaataatgagtttattaataattgtgagtaaacaaatatgttaaaatttctcagttttaatttcccgtatagtaaatattgataggttacacagatataaacagaagctctttggagagttcagtaatttttaagagtgtaaagggatcttgaaacaaagtttgagagaccactgattaagatgaattctcatgacattttcagttcaaaataattttgaattgctgagttataatcaagcatattttcaacagggtgcagttctgaagccagagttgaaaagggaccctgtcagtacaagagtcaagttaaagattgtcccccatctcctccgctctagacaagctgctgaaacgttcccagccaacattcaggtaatttgttttttccagagaatattggcctgtctgcaacttttatgtctatttaattagagaaagaactgtgttaatggatattcagtgggtaggttgatgtatataacaagattaatgagattctttttttctatcttaaatttgctgcaatatgattttaaaaaaattatcagaaaatatatataggttgagcatctctaattagaaaatctgaaatcctaaatgctccaaagtccaaaactttgtactgacatgatgctccaagtgcaaaattccatacctggtctcatgtgatggattgcattaaaacagtcaaaactttacttcatgcacaaaattatttaaaatattgtataaattaccttcaggctatgtgcataaggtgtatagaaaatgtcagtgaatttcatctttagatttgggtttcatccccaggatatctctttatgtatgtacacatattccaaaatctgaaaaaatctgaaatctcaaaacacttctgatcctaagcatttccagtaaggaacacttaacctatgctatattggcttccatttatcttaaatgtatggtaataatccctttcagacaaggtttttttttatgtgtggcttttctccaaaaatggtatcattagcaacttagtcacttaagtgacaaagctgagtcatccttaactgaaagctcacttgaaggcagtggccaaatcctcttgatttcatcttaatgtcttcacttctctatgcctataatgctgctattaattcaaactattacttcttgttttggttattgcagtattcttttaacttaccttcctgcctctagtcttggcccacattcagtctgttttctttttcattgctttttttttttttctgagacagggtctcactgtgttgctcaggctggagtgcagtggcacaatcttgtctcactcagcctctacctcccaggctgaagtgatccttccacctcagcctcccgagtagctaaaaaaaaagtctgtttcaaataatgtagcacttgattatattttgtcccatatctttttgtggtttttttggagacggagtctttctgtgccacccagactggagtgcagtagtggtgtgatctaggcttactgcagcctctgcctcccaagctcaaatgattctcccatctccaggcctcccaagtagctgggactacaggcatgtgccaccatgcctggctaatttttgtatttttttgtacagatggagtttcactatgttgcccaggctggtctagaactcctgggctcaagtgatcttcctgccttggcctcccaaagtgctgggatttttttttttttttttgaagtgagacaggatcttgctatgttgcccagactggccttgaatgcttgggctcaagtgatcctcccgtcctagcctccctagtagctgggactgtaggtgtgagccaccatgcttggctatgtatcattttaatgtgtgtatctcttaactcttcaacaagattgagtgcttgttcttttttatatctcttagtacctagcacagtggcaattataaagcagatactcaatactagtctgtaactcacatgttattgttaaataagatcagaatactgctggcagttttaggaacaagagtatagagtttttttttttttttttagtgtaagtaatctttgtcataaaaaggaacttgagggatttagatatttttgatgttgttggttaatattgaacttgctggatgctgcacaggactcatctgcatgatctttttgccttctagatgtggttccataatacttgaagcacctttaccccaatgggacacttgtagaatatttccatttgtatgttttctctgaagcttttattagaatttgtcctgaatcatataattaagaaacatagggaatagctgagtggtgacccactgcagtgtgtactcttcgtttcctcactgtggtagacccacaatctttgcagacttgtgcgatcaaccattgtgtttgttactccacagactatttataggagcttctgattggctttctaagttggtcagctaataatgtgtatctgcattaatgttgaagaacgagatgtagtatgaaaggtctgctgctgaattctgattactattcaaaaatattaaattcttatttttattaattgatgttctcaactcttcattttacataggtggtgtatgatggactttttggtacaaatacaaattcaaagttaagaacattatccctgcaatttgtgcatcatatttgtataacgtaagtctttaactattttaactataaagttttcaagctgctggaatgattgagtgcttcaagtgtatcgttttactcatcttacctagaaagaaaacatgtttgctcatctttaaaaatttttgtattttaatagattatttaacttatttcggttatgtctctcattattttatgtaatcatccgtaaagatatgtagtcatgagattcttatcttgctttgtgtatgtgtgttttatttaaagctgtccagaaatcaagattaagccattaggtccaatgcttttgaatggcctcaccaagctaatcaatgaatacaaagaggtaagtgacttgtcttttaaattttatcaacattttatatcttaaagtattttctataatatttctggtctgtcaatgtagttagttaaaagtttgttaaagtttcactgttccttaacattttacttgaaatagtacaaatttcagaaattactgcccttttttgcttttttggggggaaataactgttaaaaactgatatgaggtcttactatatctttttttttttttgagatggagttttgctctagttgcccaggctggagtgcaatggcatgatcttagctccctgcaacctccggctcctggttcaagtgattctcttgcctcagcctcccgagtagctgggattacaggcacctgccaccaccacacccagctaattttttgtatttttagtagagatgggttggccatctctactggccgtctcaaggccaggctggtcttgaattcctgacctcaggtgatccgcctgcctcggcctccctaagtgctgggattacaggcatgagccaccatgcccagcctgctgtatctttaaatagcattttttcagccagcaccttttgtgctacttctagctattgtgcaaaaatggaattaaaggaattgaaatttatgttgatttccctatgtgactatttggatttggcttgtgttgggaaactgttaattctcaggggctaagatactttttttcttttatatttttctctggtaaataatggggctgagattttaatgattcaaaattctgtcaaaacatgcattcagtaaatttttgattccttaagctaaatgggatgaggattccttggactgtggatttttgaatcccatttttccctgctgtatttctcttactataatatctccaatatttaaaaggaatttgcttaaaaaggtaatatttcaagaattcattagcattattttccccagtctaagctaaacatgaatgcatgtttgcagtagtatagtgagatcaagatcttacatctgaaattagaactgagtttgaatcctagttttgttctttggtgagttacttaaattctttgcaccttcttattagaaaaatgaaaataatactgcttgattagattactgtgaagattgaatgagttaatctacctaaattgttcaccatagtcaaggcacgttagtaggtattattagtgaaaggcactttatttactgtgcagctgtgctttggggtggtaagtaggcctggttctcatagcttctttctcctattgagtgatgcttgcatggttaagatctaggggaccactcagattattttatggcatagatggtgaaatgctttagagtcattggtagaaatgaaaatgttctggggctcttggggagaagctgtatatttaaatgtaagttagagaggccagacaaaccacagggtgtgagtccccttacctgcaggtgacatctgcatgtcttcccaacagatgaatccataagagtagccatttagatgtggaagggcaaatcctaggataaacacataaactttaactggtagaagtttattgtgttctgagtaatcagattattagtttttgtaaaaccatgtaaaactctatctgtatcttgaggagagaacctcactaattcacctggtgattatgaccctcttaattttttatggtagaaaatatgatagaaagctgttcattacagtgtagatttttagaagatcacactacagtttattgcaattttggtgagagacggaggatcctagtctgttggaccggtgatgtattttctaatgagttaatgttttttagtgtgttgaagatgaactttggtgtttggaggttacatagtgttgaaatatcttgaactcagcaccagctaagagaaacctttcatatctatgaccactgcattttctttttggagcgattggggatgcaaggttttgtcttgtttttccttttagttagtgtgatggattctgggtttggacatttttgttgttgttcaggtgctaacaccatgtagttagacagagtgagacctaggtttaataaggagtaaaataatgcatgtaattgcagcgaaaaggttttactgtttactgtattttttgttttgtctgttttttgttctttcttttctttcttttctttttttaatttcaaggaccctaaactactgtcaatggcatattcagctgttggaaaactctccaggtgagtaaactcttttttagtgagagatatggtgttggtaaacagagaaaaattatgtggcatttaataatggcggagaataaatttgtcgtgattctgaaagggaatgtatttaatggtcataggttgtttagaaatgtcttctgtgtagaaggaaaaagatgtgagacattttaatttacatttgaaggtatgttactgtattaaatggtggtcttgaaatgagagtttgaacttaattgtgtcataatgggttactttttttgtaccctagagacttttgattgaccttaagtgtttttgttgctacttggcactaatctttataaacccagtgatcaaggtttttctagtgattctcttttctgagaatggtgtttatgattctgagtggccctgacagatttttttttcttctcaatgtgatttcctcattccagttcctcctggcttcatcttccttcactgtatttgaaagcagggagatagagatgaagcattctcagtggcaccatgtgctgcttccacgcccagtgcaggttttgtgttggcctgtgtagaccaggtcttgctcttctctacagtgaaaggagctttggggtttggaagaaagccaccccagatcagtggatatagtgcagggttgtcagccaaccttgtcccttgtctgttggcatgaagtaacaaagcccctttccacgacagtcattagtttagatcacagtttggtcttacctaatttcttcatgttaaaatcagaaatgttaactgaatgcatggaatattatagaggggatatttggaagatgtgcgtgttaatcaagggttatttggattaaagaattaaatacttggaaaaatttttggctctcagagcgggtaatgatgctgacattgtcttcagagagttcaggaaaatttgtgtttagtttcattttttccctttttcatctcttggaaatttatgatagtaacaatatttttacattcttttgcagtcggatgccacatttattcactaaggatatagcgcttgtgcagcagctttttgaagccctttgcaaggtagggaaacagctgctaagtttatgctttgtgtttggatgttcccctgggaacccaacaaggagggaaacatttttatcatctttataggaagagcctgagactcgacttgctattcaagaagctttatctatgatggttggagcgtatagtactttggaaggggcacagcgaactctcatggaggcacttgtggcttcgtacttaataaaggtaggtccgtgtgaactacaaagcctgggtagtatacggtttacatttttaagaacaaaatttgaattgctacttaacttttgataagaggagtatttgctttcacttgggctgtgatttaggatctatttttaattcttcatgatgaaaatttgactttaggggagaaggagtggtagtattcatagcgatgcttatgtttagagctttccatgtgggaaaactattcttaatgccatgtcctccgagttagaagtgttttgtctttgtaactggtagctgagcactactgtccgctggggtagagtttgataggtaacattttcagagaaaagcagaagggatgaaagacaaattccatatgtcaaagtgagtctttaggaagtgagccagtactatcatacatgctcttcttcctctttatttggttttcatgggaatttgtaggaggattttgaatatctgtagatacacacacacacacacacacacacacacacacacacacacatatatgtaatatgtaatatatatttgctttagtcagttctttgtcccacatttttaggagtagaaagggagattggaagacagaatgatactaaaaagtgtcagtcagattaatataaattgtgtcctaatggaattagactgacatgatttaatattttgagggaattttaaatgttcagaaaggtatctgcttcctattaaaatatgacagggttaaatgtgctattatatacattcagaaagcttactatgatggagtcctattgtcaagtgctcttagtgtgcagtgcatgtggttcatggtcatatgttatggacaaaggtgtgtaggcgtatttggaagctcattagaacagaatactttaaactttctctaggtaactttacaaggaagtgtgatgcttgaataaacacagatactggttctacgcacacagatcaaatcatgtaacactattaccaagacaaagctaatttcttttcacagacaacatttaaagcaaccaaactctaggttagttatgtaatttaggctagtctttaatatcctcactctttaatgtagttcaaggactgctaaatagcaagaatgccagaatgagtgggacaatatatatatttttaatgtctctcttatttcacttatgtttgtggctagaggagtgacctggggaaggtacgtaagaataaagcttcaggatcagtagattctaaaactacttttctggttgaactttgtagttacagattattaatcttagttaattgaatatatttctgtagttgaaactgctttgagctaatctgagaagctcaatttgaagtatttagcttcaaattggtggggattccaagtaggctctgtttgtaatttctgccaaatacctgactttcactcatgtgactgacagtttgagagttggggtggcggaggtgatggctagaaactgtcacagtgaccgtggtcccaaggtttgggctgaggatgcgcagagattctctagttatggtccttggaggtcttcctacttcacctggaggatcctctaaaattataagaatactctttaagtaatgccaccatccaaaagacttaaacaacatgattaaagatcttgaacaaatgatttatttaatttagatacacgtttattaaaatgtcaccttagaattttgaattgtttacagttaggaagactcatcttgattggaatgaatggctggtaattgattttttttttcctttttcggatcggggtggtctgtgtatgtttacacatgaaatagcctgaagttcaagttcgacaagtggctgtgaaatttgccagtacggtgtttccctcagatcatatcccttccagatatttgctgctactggctgcaggagatccgtaagtttcaaaaggtgttaatttgaattttggtttattttgaatttatttgaaaattactaaaagttgtattgtttacaatgttggtctatgaaatttagaagctatttattaaagaaagtatggctcttgatgtgatatagacctgtactcatatacctatatatttatatagtaatataaatattacatgtatatatctatataatatacattatgtagatatatatgtgtaatatatgatatatagctaatacagaaaatggttatgaaatggtcaagtgtaaataaagcaaattatatgattgcgtgtgtaatataattatatatctaaaaacaagccctatgtaaggagaaaaaaggctgatgttgatggtttgacatatgtattaatattttattaaatatggagtatcattttatatctaatatatttttaaatgaggtataagttgcattttatattaatgaattatactactgcattttctagagtgtgtaatgctttttaaaagaatgtttaaatggttttgaaattgggacatgcctttaaaagtcatgtacatataatgaaatatatgtggacatattaaaacaactcttttcaaatctgttatatgtcttacagtcaatgccatcttaaaatccatgcagcattctaatctatttcataataaaccattactacatttaacgtttagaatttttgcatcccttaagtgagattcttgtatatgtttttcttttttgttatcagggatagccttatttggggagatgaaaagcttcatttattctgaggaatagtttaaataaaattatgcattctgtgatgatttgaacacccttgcccataaacttttatggtccattttttaaaaatgggtaattccttgataactgtttcagtgttctagttggccagctgtgtgcccctcatgccatttattttctttactataagttgtatatattttgctgttatttatttggttggtattttaattggacatcacaagttattaccaggtgctggtttttgacttctgatcttggctgctgcttctcatagagcacatttcaatctggttaaagtggctttggattgttaatgttgattctggtgctctgttgcttcttaatttttttacgttagtttcccaaccaaggccagatgtactggggcctggcagccaaggtgtcagttcatgttagagcaaggatttaagtctagggagttggacttccaaatagagctcttaactgctgtatcttactctgtaagtgctgaaaattgtttttgtttaagaaaccaaaaacaaagcataactaattcaacagttttccttcttaggttagaaccattcaggtcaaatgaaaatcctctgacaacttaaggaattatttattaattctttcttttcggccctttatgtgttgtttggaaaatgagacacaatcagaggcaattgaagaattaaaaggcctttatgtggtatctggataagactattgctgagatcagtctctaggtggtctgaaattggttgggtttatatttttacactttaatgtcacttatgagttattagttgtacagaattgtagctgaatacatagagatgtaagactttgggtggagtgtgtagaccactggatagtcactgacttctaaaatatgtattatagttgtttatggtttaactctacgaggtaaagcatacacatagatatttacataataatttacttaaagtaccctatcttgttttttaatgtgagtcaaattcaaagatgtaagccagatgagtccccggacctcatgcaatttctgaaaagaagtgatttcttataatgtgttatgttgactctgcttagatagccaagaatgtatttaagacattttctgagaactctagctgccaaataaaattgctgttcttattcttcaaatgatcatttcccattggtgacatttattttttattcttatttgtctttttctgaaagacgtgaagaagttcatggagaagcacaacgcgtattaaggtgtcttccaggtagaaacagaaaagaaagtacttctgagcagatgccttccttcccagaaatggtttattacatccaagaaaaggtatggcatgcaacttaaggtaattagtctaaatcataatggatgatgaaaataaaaacatctttaaagtgaaaaatgtaatcactagatgttgactcataaaatttctttttcttttcttttcttttttttttttgagatggagcttcgctcttgttgcccaggctggagtgcaatggcacggtcttggctcactgcaaactccactacctgggttcaagtgattctcctgccccagctcctgaatagctgggattataggcgcctgccaccaagcccggttaattttttgtatttttagtagaaacagtgtttcaccatgttggccaggctggtcttgaactcctgacctcaggtgatccacctgccttggcctcccaaagtgctaggtttacaggcatgaaccaccatgcccagctgactcataaagtttctagcattaatacttacaataagaagaagatacaaagtgaggaaaaaaaattgtaatcctcacctgtaattgatctgttttgcctaaacttgaattacttataattcctttcatgcttggcaacattttggctgtgttaaatattttttcccttaatatgacatgcttaaaaatacatctcctttttttaaaatttttttatttttttttgagacagggtcttgctctggtcacccaggctagagtgcagtggtgtggtctcagttcactaaaacctccacgtcccagactcaagtgatccaccctcctcagcctcccgatagctgggactacaggcgtgcaccaccgtgcctggctaatttttttattttttgtagagacagagttttgctatattgcccacgctggttctcctttttatttttaagggcacgctttagggtagtgtaagtttaaggatgcttcagggaacagttcatgttcttcccaccgtgttcataagagagcatcccatctgcttttgtaagtttttgcttttgcacagtgttttctgctagtagatccaggatattggcagtaatgaccatccaccccctccaggccttgactctgtcccactttgccggaggacaccttcctaccttttacctccactggtgatcctagctctttgctaggtaggcaccttaagggagttgaaggtcagtatgcagcggccatgattctgttttccacatagcagcacagtctatttgtggtcagaagattctctgcttgtagtttcctcctactttgattattaatgaaaataactggcatgcagtgacctgagatgaccatattagtagatgtctggaataggtttattatttttaaacaaaccagaacaaacatggaaaaagggcaatacacttgtcttttagtgtgtgagggacatgcacgatcagcatggttaataggaaagtggaaaatgtttgatcagaaaaagaagcaaacttaggacatgtagctagaaacacagttgtttttgagttgaggaagggcaggtatgcttcatttttcagtaattgtgtctgttttggactttttaaacttaggcttctcatcgaatgaaaactccagtcaagtacatgaccgggaccactgtccttccatttaacccagcagcctttggagaggtagaactttcatatatttctatttactttttgtaagtgttctaaaaagatcacaccacacccaaagaggggtctgtcattttgttgtgttttaggtaaacccatattgtggtgtcattgttcttcatcgggttgtttatttaaaaaaaaagtattgggaaattggtattattttaattcatagtgaagtatgtaaatatatttatctcagtgagattctttttgtgaaaaaactggatgttctgtagtgattactattgggattttgcagcaagttagatttgggttttaaagccaacctgttgttgaggttgttagggttatttagttttgaaggttggagaggattaaattgatcacacttattaagggaaattctgttttttagattattgacttgctctaggtaaattacaagaggtgatcttgttcggattaagaatattcacagtgaatttgctgcctatcctattttaacgatcaatgaaaaagcttccagaggatggactccttggcagcctgtttatgtaagggttgttttttttgtttgtttggttttttttttttttgagaaggagtctcactctgttgcccgtgctggagtacagtgaatggcgtgatctcggttcattgcaaccttgcctcctgggctcaagtgaacctccgtcccagtctcctgagtagccatgactacaggcgtgcaccaccacccctggctaattctgttatctttttggtagagatgggtttcaccatgtttcccaggctggtcttgaactcctgagctaaagcagtcctcctgcctcagcctcccaaagtgttgggattacaggcgtgagccactgtgtctggtctatatcagaggtttttatggtgttatatctatttttctgtagatgaattgaacccattttctcagattcttgtgtcaatggagtaaacacaactggaattctgcaggagtaataggccatttacttcagatttctttcctctctctctgtctttctctctctctcacacacacacacacacacacacacggcttttaaaaaataatgatttttattataatttttaacttttattttaggttcgagggtacatgtgaaggtttgttatataggtaaatatgtgtcatgggggtttgttgtatatactatttcattacccagatattaagcccaataccccatagttatcttttctgctcctctccctcctcccaccctctctcctcaagtataccccagtgtctgttgtttgcttctttgcgttcagaagttcttatcatctaactcccacttataagtgagaacatgtggtatttgattttctgttcctgcgttagtttgctaaggataacagcctccagctccaatttctgactttaaaagttcagtttgtattttaacaatcttaaaaaattctttggatttgcaaaccttattatacaaattttgctccattatggcatattttctgccttccatgaggattggaatagctttataaagaagtgtgggtgaatcaaaactagaaattgttactttgaagagtaccttcccacactgacttttcgagaagcttatgcagtcttcctctccgttctgtttgtagatcgttctgtacttgcgcatgtgccttgcgcacagtgcgggggtggtgcccacctctcagagtttggctgatatgcaggatcatgccccagccattgggcgctacatacggactttaatgtcaagcgggcagatggcaccctcatcatctaacaagagtggggagactaaccctgtccagatctacattggcctgcttcagcagctgttagcaggtgttggaggtaggaatatgtgacgcgaaggaaagatactgaagcacttaagcaaaaatctaattttaaactttgctaagaatttatagcaaaattattctttttcttctgtaactgaacattagcctttgtttctttttaaacttacctgattcattctggatacactacttcttttttcggaaagaaatgctaacaatagataaatacatttttacttcggaagtggatgtgaagaacaggatatcctttttatagatagctcatctgtaaatttgctgtagtgaatcacatactatatttaggttgtgtaggttttcttttttttttttttaatagaaccgaaagaatgtgtgctaaagcagtggccttatactttaaaggaatttagtgatccctgtatgttcattacttttcttgaaatttaaggtgattctgaattcttatttaggtttgccggttatgtactgtctattggaagctgtgtcagtgtatccagaaaagctggctaccaaatttgtagacaaaacagaatggataaaggtatgttctgcatgtacctttttttaaaaaaaattctatttcagaccttaacttcatgatttctttttcctgccagcgggatccctatgaccttttctgcctttaggtcgttttgaaaactctcttatcatcagacacttactgggaagcatgtaggtcactatgtctcattgacacatctggaggagattgggagatgaattgagaagcataggagtaaaaaaaagttccttttctgtttcaaaagttttttttttttgaaaaaataagcaatagatttgtgtagtttaaataaaaactatgtaaaatgtctcctttccgtaaccatctccaacctacccaagccttctaatttttgtcctttcctctcccctctgacaaacatatataagtgaccacttatatatggcatgctttctagagtttacttatgtacatacacataaaaacatgcatttaaaatttttgtcccatctttttatcaaaagcagcatactattcatactgttttatacattctttcacttaatagtagagaactattccactacaactatggagagagcatcttctttaacagcctcagtttttattgtatgaatgtactatcatgtattctagatctttatagatggtcatttagagtacttccattctgctgcaatgaataatctatcatcttgcatattgaggaagtatatgttttagatggattccctagaagtggaatagctgtatcagaggacatgtgtttttgtaattttcataggtaatgccacaccctccgtgtgtggtaccaatgtacacttctaacagtcatgtatgagggtgtccctgtcccatggccacaccaaaagggatgccaggtttggaaaataaaaatacaagatactcagttaaatttgaatttcagataaataatgaataatttttttttttgtataagtgttggcccatacagttttctgtatctccatgtgctacatattgcggttctttttttggaaaatacagcttgaatgatggtaaaaatgtaaaaattatgtctttaagtgtgaaaacatgaatgaaatttgccaggaggtgtgagttttgcacatttctggatagtctggtcttatgaaattgcttttagtttaaaaaggtttttttatttcttatgaatattgactgattttaaaatgattttattgaactttgatgttttagatgagaggttgtcatgctatagtcaaaggtccaaatagggcctgcctcctgtttttgtatggtttgcaagctaagaatggtttttacatttttaaatgtggaaaaaaaaatcaagaaacgaataatgtttcatgacacaaacattgtcgtgtccatgttttactggaacccagccacgctcattcattgtgtattgtctgttgctgcctttgtactgcagtggcagagtggagtagttgcagcagagaccaaatggcccataaagcctttttgtttttttacagaagtttgctgacccttgttttagatcatctgtgaataaatttcacctgttttgtacttgtgtatctttgacgaaaatggacctaagattttgttatctaattcattcagctttcattttgttttcaaataatggcttgtttttttctcaatatccatcaacagattgaacgttcttttaattttaaaagatgttgtcatcaggcacgtggttctgtgtcatgtatatatttgttttttttttatactgctcagagtctgatgaataacagtaaagaagaaatgcgcgaactggcagcgttgttttattctgtagtggtatcaacagtgtcggggaatgagttgaaatcaatgatagaacagcttataaagactacaaaagacaatcacgtatgttattttgttttcattcttttttgtgggagatagggttttataaaaggatctaacttatttttgacttttatgttctcatttgtaaaatgaacttacaaattccttgcttttatgaccataaagagtaaatgagataggtaatacattggttcagtcagctcacttaacagatacgggtgctgtgtctgataagcactgttttaggtgctaggagtacagtgattcataaatacatgagaatccctggtacaacaggatgctcagagcctgcagccgtaccaccgtgaacacacctaatctcatctgatcttggaaactaagcagggtcgggcctgatgagtactgaaagcgagaaatgttagctccttttttcttcctcatctactgctgccagtgaaaaaacaagttttacttcacatagtttgttggttaccttgtgtttggaggttttggcaattagaaataggatctgtttattgtcttttgttggcaataggaagacattatgtgtgaaagttatgatattctagttacataagtgctgtaagctggaaagtggcgtgggagcatgtaggagcatgtaggaaagtcatctcacccggaattggagtgggcatggaattacagaatgtaaatcttaaagtgaatcaagattcagcttctcaaaattccgttagaaactcaaggtttctcttgttccctaagctcgatgcattagcatccagtgaaacctcgagtgttcactttattctttagccttatgttttgttggagagatgatcctaatcgacacacagttactgccatgtattcttgcgtatatgagagagagccagagatatgctattgtttttgctaaattcagagcccggagatacagcatggatccttgcttgcattgggattcacggtgggaaggtatttggctaaaaagaaaatgagaatgtcagagcaacaagacctggagagaaatgctgacaccctccctgatcaagaggaactcattcagagtgctacagaaacaataggtaattaatgtctttatgtcgatttgggtgttgcagtttttgaattatgttaaattttaatatggcgtttcagtttctttttatggcattgtatttgaaaagacacaagctttttcacaaaaaacttacttgataaataatgtatttttagtaacaacgaaggctgggtgtggtggctcatgcctataatctcagtactttgggaggccaaggtgggaggatgacttgagtccaagagtttgagaccagtctagtcagcatagtgagacctagcctctacaaaaaaataaacaaaattagcttggtatggtggcgtgtacctgtagcctcaactactgaggaagctaaggtgggagaatcactggagcctgggaggtccaggctgcggtgagctgtgatcatgccactgcactcccgcctgggtgacagagctcgaccttgtctcaaaaaaccaaaacaaacaaagcaaaaaacaaagcaatgaaagcactctattttttttctctacatttttttcctacatgtttttataaacagagatgatcctattatgggaacaaatttatacattaaaaaaatactactctatcccctgttaccatgttgtctttccactgaataaatgttggcaaattgtcaactagaagatatcgtacactttgattttattttgccgtcttaaaaaaaaccttgagtacatcactggttgctttgggtcgtaaggataatggtatgtaattctctttttggctaaatgtgcttacaggctcatttttggacagtacatcacccctcctggcaattgctgcctgcacagccctgggtgaaattggcagaaatggtccacttccaatccccagtgagggatctggctttaccaaattgcatcttgtagaaagcttactaagtagaataccttccagtaaagaaacaaataaggtaagtttttttcttattttttccctttctggaattcggtctttctatgcatacatgagcaaaaacagattataatgagaatagatggcattacagctggaggaaggatttaatgtaaaaatgggtgataaagaagcaagtcttaagtgtttacttttgagctagaggttatctgtgtacaatcttagtgtgcacatcttttggcccagtcattccaatttaggtctttataactgttaagatttgagtgaagtattaaattcatcaggaaatatcttttgtcatgcaaaaggtgtataataaaatgttaagtaattttgtgattttttttttattttaggccaaatataaatcctaacctcctaaagccagttttgtgatcaaaacacctcaattttgaggtgtaagatgatttaatgagcagaaatatcagtttactactacaagtttaattgatataatctttttttttttttgagatggagttttgctcttgctgctcaagctaaagtgcaatggcgtgatctcggctcactgcaacctccacctcccaggttcaggcaggtgattctcctgcctcagcctcctgagtagctgagattacaggcgcacgccaccatgcccagctaatttttgtatttttagtagagatggggtttcaccatgttggccaggctggtctcgaactcctgacctcaggcaatcctgcctgcctcggcttccgaaagtgctgggattacaggcttgagccaccgagcctggcctaattcctataatcttaatcttggtctagctactgtttaaaactttctgagaagatatacagtatagtttttattagctattaactaatcattgccaaacattgttaagcacttctaatgtgccggagagtatgttaagtgctttgcatgcattgattgaatcttctaaaaggtctagtgaaataggcacagttgtcatctctatgtgagataacatgaggaaacagagtcacagaggggaaataacttgcttaaggtcgcacaccagtataggctgaaatggttgagatgtgatttggtcctaggtcctctgggcccagaacccacattttaaatcgttatagtttgaaaggtaataagcctagttaaaggctttcttccttcttcttttgcagctgtggatccttagtggactcacatttgtgtgtttctaccttcaatgacttacagacatacgactgtaaaatttgatgcttttgtaaaaacttttgcgttgatgtgttagatagactgcgcttccctgtcatctcattttggaaatactgcactggggtaaagctattatatactctgtttaaaagaaaaaaatttggtgttcttccagatgaaagaacgagcaatccaaacactgggatattttccagttggggatggagattttcctcaccagaaactcctcttgcaaggtctgatggattctgtggaggtatttatattgctacctgattgttagttattcagagaaaaggcattggtcttttttttttttttaggtgcagttttgcatgctgtgagatttttaattaagcatttacttgtttattcaccagatacttgagtactagttttgtgctcatcactgtgctaggtatagcattgactaaatcacctatgagggaaagaccttttcttaaaatttttgagcaaagtgcggtgcagtgtgggtagaaggggaaacatatccacatagcccgtcagccagatgtgtggagtgagccactaaaaaacagtagttcttgagtgtttcagttggtatttcagttgttttcaagtctgatgatttagcttctgtcctctagatgcctagtgtgtagtggagaagacctacaagtaggcaaatgccaagatactgtactaagtatctcagcatggcctgatctggccctgcttttcctagccttgattcatgacattcactcactttctgtataccagcctctttggccgccttgcactgagcttttgaaagccgcctacttccttctcggcttgttgctgtgctccttgaaaagccttccctgacccatcatactagggtagattctttagttacttgtgccatcatgtctcttgttctttttcttcacagcatttatcacagtttctaatggcccaccagactgaatgcagactctgttttgcttactgttgtaaaacaagtgcctagcagtgtgattggtaatagtaggacctcagtaaatattggcagactaagtaaccggatgaagagacatttgcatgtaaggcagtagaatcacaaaggaaggtgtaattctatcaggaagagttagtgtatgtctttggaggagaggtttctgctgggccttaaatgatgggagggagaagagataattgaggctaagggctgaggcacccgagtaagagagttgctattagtctggattctgaattcagtatttttaaagtgaatttttttagacaatctacgtctcctgggatgtcattaacattgtaaccacttggagagaaacttatgatagtggttttctcatctttttccttttttgaatccctgagtgaggtgggtttcttctaggtttttttttttttttttttttttttttttttttttctgagatggagttttgctctgtctcccaggctggagtaaagtggcgtgatcttggctcactgcaacctccacctcccgggttcaagcgattctccttcgtcagcctcctaagtagttgggattacaagcgcacgccaccacacctggctaatatttgtatttttaatagagacagggtttcaccatgttgaccaggctggtcttgaacttctgccctcaggtgatccgcccacctcggcctcccaaagtgctgggattacagatgtgaaccactgcacccagcctgttttgttttttttttaatgaaggctcgtctggattcttaacttacttttaatgccattattttaagagtttagaaatacatgaaaagctagaaatatggaaataaggtagagagattaaatgatgagaataatgaaaagcatgaaacggaagcagaatatcttcacagtcgaataggacacagtgctgaaggtttttttggtttcttttaactgtttttattttttatttattttatttttacaataggatctcattctctcaccaaggctggagtacattacatctcccaggctcaaaccatcctcccacctcacctcctaagcagctgggaccacaggcatgcgccaccatgcctggctaatattttaattttttatagagacagggtatccctgtgtggcctagggtggtcttgaactcctgggctcaagtgatcctcccacctggatctcccaaaatgctaggattacagacataagccactgtgcctcgcccatttttaattttttaaattgatacaagcatacaatgtgtaatgatcaaattagggtaattgggatatccatcattttaagcatttatcatttctttgtgtttggagcatgtcagattttcccttcttgctattttgaaatatacaataaattcttattaactattgttgccctgttgtgctgccaaacactaaaacttaatttttgtaactgtattttagttcccattagccaagctctctttccccgttctccagtacctttcctggcctctggtaaccaccatttgttcactacttccatgagatcagttttctcacatacaagtgagaacataggatatttgctctgtgcctggcttatttttgctaaatataatgtcctccggttccatctatgttgccgtcagcaacaggatttcattattttttatggctgaataatattccattgtgtatatataccacttttaaaaaatccattcatctgttgctggacacttagcttgatttcttgttttggctattgttaatagtgctgcagtaaacattggagcacaaatacctcttcagaatacagattttctttcttctggatatatactcaggatacatactgggattgctgggttatatgatagttctatttttagttttttgaggaaccttcatactgttttcccaccaacagtgtatgaatgttcccctttcttcacattctgactatcagctgttgttttctgtcttcttgataatggctgttctaactagggtgagatgagatctcattgtggtttttctctgtatttctatcatgatcagtgatgccagactttttgttgtatacctattggccatttatatacctttttttgagaaataactgtattcagatcttttgtcccttttcaaatcagattgtttatttgctattgagttgaattccttacttattgtgtattttaatctcttgtcagatggataatttgcagatattttcgtctatgccataggttgtctcttcactctgttggatgtttcctttgctgtgcagaagctttttagcttgatataatcccatttgtcaatttttgctttagttgtctgtgcttttatgatcttgagaaatctatgcccagaccagtatcctgaagtgtttctccagtgtttttttatagtagtcttgtaattcaggtcttagatttaagtccattttggtttgatatggtgagacaaaggggcccagtttcattattctacatgtggatatctagtttttccagcacaacttattgaagagactgttccttcctcaatatatgttcttgatgcctttgttgaaaatgagttgactgtaaatcagtagatttatctttgggttctctattctgttccattggtgtatgtgtctgtttttatgccagtttcatgctgttttgcttaccatagctttgtaatatattttgaagtcaggtaatgcaatgcctctggctttattctttttgctcagtatttcttgctcattattcagggtctttggtggtttcatagcaattttaggattgtttttctagttctgctttgatgaacgtcattgatattttgatagggattatattgaatctgtagatcgtttttggtagtatggaaattttaataatacgatttcaatccatgaacatgggctatgtcttctcttttgtgtgttctttttaatttttttcatcaatgttttatagttttcagtacagagatcttttgcttctttggttataatttatccctaggtttttttttttttttttttttggtagctattataagcaggattgctttcttgacttctttttcagattgtttgccgttggcatattagtctgttctcgcactgctataagtgggtaacttataaagaaaacaggtttaattgactcacagttctgcaggctgtacagtaagcatggctgggaaggcctcaggaaacttacaatcttggcagaaggcgaagaggaagcaggcatgtcttacatggcaggagcaggagaaaaataacaaagcgggaggtgctacacgctccctgtcagaacagtaagggggaagtccacccccaagatccagtcacccccccaccaggcctctcctccaacattggggattacgattcagtcatgagatttgggcagggacacaaatccaaagcatatcacatataatgcaactgtttgtatgttgattttgtatcctgtaacttactttatcagttctaataatttttttgtttatcttttaaagaacccagtttttcatttcattaaacttctgtagtttttttagtctcaatttcatttacttctgttctgaattttattatttctttcctttattaattttgggtttgctttgcttttgcttttctagttctttaaagtgcatcattatgttgtttatttgaagtctttgtacttttctgtactttgtacttttattactataaaattcccacttagcactgcttttgctgtatcccatagattttggtatgttgtgtttttattttcttttttatcaagaaattttaaatttttctttcttaattttttcatagatccattggttgttcaggaacgtgttgtttaatttccatgtatttctgtagtttccaaagttctacttattactgatttctagttttattccattatggtcagaaaagatacttgatatgatttggattttttttgaattgcttgagacttgctttgtggtctaacatatggtctatcctggaaaatgttccatgtgctgatgagaaaacgtgtattctatagcagttggatgaaatgttctgtaaatgtcaggtccattttgtctagagtgtagttcagttttgatttgggttgtttgattttctgtctgaatgacctgtccattattgaaagtggggtgttgaagtcagtcttcagctattattgtgttgcagtctgtctctccctttaataaatctattatgctttatacgtttgagtgctccaatagtgtttgcatatatatttataacctttatatgctcttgctgaattgagccctttatcattatgtaatgacctaggtctttttctagtttttgacttgaaatctattttatctgatgcaagtatagttacttctattcttttttggttttcatttgcatggaagtatctttttcatacctttaccttcaatctatttgtgtctttataggtgaagtctttttttttttctttcggagatggagtctcgctccattgtccaggctggagtgcagcaatctcagctcagtgcagcctccacctcctgggttcaagagattctcctgcctcagcctcctaagtagctgggcctacaggcacaagccaccatgcccagctaatttttttttttttttttttcagtagagatggggttttgccatgttggccaggctggtcttgaacccctgacctcaagtgatctgcccactgtggcctcccaaagtgttaggattacaggtgtgagccaccgtgcccagccaaagtgaatttcttgtaggcagcatatagttggtcttgttttcttattcattgagccattctgtatcttttaatcagataagttagtccatcaacagtcagtttattattgttaggtaaagacttaactactgccagtttgttttttgttttctggttgttttggaagtcctctctttttttctttctgtcttcctttgtggataaatgattttttctcatagtatgttttactttttatttttagtttatctgtttagacttttttgagttgtggtttccctaaggggttcagaaaatataacaagtttgatgacaacttcactttgatcacaagaaaagaacaaaaacaagcaaagaaaaaacttaaaaactctgttttaattccagtacccccattttttggctctttgttttctcaacttgtatctttttatattgccagtctttcaacaaattgttgtggtcattatttttgaaaagtttatgttttagtcttcatactaaagattctatggagtattagataaggatactgaagatactctaatacaaagatactcttaatactccacaatattagagtatctttaaatgcagtattagagtgtctttagtatctttagaatactctataaagtattagagtattttgaatttgtctgtgtatttacattttttgttgcatgctagaattcttttctttcagattgaagaactgtagcattttttgtaagacacatctggtggtagtgaattccctcatcttttgtttacccaggaaagtcttcatttatcctttatatttgaatgttgtgggaagtcagggaccccaagtggagggaccggctgaagctgtggcagaagaacataaattgtgaagatttcatgaacacttaccagttcccaaaattaatacttttataatttcttatgcctgtctttactgcagtctctgaacataaattgtgaagatttcatggacatttatcacttcctcaatcaatcctcttataatttcttatgcctgtctttactttatctcttaatcccatcatcattgtaagctgaggatgtatgtcaggaccctgtgatgattgtgttaactgtataaattgtttgtaaaacgtgtgtttgaacaatatgaaatcagtgcacgctgaaaaagaacagaataacagtgattttcagggaacaaggaaagataaccgtaaggtctgactgcctgcagggtcgggcagaatagagccatatttttcttcttgcagaaagcctgtagacagatgtgtgagcaggagaagtatcacttaattcttttcccagcaaggaatattaataattgagaccctggggaaggaatgcattcctggcgggaggtctatgaatggctactctgggagcgtctgtcttatgtggttgagataaggactgaaatatgccctggtctcctgcagtgccctcaggcttgctaggattgggaaattccagcctggtgaattctagtcagactaattgtctgctctcaaaccctgtttcctgctaaaatgtttatcaagacaatgtgtgcacagcgggacacagaccctcatcagtaattctaattttgcccttgccttgtgatcttttattgccctttgaagcatgtgatctttgtgacttactccctgtttgtacacccccctcccctttcaaaatccctaataaaaacttgctggttttgcggctcaaggtcgccatcacggtcctaccaatatgtgacggcacccccgcaggcccagctgtaaaatttctctctttttactctttctatttctcagaccaaccgacacttagggaaaatagaaaagaacctacattgaaatattgggggctggttcccctgatatttgaaggatagctttgctgggtacagtattctcagttgcaaggatttttttctttctttctttcttacttttagcactttgaatatgttatttcactccctcctggcctgtaaggtttctgtcaccagacgtatcagagctcctttatatcttacttgcttcttttctcttggtactttgaggatcctctcttcatccatgacctttgcgagtttattatatgccttggggtaatcttaattggattgaattttcttggtgttctttgaccttcttttacctgggtgttcatctttttctaggttctgaaagttttcttttgattatttctttgaataaactttctaacctgtttctttctctgtttcctctttaaggcaaataactcttagcctctttgaagctgttttccagatcttgtaagtgtatctcattcttctgcatttttttcctctgactgtgtgttttcaagtagcctgtctcagagctcactaattctttcttctacttgatcagttctgctgttgagacacactgaagcatttttcagtcatccattatatttttcagctctaagatttgatttttttcccccattttaatctctttactaaatttctcttataagtttctgaattccttctccatgttttcttgaagttgttaagcattcttaaaacagctatcttgaattccctgtctgagaggtcacatatctacaccactccaggattggtcactggtgcctgcttagtctgtttgtttagggtgaatgttttttcgaacatgttttctcaaatgtcctcgatgcttgtgaacattcgtcagtgtttgggcattgaagagttaaatatttattccagtcttcacagtctggccttgtttgtacctgtccttcagagggccttccaagaattcaaatatgactgagtgttgagttccctaagcctgtggtcactgcagttgtttcagcactagagggcaccctaagcccaggtgtgctgcaactcttacagatacctagatacccagcattgatggacttggggaagataagggaacattctctgggttcccaggcaaagtttcttgctctcttccctctctctcccccaggtagagggagtgtctctccacaataagctgcctgaagttaggggagggtaatgtgggcactcctgtggccacagcagctagcaccatgctgggttacacccaaagcccatggcctcccagaccagcacagtaccagggctcacccaaggcctgtggccacctgactgccgctgatgctttttcaaagatgaggctgctttagtcagcaggtgttggagccaaccaggacttgggacttaggttgttcatgccacatgagcagattcccttcttgcctggggtgggtctagaagtgctcttccacagcagcatcctggaagtggggctttcggactctgcctggtcctttgttttattgtgggtgggctggtgcctggttgcgagacaaagtcttctgtatttttgcttttcctccctccaagtgtggtctagccgctggtgaaatttatttgtgggcctgaggccattttagtcagctgacttgggttcctctcagtgaagaagctgattcccctctggcccagatttggtctaagtgctccctccttgggcactggcagaattctgcctgatgctgtgaccgggtgttactgagttgcaatgtgaagtatcacactcattttgctctgcttcacccaagcacacaggttctctttccaagctgtgctgcctgggactcggggaggggtggtataggcagtgtgtacttcccactctattcagtcagtctcctcttgttattatgctgaagccaggtactgtgatgtctcacctgatttagtttttatgaaggtgcttttttggtggatagttcagtttgatgttcctgcattagatggggaggggatgagattctgttgggctttttttttctcaattttaagtttttgtaggtacatggtgggtgtatatatttatggggtacatgaggtgttttgatacagacatgcaatgcttaataatcacatcatggagaatagggtatccatcccctcaagcatttcttttgagttgcaaacaatcctattatattcttttagctattttaaaatgtacaattaaattattattgactatagccacactagtttgctatcaaagagtagtaggtctcattcattctttttttttttgagacggagtctcactctgttgcccaggctggagtgcaatggtgcaatctcagctcactgcaacctccacctcctgagttcaagcgattctcctgcctcagcctcccaaatagctgggattacaggcttacaccaccatgcccggctaatttttttatttttagtagagacggggtttcaccatattggccaggctggtcttaaactcctgacctcaggtgatccgcccaccgtggcctcccaaagtgttgggattacaggtgtgagccactgcacctggcctgaattcattctttctaactatttttttgtacctgttaaccatttccacctccccgttcagccactttgccctgccgcctgctccctcttgtaactttttattataggaaatttcaaacatacacaaaaatagaataataatataatgaatccccatgtatctgttcatattttctctattgaacccccctttatttctggattatttacagcaatgtccagatagtatattattcataaatgtagctgtggagttttgtttttgtttttcatgccagctgtgttgttattaactacaggaaacatgcaaaaacaggtacaggtacataaaatgaacccctaataaggattatgttgaaataccttttttcagcttgaagttgccaagagaagcttttaaccagggaagctgtaggactaaagcctttaaatcttttttcctcagactaggaagcttgtggcattagtacgtgatgcctcatcacaactagagcgtttgttgattggcgtaggaaagtctcagctgttgtctttgtgctttgaagagtagcgtgtttatagccctcacatgctgtctgttcattcccttatttctccttttcctcctaaatttcttccggttcacagtaaaaagtggaaaatgcaggtctaggtagttacatgttgggtcagtgactcctactagtgaatcatgtcaacatttctgaataaaattttaaaacacttgagtgggtactatatagaattttctaatgtttgacttttgaaatgctttcaaacttacagtgaagctgtaagaatagtgtaaagaactcctgtgtgccctttatccagatttaccaaattttaacatttcacatatgctttattattctcttttttctgagccacttaaaagtaacatcaagatatcatataatttaagagtgcaaagagttaaataattgttaaataaatgttaataaaatataatggctactatttattgtggagtaaccacaatcaagcatcctatataatagttttatgtacattaacctcatttaattcttaaagcctaatgctgtggatgacgatattatgccccttttacaaatgaagtttttgaggctcatagaagtttaaataagggtttataggtggtgagagatagctagaatttatattgagacttacatggcttcaaagttgatggggttttctgtcttccttaggtgaaccatattatgcttccagagatcataaatcactgcttagtggttctctactgagggtgaggagggcagcaaagactttgaaaaatatcttcaagggattcttatatcctccactccctcaccatccctggcctttgagccattgaattagccgaaagcaaactagggcaaagagtgaaaacaaaacatgctcagaaccacacttttaagcaggctttctgtagaaatggatgtttttgggaaatgtgttttctcattcatggtttttacttccttcgttgcaggccaagcagatagaacttcagttcactattggcgaagccattaccagtgctgcaataggaactagttctgtggctgcccgagatgcctggcaaatgactgaagaggaatatactccacctgctggtaccaaatattcagctaatcgatttataatgatcaagtaacctttttttgttctctttatcacatttgaggcaaaaacattacacattccatattactgttttcaaatatttatatctgttttaccaatttcattcagtcaagaaaaatagttgagtgaagaagacagcatgaggctgggcacagtggctcatgagtgcctgtaatcccagcactttgggaggccgaggtgagcgaatcacctgaggtcaggagttagagaccagcctggctaacatggtgaaaccccatctctactaaaaatacaaaacttagctgggcgtggtggcacaagcctgtaatcccagctactcgggaggctgaggcctgagaatttcttgaacctgggaggcggaggttgcaagtgagctgagattatgccactgcactctatcctgggcgacagagtaagactctgtctcaaaaaataaaaagcagacagcatgaaattagttaacttctttttctgaccctttggcaagcaagcaggggagtcagctttggattaccttgaagcttgtgctcttttcacgaggatttatgtatttagccagtttcagaattcaaggtatagttgtttccagatgatgtgtcctctaatcctttattacataatgaagcctcagtgccttctgctagcgctctaggtacactggcttttagtgacagcatatagttgagggaacatgtggtttctgactttatgttttatatattatgatttcaagtttgttgtggtttgatttgaatttggaattgaaaatatattttagtatttgagctagaataaaaaaaaatttaaacagaaggaaaagtcaccacatttttatattttatcctctcaagtgaggaaattaaaagagagtattctcatggtaacaattttattgtatattgtgttccatcatgaataatgcattaatttagttattgcacttagtgttacagttaacatttaactccacggtaatgcgttcacctattatttcattagccaccctaaagagatttaaaggaaatagaaaaacacacttttgcttgcactgtaatgagagttgtggattgacggaagctgaatcagagtcagttctttgaggtttttctttgaacacacatgaagcaaggcaaggagcagtttgtatagaaggaaggaggtaaggaagggaagcaacattgttaacaagaagacaaccaaacctgaagtgggaattttcaggttgcatgtgagaggtggtaacagaggcttgacaacagggagggctcacactgaggagtgggtttgctgtgagaggcatgtttttgactccatgggttttttacctagtgacttaagcaagtagaggttagtagagaggcatctgtgccagtcttcatcctctgaactcttgtattgcctcaaactcttcttggaagattgcatcctgcttggctttttactcatgcaaaggaatctccaattgtccattaaatgttgaagttctatttttgtctgttttgggaaaggaaaacataaaatattgtggagaagggagggatgatgaatctctgacgtgaattttgatcatgcgtgttctatgtcattctcatctgagtgcttcttagcctttggatgtcattgttggttacagtgtaccaatcttgctgtgagtagaatgaacagcatttgagaagccagttagggcccaggtcttagccgtcttaacatctctacataatatcctgggcatgttatgggaatctagtaaggacttgttggttttataattgtagatgcccagatagcagaactgctggcagctagagttgtggttacaggaattaaaagaagggattctgactctgagaactggagtaatgtgatcaatgaggagttatgaagggacaaggggcggaggggaattgaccatgtcatgtactgccaatagatcgactaaagtgagaattgagaaaccatcattggacttagcaacaggaaagtcattcgtgatttctatgactaatttctatggagaagagaaggtaaaaggctgatttggagtgggctcaaaaaagagaagagcaaagtttgaacatgagtttaaacaactattttgaagggtcttaatgtaaatcattggtttgtcactggaggaatgagatttttccccctagacacttggtaatgtctagacactggggagggtgggtgccactggtctctagtgggtgaaggcacaggatgctgctagacatcctgcagtgtatagcacagctttgtatgataaagaattatccagccacaatgtcggtagtgttgaggttgagaaaccctggagtaataaaggaaaggagaaaaacagtatggtagctggaggaggaaagtaagtgcaaaataagtttgttagtttttagatggaagatgagaaacatctagtagacaaaaattgctgacactagagagattagggataagttttcattctcaggaactaaaaagttactcgagtacctttgaaatgtaattttgtttacactaggttctagagtggataattattgattccttcagcaactttaaacaccttagccatttagatttttatataggattgttctgttgagtaaatgttgatttgaatttaattttttcaggaaactatgttgagttattttaattctttgttatttttctttgcttttccccaggagccaaagtgaatgatgtggttccatgggtgttggatgtgattttaaataaacatatcatcagccccaacccacacgtgaggcaagcagcctgcatctggctcctttcccttgtcaggaagctaagtacccacaaagaagtgaaggtgagccatgctgtatgtggtcagccctgttggaaaccacagtattataagtagcaaggaaagcatatgagggtgaaggtcattaaccaatagtaggtattttgaaatacattgtacatgaaggaatgaaggatggtggcctgatgtatataggctggaagatgattctagccttgaaggaataaagtcagaagtgcttgagataggaaggctcagttggggcagtggtcagcttgcatgtgttagactacgtgtaagtggtgcagctccaggtgatttgggccacctgtaaagatgagagcaaaacagcgattgtaactggcttggataataagactacaaattttgtacacggtgagagcaagactcttattctctcaaagaggtagagtttcagtgttctaatgccttttttcttctttcagtctcatcttaaagaaattcaaagtgcatttgtttcagttctatcagaaaatgatggtaggttgttaatatttgatttctaaacttaattgaacttgtattttaaatgttcaaaaacctggattaatgaacatgaaagaaaactttcttgagctgtgtgattaaaacaattattaaaccttatttgttagtagtaaggataagcattatgttaatgtttagaaaccaaaatttctagttaggatacaggaaacttagattctttctcatttattggtttatacattagaacatgttcctcaactctgcattttaaaatggagccgaggccttctttaacattagtatctctcctaatagcttttttctgcctctggttacttttcctctctgatttaagctaggagagagtgaacgtatatgtgttaaatctttcagtactaagctttgttttataacttgttttaaacatatggtcttgcattgacttttaaaagttaggtctgagtgtattgagatcttgtgaggctgttttatctctgatgtatgacttacagcccatggataatctgtcgctgcactgtccagtgacactgtataggtccatcagtattgtctagatttgtgaactggatcttctgtgaatgtggttctcatttacagtaacttgtgtggtgccatgtcccctgaaatgattattatttttaacaaaataggcatattgattctgtttttatatctttactttgatatcattttgggtcagtgtcaacataactttaaaaattttgatttcatagcaagtagacaaaattttttttaaagtgatacaatcttgtctgactttcttgtagaacttagccaagatgttgcatcaaagggccttgggttggtttatgaactaggcaatgaacaagatcaacaggaattggtttctacacttgtggaaacacttatgactggcaaaaggtatggtgaacttgaaaattttagattcaagcccatagaggaagtctctacacatagtgagaagatgctggagaaggaagattcggctttccatgttttggtttatgaagccttttctaagttgcgagtccataattgttgtgctgtggatagcacaattattccagggtatactgttaactttaggagcatgccactaggtcaagcgtcgaaagtttaatggtctcagataatgtattgggttagaaaaatgccgtaattactgttggctaaatggaagttaagatacggagaagaagcttgcatatcattcatagtctaacccgtgaagagtgtgaggggaaatcatctgtgtaagggattgctgcttcatgttgcctcccttgtaggaaggatagtttttcatgtgctaccacatttaattcagtggaaattatgtgaaatgtctttttcatctgttaatttgttcattctgaattcattttataaaatttgcagcctgttggaaagggctgttttttgttgttgttgttgtagtcttgctctgttgcccaggctggagtgcagtggcacgatgtcagctcactgcaacctctgcctccctggttcaggtgactctcccgcctcagcctcccgagtagctgggactacaggcgcgtgccaccatgcccggctaattttttgtatttttagtagagatggcgtttcaccatgttagtcagaatagcctcgaactcctgacctagtgatccacccacctcggcctcccaaagtgctgggattataggtgtgagccaccgcgcccggccggaaaggacttttatatcttgtacacagtaaatgcttgataggaagttttatcactttgtaaatgaatcgtattggctagttgaatgttggtatgaaaagcttgaagcttattgaaattattgttttggtttagagttaaacatgaagtttctggagagacagtggtatttcaagggggagctcttggcaaaacaccagatgggtaagtatgctaaatccattgaatggtaaacatctttaaatatatatatgcatttattagtctggtaaatagagcagtcatgaagttgatttctaccctcttaggaaatgttatctattggtggaagaagaaaacttacatggaaaaaagtctgatgtctttttttttttttttgagatggagcctcacttttgttgcctaggctggagtgcagtggagtaatctcggctcactgcaacctccgcctcctgggttcaagcgatagattctcctacctcagcttcccaggtaactgagattacaggcacctgccaccacgcctggctaatttttgtattttagtagagacggggtttcactatgttggtcaggctggtgtcaaactcctgacctcaggagatccacccacctcggcctcccaaagtgctgggattacaggcgtgagccactgtgcctggcaggctgacgtcttaaattgagtgtcctgggaaacaaactctgagttagatttctgtgtgggaaatttactggggagtgccctaggggtcactctggggggatgaggaggcaggatagggcctatgactgagggaggggcggaactgctaccatcgtttcagtggataccagcctcttgaggagctctgagctggcacaggtggcctttcggagttgttctgctttgaggcatggagcctggccctttatgtcctctcagtgaccagccattggtggtgggctgctgcgtgggagcccatgatgttgggctctcagggcagttgtgggagactgactaggccaacagctgtcagctctcaggcagctgagtcctgcagaacacctggaagcatagctaggtgcacccactgccgctagttttgggtgggtgtaattctttatcttagaggccactactttagcatttaaaataaattccttgagcttgaccgcctttattttatcatgctttatttctacggatcgttaggcaaatctttgctggttgcagggccttgctgtggtgtcacacacgagcctgcttcattgttgtctgcagcaggagaaagctgcagtttgttccatcgttgacgttcccccacagtacactgttatcacatcaaaagttgttttcattgtacttaactctccttgtagactccttctaagtttttaaaaaagtgcttacattttacaaaataacaaaacaattagatatttgagccaatattatttgttcagaggaaagttaacaagactcaatcagaattagggtggtctagcttagaaaagacttagggaagacagatgttgtcttccaatgactctcttatgatcacgtgagattatgcataacataatgaagaattattgagttgcatctccaggtggtgagtggaccatggctatggacttagaggtgcatttaggtcatttatcagcagcaatgtagaggggcttaggaattgctaatagttgaattaggtgactttttatattcttactaacttgtgttctgtctccatggtgataactcagtattagaaattgagtgaaaatttgattttagtatgtcctagtaatattgatgatgtaattttttaggctggagagagagaagtgtattattgcctacctctttttctttgtttccaagtcagggcctttctacttacaaggaactttgttctctggcaagtgatcttagccagccagatctggtgtataaatttatgaatttagccaaccatcatgcaatgtggaactctaggaaggtaagttgctatcactggacaattatttatttttttcatgcaaaccaaacatgctacattggcagacagtggcaaatggtatgtagtgcattttgtgaaagtctgtgcctgatgagaaagctgaaccccacaaatgctgttgattggaaagaccaataaatcaggctgtatttaggcataagtttggagggagaattttttgctatgttaatattttactataatggtgcatctgagtcacttcagcctattatttttagggtgctgcttttggttttaatgtaattgctaccagagctggagagcagctggctccttttctgcctcagctagttcctcgactttatcgttaccagtttgatcccaaccttggcattcgacaggccatgacaagtatttggaatgcgttggtcactgacaaatccatggtaagtgtctgtgaacccctgtgttaggaaaacactgtagactgtccagggtcatgcataggatttaaacccagtgtccatcttcctttctactttttatgtttacttgtttaaacaaataaattgtctttcattccatgctttcttccttctttcaaggtatcaaagatgtgtatggcaacatttattgaaatctccaaaagggaaacaatataaatgtccactgggaagatggttaaggaaatgattatgtattcacacaaatggaatagtaaatgtggatagggactgttgatggaatggagaatgggtcatagtcccatctccaatgaattcagttagctggggagacagacaaggaagcaggcaattgccattttgttttctctgttggtgtcctctcatctggctgttaatcatgttctgtcccacttttagatattaagatttctcagggcttgtctctgagtatcttttgctctctgagccttctctatatcaatcagttccaaggcatgtaaatgtcatctttattgtgaaagttcccaaccttacacttttggtccagatgtcacttgcactttagacatgcatatgtaactgtttacttgaaaatttcacttcagtgttgtttcagaataccataaacccaacatgcccagaacaggacttaaaaaataaccttccccctctactctcactgtttacctatttgcccaagccagaaaacttggtgtcatactttattttgatctgtgtctcaccaccacccccaattgaatctagtagcaaattctgttgattctgcttccaaagtattccttgaatctactctcttctttccctaattctttactgatgaataggtcatcatcatctttttttttcctctttgccgttcttcatttaattatctacatagtagcaaaagtaatttttaaaaatgcaagttagattgtgccattttgggttaaaatcctttagtagctttacagctcactttaaataaattccatgatccttactatgtcttacaagtccctgcccgtaatgtggccccttcctgtctctcctgtctggtactaggctgaatatgtttctattcttggtggtaggtacttgagggttcagctttgaagactcaatgagttttgcttgctccaggagaacatgtggcacttttgggtcagccaagatctagtaggccagtgggctttgtaggtctgagctcaggacacaagcctagacccttgagacgtgagtgtcatctctataagtgaaaggattaagccacaagtgtggatgagatcatccatggagaatgttgagagaagcagacataggaagacatcagtttgttatttacctctttgtcttggttttcttacatgtaagtaaggataacaaaacctttcctacctacaaaagtggaaaagccgtaaatttttgagaatgtcagcattggtataagactgattctaccattattttgtcattattaccaagttgctaagtgtatatcaaaacagaacagaggcttaaaaagtaaaactcatctttcattctgaacagtcatgaaccaggcactgggtaaggtactggggataaaaagatgagtgagactctgtccctcaataactgcactgatgatgagtgagacactgtccctcagtaactgcactgttgatgagtgagactctgtccctcaataactgcactgacgatgagtgagactctgtccctcaataactgcactgatgatgagtgagactctgtccctcaataactgcactgacgatgagtgagacactgtccctcaataactgcactgacgagtgagacactgtctctcagtaactgcactgacgatgagtgagactctgtccctcagtaactgcactgatgatgagtgagacactgtctctcagtaactgcactgatggtgagtgagactgtgtccctcagtaactgcactgacagtgagtgagacagtgtccctcagtaactgcactgatgatgagtgagactctgtccctcaataactgcactgatgatgagtgagactctgttcctcaataactgcactgacgatgagcgagacactgtccctcaataactgcactgacgatgagtgagacactgtctctcagtaactgcactgacgatgagtgagactctgtccctcaataactgcactgacgatgagtgagactctgtccctcaataactgcactgacgatgagtgagactctgtccctcaataactgcactgatgatgagtgagacactgtctctcagtaactgcactgatgttgagtgagactctgtccctcagtaactgcactgatgatgagtgagacactgtccctcaataactgcactgatgatgagtgagactctgtccctcaataactgcactgatgatgagtgagactctgtccctcagtaactgcactgatgatgagtgagactgtgtccctcaataactgcactgacgatgagtgagactctgtccttcagtaactgcactgtcctgtacaataactgcacccgacccccttgagggtctgcagtatagtgaaatagtacagttattgtatgattttgtgtgatgcttcttcagaaggtgctatgggaacagagaggagagtacccaagctaatcttctctgggaaaggatggctaatatgaaccttgaaggacaagtaggagttagccaagcaagtaggacctgggaaggggattgtagggagaggtggcatgtgccaaggaatggaggtgagacagaatatggtacttttgggtctggatgagtcatggaaggctttgtgtgcatgcctgggtgaatggacttcattctcatgcactgaggaaaataaaagcatcaaatgtacattttagaatgatcacctggcagctttatagtgaccaaagtgggaagagatttgtgggctgagtggcctagagagacatggaggccgtaaaatatagaaacatggtcagtgtggttaagtgtggttaaccagtgtggttaagagttgagtaatttgattattgatggattttgcattttaaattttatccttttgctttcattaggtggataaatatttgaaagaaattcttcaagatttggttaagaaccttacaagcaatatgtggcgagttcgagaatccaggtaccgtttttaggaatataagtttagtcaaataaaactgaatttttttcccttcaaaatttctaggttttatactttgtgcaaaaggaataaattaaaactactaaaaagctggccgggcgtggtggctcacacctgtgatcccagcacatggggaggctgaggtgggtggatcacctgaggtgaggagttcaagaccagcgtgggcaacatggtgaaaccccgtctctactaaaaatacaaaaatcagctgggcccagtggcatgtgcatgtagtcccagctacatgggaggctgaggcaggagaatcgcttgaacccagccagggggcagaggttgcagtgagccgagattgtgccattgaactccagcctgggcgacagaatgagatgagactctgtctcaaaacaaagcaaaacaaaaaactaccaaaaagcatatttcttgttggctacattagttatttttctttaactgtttaagctttggtcaatgattttcctaaattgtcatagtttatgtaagtatgaaatcaaagaagttgaagattacctgttaaattggtagacaccaagatgtattttgtattgtcatgactttatagtatagcatttctgtatacaagttagattcattcggtgcccagtgtgtatgtggcagtgtgctaggccttggaggcacactggtgaataaaaaacgatgtgtcatctcaaagggattgtattatagttgtgggaaacaagcattttataattgtaaattacatatatatatggtatatttgagggacctggagagaagtcattgctgttttggggtgaggggatgagaactcgaattagaggcagaatctgtattcttttttagtataaatgtttcatagtaaaatactgacctttttcatcatatattgaaatgaaattttgattttcagctgtttagctttgaatgatttattgagaggaagacccttagatgacatcattgataaacttccagaaatttgggaaacgctttttagagtacaagatgatatcaaggtattatagaaataaatcagcatttatatatacaaaaagttaaattggaattattaaaatatttatgttgtgtatgtcaaaattccatttccagataattttaagagaccaacgttttcccccaaagtttcagtcttaatgtgtctgtgaagttgcaaggttgggtatccttagatctaaattaaatagacttagggaaaaaaaaggtggctgtataccttctttcaatagagatctcatgattctattggattagggacaaataacagttttggacatagtaacagtattttgatcagttctgtaaatgggattaattattctcaagtaatgtggccaattcctctgaatttttcttgggcaatcttaattttaggtattttggtattttaccattaaaattaggcacttcagttttacctttctttttgctttatttattggaggcttttaagtgtttcagaattctcacatagatctttatgtatttacttttataatacatttagtttctcaactgttaatagctaaattttttaaggtcaaaataggttacagttaatgtttaaaaattaatagtatggcatggtaatgtgttccttgatgggcagagagtctgatgagataccaatttttttaacatgatatgaaatgtaagattttccaccaaatctctgtagggcctgaggcaattaaattgcaaattgtagagtagatgatagtgaaactctctaacttgtatgatgtcacacttttgtcatttttaggaatctgtacgaaaagcggcagaactagctctgaaaactctgagcaaggtgaaaaccccgtcttacattgggaatggagtggagcagggttctgggtgaccatgacaatgatttacttactgtcataggaaaagacatttagttgcagtataattggcttcatgttgtagttcactgctcttagaatgaatgagaaagtgagtgctgtaaacactgcagtactagtgtgttgaacagagtatactgtggtctctttaaatggtgaaattaagataaaacttcgacttaaccctgaagagcacatcactcagatcaagcaacacctgtcttttctcttgcttttgctgtgtttatatataaagctacctttcatatttgtgaggttggaaagctttttgaaactaaattatctcccacttgaacttgattttgtgatatatcaggaactttacattctagttgcacaaaccttgccataggtcacataaatagtaaaaccaggttttaaatacaggtgttttcctgtttcacatgtgatcttgaccactatattgtgctgtgacccagcgttattgatgatgatgatgatgatgatgatgataacacttcaaaacttctttatttaattttttattttaatttttttttgagacaaggtcttactctgtcacccaggctggaatgcagtggcgtgatcacgactcactgtagtctcgacctgccggggtcaggagatcctcccacctcagcctcctggagagctgggaccacaggtgtatgccaccatgcctggctaatttttcatactttttgtagagacagggtctcttcatgttgcccaggctggtctcaaactcctgggctcaagcaatccgcctgcctcggcctcccaaagtgctggctttataggcgccggctactgcacccagccctaaaccttttttaaagtgctttcttacatatttcctggtttgatcatcatctgttttgttctgtatttcacaaattggaggaccagtgcttagagagtgaaatgcattaccaaattttctgtttagttcttggcagacctaggactcaatctccgatctcattcctctgtgtctctgtagtgtcagagaaagtagattcacttattcttccctgtagatatgtgaagtagaaagtcttttgtcagatgaattctttattggatgcgcggtcactttcactaacgtccatgctctttgtatgtgaggtctgtgtgaaaatgtgtgaccctgccaaaggagcagctggccagagaaccatcgctgcccttctgccttgccttctggacaaaggaatgatgagcaccgtgacggaagttcgagccctcaggtgtgcatccgttgatgaaatgaatgtattggatttgctcagttcctagaaattgtgtttctttcaaggttagattctggaaaatatggagaaagaggtttaggagaatgacccttgggtcatttgtgaaaacttgtgagtcacaatattttcacagaaacattctcatgagaccttatttttgcctagcattctgagtcaagcgtgttgttctgttgtcatcagcctctgctcccaacaagcacgtcttcctgttacactgtaggtcctcaggagcatgtttgttcattataatatttagtaatatttcacagattattagatttaagagaagctgtttaccacctgcaacgatgaaatattcaaaaaatgtacttacacgttttgatataatatatgactactttaagttaaaaccaatagtgtaggattctagtttgtatgttttgtttgtttttaaagtacagtgctgtctaggaactttatctgttccattgttatttcactcttaagagtagaacaaattattaataatactgccagtggtatttcatggcaagtagatagttgatgaaagagttttttttttagaaggactcacctaacaaatgcaaaggcatgacgcaattaagagtgtcactttggctgggcctggtggctggtgcctgtaatcccagcactttgggaggccgaggtgggcggatcacttgaggttgggagtttgagaccaacctggccaacatggagaaaccccatctctactaaaaatacaaaaaaaattagccgggtgtggtggtgcatgcctgtaatcccagctacttgggaggctgaggcaggagagtcgcttgaacccaggaggcggaggttgcggtgagcccagattgcgccattgcactccagcctggacaacaagaacgaaactctgtctcaaaaaaaaaaaaaaaaaaaaagtatcactttttgctctcctcagtaaaataatctaagtagtgatcattagatgcccctaaatccactgggtgaatggctgaagagaactttataatgattcagggcaaccagacctgaacctaccaatcactccttatagcacaaaaagacaaccagtgcatggtgatgtgatggaataggaggaataggacacacagcattgcctaggaaggattctttgtgtgtgtgtgtgtgtgtgtgtgtgtgtgtgttttacaaaattgaacgtgaactcagtttagcctgtagatctgtgcaggggaaagaggaacatgttaaatgacatgactggaatacaatcaaagaggacgaagaagaaaaaaagaggagagtggagactgttaaaaaagatttaagaaatgcagtagattgcaatgtgtgagtgagcttggatcctgattcaaacatgccaactgtttaagaagctaatgaaacagagaaatttggatacttgatatgaaaaaatcattaatatttttaaagtgtgaaaatggtattatgattatgataaagagcctttgcttttagatattcatagtgaagtttagttaagggatatgctttcaaatgcagtcacacgtcacttagtgacaaggatatttctgagaaatgtgtcgttaggtgatttcatggttgtgcacacattaacatgaagttggaaaaatggtgcagttagattgcttgatgcagggttgccacaaatctgttcacttcatatctctatgtcatattttggtaattctcacggtatttcatactttgcattactattatatctgttttggtgatctgtgatcagtgatctttgatgttattttgtaattgttttggagttgtatgaactacacccatttaagatggtgaacttaattggtcagtgttgtgtgtgtcctgattgctccactgaacagctgttccccatctctctccctcttctcaaatgtctcattccctgagacacaacaatattggaattaggctaattaataaccccacaatgccctctgtctaaatgaagggaagagttgcctgtctcttactttaaatagaaagctagaaatgattaagcttagtgaggaagggatgtcatgaaagctgagataggctgaaagctaggcctcttgtgccaaacagccaagttgtgaatgtaaaggaaatgttcttaaacgaagtttaaagtgctatgttagccaacacacaaatgataagaaagcaaaacagccttttgctaacagggagaaagtttgaatattctggatagaagatcaaatcagccacaaaattcccttcagccaaagcctaatccagagcaaggccctaactctcttcaattctgtgaagtctaagagaagtaaggaagctgcagaagaaaagttggaagctagcagaggttggctcatgaggtttaaggaaagaagctgtcttcataacataaagatgcaaggtgaagcagcagttgctgatacagaagctgcagcaggttatccagaagatctagctaagatcactgataaaggtgtctacactcaacaacagattttcaatggagatgaaatagccttttgttggcaaaagataccatgtaggattttcctagctagagagaagtcagtgcccggctgcaacgcttcaaaggccaggctgactgtcttgttaggggccaatgcagctggtgactaagttgaagccagtgctcatttaccattctgaaaatcctaaagccttaagaattctgctaaatctgctctgtgctctagaaatggaacaacaaagtctggatgacagcttatctgttaacagcatggtttactgagtattttaagtccactgttgaggcctactgctaaaaaaacaaaaacaaaaaacaaacaaacaaaaaaataacaacaaaacaaaaaccaaaccaaaaaaaaccccaaagattcctttcaaagtattactgctcattgacagtgtgcctggtcacccaaaagctctgatagagaggtacaaggaaatgaatgttttcatggctgttagcataacacaacatccattctgaagcccatggatcaaggtgtaatttcaactttcaagtcttactattcaagaagtatattttgtaaggctagagctgccattgatagtgattcctttgatggatctgggcaaagtaaattgaaaaccttctggaaagggcttaccattgtaggtgctgttaagaacattcatgattcatgggaggaggtcaaaatgtcattaatagtttggaagaagttgattccaactttcatggatgactttgaggggttcaagatgtcattggagaaagtcactgcatatgtggtggaaatcgtaagtggggcctgaagacgtgactgaattgttgcaatctcctgatgaaacttgaacagaagaggagttgcttcttatcgatgagcaaagaaagtggtttcatgagatgcaagctactcctggtgaagattctgtgaacattgttaaaatgaccacaaaggatttagaatatttcataaacttagttgataaagcaacaacagggttggagaggattgactctaactttgaaagacgttctaatgtgggcaaaatgctatcaaactgcatctcatgctacaaagaattattttgtgaaaggaggagttgattgatgcagcgaacttcattgttgacttattttaagaaattacgacagccacgccagcattcagcaaacaccaccctgattagtcagtaggcatcaccattgaggtaggaccctccaccagcaaaaagataatgactcgctgaaagctgagatgatcagtagcattaagatattttaaagttaactaatgtactttattttagacataatgctattgcacacttaatagactacaatatagtgtaaacaaaacttctatatgcactggtaaactagaaaattcatgtggctttctttattatggtggtctggaacagaacctgcagtatccccaaggtattcttgtatgatcttatgggactactgctggacattgtggtctgttgttgttgactgaaatgtctcatgcagcacatgactgtaatacagtggcaggggggaatagcggctgtatgtatggaggaggtataaatgaaacaaaattggtcaaatgttgctaattgttgaactgggtggagaatacatggaatttcatgcctactataaattcctaccataaaatttcactataaatataaattcctactataaataaatacatggaacttcattcctactattaatgaaggtaggcttttcctacttcatttatcattctacctacctctatatatgcttcaaagtttctttaataaaagttaaaaaaagtaatgcccagaccaggctctgcaaccatgtgaaaatatgctttaatgcagtgaactgcagaacatcctcatggttagatttgtaggtcttctcacttttgttaaaaggactcaggagttgtgttccatatgtttgtagcattaacacccttgtgaagatcagcaaaagtgcaggagccatgttgaaaccgcatgcaccaaaactcattccagctctgctagagtccttaagtgtattggagccccaagttctcaattatttgagcctccgggcgacagagcaagaaaaggtgagtggatagcgcaggcatattggtaagtatcatgagggaagagccctgttaagataccaaggttcatttgaatgacactgtcactactgttaccagaactcaccctctgtcaccacatgcagtgttttactgtttttttggagagaggttgtcagctcatacactgtcttgtgaattggatgaaaactgacacttccatctaaaaaatgaattaacatttgtttaacatagttttttgtatatttcaattttgttagggcttggatctataccttcagagtccttccatgggctccctcgccctgtaagcaaagagtatttgcacctagactttggcatatctcaaaattgttctgctttttaggtgtaatggagtcacctggtctctgatcagggtcatttttatttttatttttatttttatttttttggagacggagcatcactctgtcacccaggctggagtgcagtggcaccatctcggctcactgcaacctctgcctgccaggttcaagcgattctcctgcctcagcatcccgagtagctgagattacaggtgagcgccaccacacccagctgattttttgtatttttagtagagacagggtttcaccatgttagccaggatggtcttgatctcctgacctcgtgatccacccgcctcagcctcccaaagtgctgggattacaggcgtgagccaccgcacccagcctgatcagagtcattttttaaaacttcagatgaaacatatttattgtgaaaagttaatacagaaggatagaaagtaatcccatagaaggtctcccaatcaccacagtatcattccctgaggagcacctgctgtcaaaagtttcctgtgccttctctcaaattcctttttagtcataggctaccaaaccaaacaaacatactaatttaaaaatagtatcagaccgtgaatgttgttctgtgatttgttttttaaattaacagtatatcgtgtctatatatacacttattctttttaatgtatgtatagtgttctacagtgaggtgattttgaatttttgatggagaggttttgcaacatcaaaggttttaagtgttctttttttctccgtacctttggcactgttgaataacgtatgtgtgataacaagaatctcatttttctgatttgcactcttttcctagcattgtccattgccttttcaatattgtattagtcgtttatatttcttctgtgattgtgtttatgttccatgtctatttttctatttgactgtttttttaatttatatatttttattagaactgttaaaccctgttatatacaacatgtttcctctgttcactatttgatctttaacttgcctaaacttctctaataacttactctctttaccctttgcctctaatattgctgtttcttcttcattcattatttttccctctttcagcagtagacttgcaccttcctgggtgcccataggatgtttactaagcattgagaatttggaaacataaattctagtctaaactttgtagccctaggcaagtcacttgtgtatgccttacttttctcccttatcatatctggatagtgttaacctctccttcagcacagttgttagattaaaataccttcatagatacgaagggtaattacaaagttaaagaactgcacgtataaaattttctactgcttagacacaattttaaaaaccttagaaatttgtttagtcagttcctttatttagtggatggagaacctcaggctcaagaaggctggatgacttgcccagagccatactatgctgatttcttaactgttatctgaatttctcacctgtagtgtggtgctggttcccctggtaaattgttgagtgtaggtcaaaagaaattagagttagacttgatgtttgcctttgttatagctacggattatttttttttaaagttctttagcttggaagtgaaagtcttttatgggtgtttgtgcggattattcctaattaattgaatgtgccgggtgactttaatttctcttctttaggctgcgatggatagtgctcggcttagtgctgccaaatcttctccaatgatggaaacaatcaacatggtgagtgtcttaaataataatgagagggtttgtttgcttacctgaaagtgtaattcttcaaagtcttcaggctatgttaaatgaagcagagacttatgggatgagtcaagcagctgttgtgactccagttttttcttagtatatttctcttttcttctctgttactaagtggaataaataattccccaaataccagaaacagttggtccaaatttgtattacaagagacaacaacatatcaagagctctctataaatttacatctgtagtcttttgatctgcctatttagaaaggttcagagttgtgcctgtgcctaatagttatctttgggaggaactaggaaagttataagctgtggaggtatttaatgaagtaggtaacataaaggtatgtgaagagattgggcaatgtcgatatgttgttttagtcataggaaggcatttgcagtaaagggctgcttggcattctgaggttctgatttctaaacttcctggagtcttggtaaagttactctgttgtgcattccctgtaatggttagttagctatgattgtgtttactggaaattagtttgctaagcagatctgtacctttagcaggactctgaaggtatagatccaacccctaaaaaaactgaagtgtacaaaaaactatgttaaactggtgaagagaagtagctattttttagtgcctgctgggggagtattaccaaaatttggtctaagaatgttatgtcttagttggattattggggggaaataaaaatttaaagaaataggaatagttagtgaataccatttagttatattcattagtaatagaaaacatgttaattgcattttcaaaaataaaggccagcaatttataggaaaagtcatctaagaagttgactcattagagggggtttggtagggtaggcccactgtagaagatcaatatttagtttaggttttttatactaaacatggattgataaagaggaagtaggcccagaaagattcttcattcttgagtaatcattatttttcttttttagcaaattgatgtttttcatttttttgtttgtttttagtgttgaatcactgatgaataatttttctgtttgtagtacaatagtggttttaatattgaaatcagagcagaagcaagcagtgatttttcaacttcatgtcaaatccagttggtacacgtttgacaagggcagtttttaattgaagatgtggtcctgacttatttgccaaggcttacctttatatttgtcctttttcaaaagtgcctgcaataccttgatgtgtcagtgctgggcgagctagttcctaggttgtgtgaactgatcagaagtggtgtaggtcttggaactaaggtaagtgtactttccacaagaggaaatgtgcatcttcattagttctggccataaggatataacagccatcatgtttgaaattcatgttttaccacaaaatctaatattatacactaaccattttatttctgtggttgcactgataactgaaaacatgtaactggttcaagaaataaaacatctaactgttccagtaagtattaacttatttagtggaatcatttctgttctctggttgccgtgtacataccctctgggttgtcattcattagcagttcatggaaatgcacatccagttattagggcatggattgttttaggtggcaattgcatttttcacagaggggtcagcagtgtttgaatagaaaaatgtcctagttttcaagatctttgaaggatcagacacccccctaccacccttttaacaacaaattaataactcacattttttcttatgacaaaattaacacttgctggtattttaaaattttagcatttatagattaggagaaagttaaaataaaaattgtccagaattttgccatacagagataactgctgttaatattttgaagtgtttccttccagtcttttctgcacatgtatcttctgcagtgtcctcttctaatggccgtatgatactccactgtatggatgtaacatcatttattttactccatcaaggaacatctgatttgttttcagtttttgaaaaaaatagtaaagcactgtgatgagtgtcttcaggcacacctgaagatatttggttaaatttctggaaatggaaatgttagcacagtgatggacaagatgacatattttgcttttccagaagattgtaccagttttctttctttttcacaatgtctgagatcacccatctttctcttggaggtttaaaaaaaatcgctgcattactagtttaagagtttgcctttttctatattgagtcctggagggggtattaggcttcatgtattttatatgtttaaatttttggcacctaagccaatggtttggtaggtagaacattgtgaccatcagatttagacctttgcttttgtaaccctgtagggtggctgtgccagtgtcattgtgtcattaactactcagtgtcctcaggacctaacaccttactcaggtgagtttgtcaagggatgtgtggtgatatttttgcacagccctgtcttgtgtgacagagttttaaaaaggaaaaatacttatcattcagacctgcttgtgatgctgtgtgccttttctcccctcagtcccctgactccttcatttctttgtctgcaggaggtgcagagtttatcaagtttagcagcttttcactgttcataaacatttgattattccttagtggtataaggaggtaaaagtatcctcttttccacaggacttaccattgatagctgattttacatcagcatttttctcttcttagattggcttctagactggactagtgttctttatatacctcgttcttattttgcatctttttccacgatattctagtttaattttaactttatatcatgtaaaaggaagcaaatggatatataaatataacatccagaaatctaaactactgtggagtaaatcagatgttaattacagggttaggtttgtttgggttctgggaacagagtggaacatttggtcaaccaagtatcagatttttttctctttatttctggtaggtaaacttatgagtgctttgctgagtggcctgacagatcggaacagtgtgattcagaaatcttgtgcatttgctatgggccatttagttcgggtgagttaaatttcttgcttagttaaataaaactctttgacagttataaagaaatacttaggattgtttctttttcagacctcacgggatagcagcactgaaaaactcctgcagaagctcaatgggtggtatatggagaaagaaggtacctttctttttctattttatgtcattttaaatttagatgttaacagcccagtaaaacagtacaaattaggtcttaccctccatgattttatgtgatttgctagaaacatttgtttcttttcttttctttttttttgagatggtgtctggctttgtcgctgaggttggagtgcagtggtgctatctcagctcactgcaacctcagcctcctgggctcaagcgattcttgtgtctcagcctcctgagtagctggaactacaggcacgtgccaccacgcctggttaatttttgtattttttgtataggtggggtttcgccatgttgcccaggctggtcttaaactcccgagctcaagctatctgctcaccttggcctctcaaagtgctgggattacaggtgtaagccaccacaacccagcctgctagaaacatttctaattgattttacctgtttgttttgctattatatgagttgaacaatagcctgtttagatcagttacccttaaaaacaataaatatcgtaaagattttggtttctccttttcagaacctatctacaagacctcttgtgctttgactattcatgctattggacgatacagccctgatgtattaaagaatcatgcaaaagaagtcctgcctctggcatttttaggcatgcatgaaattgctgatgaggagaaatccgaaaaagaagaatgtaatttatggaccgaagtgtggcaggaaaacgtacctggttagtagtgtggcctgagttaaacctgcttcttaggaatcacagctagaattttttacttgcattcgttattcataaactcctctgaagttactttcccaggaccttaatatgcatcccatttagttttaaacccatccaaattgctcatcccatttagttttgaacccatccaaattgctgagttctcaaggttggcactcaggatttttgtctttactcattcatcactgcccacatgagagaatataaaccctgtgagcaaggagagctttacatttttaattaagagtgtgattttatgtggccttagagtattttagagtagttttctaaatgtgtttttcaccttgtcgcatattaattgatgatgcccatttgtgtgatacgttcctgtgggcacccaagttcgtaaagttctactattgtgagaataagtcacaacaccaacacactttctctccctttgagagagtggtgtgttttaacagttgagagtcactgcttttagactgttggtcactgactttttttcaggtttagaaaaatcagttaatttttcttgtcacttaaaagttgttttaattttgctttcctaggatcctttggtggcattcgattatacctgcaggagttaattactattacccagaaggctttgcagtctcagtcctggaaaatgaaagcccagggtgcaattgccatggcatcaattgcaaaacagactagctctctagtacctccatatctcggaatgatactgaccgcattgctgcaaggcctggctggaagaacgtgggcaggaaaggtaaaggaaccattcatacccagttaaagggattctgacttcatctttcattttgcataatagtaacgatctggttttgtgtaacttttccaatggattatttttgtgaactagatttcctagacagtggaagctttgggtaaaccttgcctgattaactgtggtatttcctctcaaactgcaacccgtgtggccttgcataatggacagtaatgctggagatagatacattttccatattcagccttccaagttacgtcttaaaccaacttgtcagcattttgtacctgttgacctcatgaacagatcaggattgggcatagaaagatcaggattgggcatatgtgaaatagagtagcaaggtagcctgcctctaaacctggggctgaagatgcccatctctgggacctatgaattagtaacagttatttttttacacaagagctttagtaggattcttaacagtgaacactcagtggggaacatgagattgtggtaacctaatgatctttatgttgtaaaggtcaatagtggcccatgcaggaatgaagtagtaccggactgggagtcagacatcattccaattctgtggttgacactgttttctgtgagacctgggtcgaatcagttctttaggcttctatgaaatggaggtgaagataattatcctacatccatggtttggagtaaaacttggtggatgtgcttaaaattatgcattaaagataaggtgactgttgttaatttttgttgtcatagttatcaaaaattcctaaggtaattgtaatcatggtttagacagtgtaaatgacatgtttgggcttaatagtatttcctcatctttcaaccccttaggaggagctattgaaagccattgcctgtgtggtgacagcttgcaggtaaatgttctttcaatgaagatgccatttcttaaactggacccgaaaactgcagcctttattaacttctgatgcttttgtatggaccctgtagtgcagagctggaaaagtctgtgcccaatcaacccagcacaaatgaaattcttcaagctgttctgaaggaatgtagcaaagagaatgtcaaatacaagattgtagcaatcagctgtgcagctgatatcttgaaggccaccaaagaggacagattccaggagttctctaacattgtcatacctctcatcaagaaggtaataccacctgtatcctcagttctggtttatactttaaaaagaaaaagttaaaaaattgttttcccctatgtcctgattattaggattagtttagctgcaagtagcagagaaattccaaaatacggccttaaacaagatagtcaatgctatgtttctcacaaagcgttgggagcatcacaaagtgttcaggtattccgtctctttacagctctgaactctgccatttctagggtgtggtcatcatcctcatggtccacagtgtgtttgtgttctaggcaggaatgcagaggagatgaagcaaggatgaaggatacagtgggcatgccatgtctctcttgaggagagttcctgggcaccgctagatggcactttgacttatagccatcctgttggtcagtacttagccacacctggcagcagactgagtcttcattctgggtgtccatttgccctccatgggagaaggggagagtggatttggtagtgaatgaacagtttatgtcataataagctttgccttggctaataagctaagccaccccagccatcctagagtaaaggcaagaagctcagtgtgccatgtgaattgcctctgccatatagtggaggatttgggtcaaaaaaagactcaagtttcatgtggaaaatggaatactcatttttaaaagttgggcactggtcccccccccaaaaaaaagggtgtggtttccctgtttatttgtgaaacatgaaatattttaagtaacattcttatttcttattgctcctaaattgcagttgttttctttcagtaataaggctatttaaataatttccattacaaacatagtgatagcatatggatttgggagacttgtgttttaagttgattacatcactagcaagctggaccagttgcttctcttagcctctgtttctctatcaagaaagagtttggatttagatcattactgagtttcttccatctttaaaatctgattctaatgcaagtcttttcatgttatgctcaaaagactacatatgcagtattttttagcttttgtttacagatgcctgtaaagtattgcctaaatttattagagatacagtattctggttataaattcttgttgtaaatagggaaacttatggtagagaatttatcatttaactcttggttaatatctcctgccttggttggtaccctgatagctttaatagtatacctgtaactttgaagaagaaaatattacattttcttttctttgatatatcctagaactcacttgaaagcagtggggtccggacaaccaaaaatgaagaggagaatgaaaaggaaaaggagctccagctggaatatctgctgggtgcctttgaaagcctgggcaaagcctggccgcgaaacgcggagacccaacgtaagcaccagaaactgcatttgaagtgctgtaaccagaggttacttaatgagagcgaagaattttctctatgacaaattatagttattgtttcttatcgagcctgattgattaataatgagaattatccagtgaaagttttttgtctacatgagtctgtgatctcactgatcattgtaccgctgtagctagggctgctgtaagaaagtatcacagactgggtggcttagcagaaatttattttctcacaattctggaggatagaagtctgagatttcgagatcaaggcgtcagcagggttagtttctcctgagacctctctccttggcttgggaatggctgtcttctccctgtgtcttcacgtggtctttggtgtctctgtgccctaatcacctcttcctataaggacaccaggcacgctggattagggcccactcatatgacctctttaaaggctctgtcttctatttaataataatacagtcaaattctgaggtactgggggatagtattttaacatacgaattttgggggcacagttccacctataataaccatgatacattttatgcagatagtttgatagacgagttctactgatcttcttgatgatcatagctctattcagaggaatgcacaaagtttattagcagggtctctttatcctgaaatgaatggtcttgttaccaagtgttcagtaagcaactgaaatccctgtttcagtgaaaaactcattactatttggacaattttcagaactggacatgtatttcccaaagattaaatgaacagtaaacctctattattggatgaggttgcagttagtttggagtcccctgacagggccttaaccttgggatgatactaccctttacacttgatcttagccaaaaggccaagaagtgatgatgctaccctttaagcttgccttgtgttgggtcctacagtgcatcctgctgaagatcttagtattcgttttttttttgtttgttttttttttgagacagggtcttgctttgttgcccaggctggagtgcagtggtgcagttcttgcagcctttacctcctgggctcaagtgatcttcctgcctcagcctcccaagtatttgggtctacaagtgcatgccacgacacccagcaaattttttttgaagaggtgaggtcttgctatgttgcccaggttggtctcaaactcctgggctcaagtgatcctcccactttggcctccctctcaaagtgctgggattataggtatgagcctccatgcccagcgacaatattattgaatgttataaaaagtactgttgattatttgtgattggatatgtctagaatcagttaaggttctctttgagccctgtcatcctttgtgtgaacttatatatttgctatgtttataggaagggtttcccagaagatacaaatttgcaggtggttttatttcttaatattatgttatagactgccatggaagtccactaatatgatgccataaagagtattaacttttccttgataggtagagaaagctaaagtagggaattatatgagaaagatgatacaaacataaagcagtttattttaatataagacatagaaggttgttaatagaaatgtgcatttattgagaaccaaggccttttctttaggaacttaactgttacacattggcttctcatatatatctacaatttctgggttttgtttctttaaaacagagaaagaaatttcaagctcttatgagacaatcctagtgcagaattctagattttttattgcctccccccatttttacatttgtttgagccctactaaatcctacagtaattaaaaataacttcgttgttgagttttctgctgattcatcagttggcataatattaattatatagttataattacagttgcagttggcataacaggtttataataaagcactgttgactcttggtaaacctgcaatttgcagaagcttgtgagcatctagagaggagcttctggcctccagagttctttctgtggctgtcattcagggagttttgaggggcaaagggagtgtggttaaagtgctttctcagttccatggagaaccatatgccttgaaagtgaatatttgtgaacaattatattgcacctttgtgggggcagtttctgatcaaggaaatttgtttggggattgagtacaaagtcatgctgaagtttttggggaaatttcaatggctttaattaaaagtatttattgttttatttctctttttcctgcttttctctctcttatcctccccaccttctctctttctctttccctcttcctttctcttgctctctctgcctgtccctcatttattccatctcttgttcttttatactgtctcctgctctgtcccaccttgtctttttttcccaggttgttatcgtcaggagctgtgcaaactgatgtgtgaacggctaaaactcagcacgtggaaagtgcagctaggagtcctgcaatcaatgaatgccttttttcaggggtaaattgcttcatggctcagttttttattttgttcctccccgcagcattttatgtataatcaatggaatttttatacatttaaaaactggtagctaaagtgacagtgatacatacagatagaaattgtgacaggaaagttttagactgtttcttaataattggcatttgtaccttgctttctgatttgtataggttaatgcttttggaagaagaacatgccgatcctgaggctttggctgaaattctgcttgaaacttgtaaatcaatcacatattctttaggtgagtgtagtaaactaaaactgatgagggagtcctaattttaaagctaaggagctgagcttcaaatatttcctactttgtcttaggaactaaatttctgaaatagctactggactctgctacttattatactccatgtgtaccccttaactggaatatttaaatctggaactataacaggattttagcatctagtttagaaaaaccttcgtgacaagtatttttacaaaattgttacttgaaagtaatttcaaacttacagaatggttgcaacgacagtacatgtaatactctgcaatatgtatacactttatgcagaatcatttgttaacattttgtgccatttgctttgtcatttggacttctatatacatgtttttctcctgaaccatttgaaagtatgttgcttacttcaggcccccttgttcctcaattatttagtgtgccacggtacagttgtcaactttaggtagtaaacatggatgcagttttttaaatcaaatgtttatcgttcatattctagtttgttcagttgattcggtaatgttctttatttttatttttattttttttgagttggagtctcgctctgtcactcaggttggagtgcagtggtgtgatctcagctcattgcaacctctaccttccaggttcaagcagtcctcctgcctcagtctcccaagtagctgggattacaagtgtgtactgtcacgcccagctgatttttgtatttttgtagagacagggcttcacgaagttggccaggctggtctcaaaactcctgagctcaagcagtccacctgccttggcctcccaaagtactggagttataggcatgagccaccacacccagccagtaatgttctttataggattttttccccctcccctccattagggaatccagtccaggtgatgatgatgatgatgatgatgatgatgatgatgatgatgataatggttattattatttttgagacagggtcttgctctgtcacccaggctggagtgcagtggcgtgatcttggctcactgcaactctgccttctgggtttaagtgattctcctgcctcagtttcccaagtaactggaattacaggtgtgtgccatcatgcctggctaatttttgtatttttagtagagacggggtttcaccatgttggctaggctggtcttgaactcctgacctcaagtgatctgcccgccttggcctccaggattatttattgaattttattgtcatatatttttagtctccttcaatctggaatacttcgtcagcctttctttgtcttaggacattgacaattttgaagaataaagtccccccgacttccctttttgaaaaaacagaatgtttctcatttggtgtttgatgttttctcatgattatatccaggttgtgaattcccagttgggatacatacataagtgatgtgtcctcacattaagaggcacacagtgtccatctgtcatcatttgtgatgttaattttgattacctggtcaaggtactatcagtttttctctactggatagttactatgttttctttttgtgtctaataagtagcctgtgggaacagatcttaagatcattcaagtaatttgtttctcttctttaaaatttcttctctatatttagcatgcattgatgattcttccctgaaccaatttttactaagatgattttgcaactctagcactttgtccacattcaccatttgatagttggaattctgttgtaagcaagattcttctcttctgcccatgtttttatttatctgttactggcattgattcatggaatctttcccccttcaaatggtttataatttaattttttaaatctaattcgttattccagttgtcccagatttggccagtggaagccctttcaagctgcctcctgtgtccttttgacaggtcaccgtcactctttgtagcacttttgtactttgtagcataacaagatgataaggcccatctcatgcctaccctgctttgggcttggttgtgtgttgatttttttggtagacaatttcaccatgaaccagacgccgtgtcaaagagtggatgccaaggaagcatgtttcattcgcagttgttggcagcagcatccttttatggataaagaacaggcagccaacagacctctctttgctgagttccaggtgtccctgatcggcttaaacactgggtcatataatgttctttggtaaaatgaggagggtcatgtagacctaaggatcgttcttatccgtgatacgaagatgattttgtgtttgagatagttttttcatctcccacttctaaaatggatcatttaaatattgccatttgttgtggtgattggtatacttggctgacaggtttttgtttttccaaagtaaagactgtggacattagcacacatttcaagtatttgatacttagcaaagggaagcttcctttaaaaaaaaaaaatcagatatacccttccctagagttgtaatttctggacatctttctttcagcaacacaaatttaatcttggaggttgtgtttttcaggcaggccatatgaactgtatgatatttctttttagaaaataagacctactcatctgtgagaacagaagctttatctgtgatagaattgctgcttaaaaaacttgaaggtaagttgttgttagttctgactgggggaccataaagccatgtggcatatgttttagaaattttttgtttcgtttttgcttatactcttaagcatatactctgaaatacaaatcagtatgtatgcacatgcaagaagaatggacaaagccaaaactattaaattttactaaatatttaaatttgatacacttttatatatttttaatatattattaagctatagttgtcttaaagtaataaagtttttgttttcatcgtgaatcctgatttaatcttggttaattacaggaattggttgacagtggcatgtgtacatgtaaataagcagaacgacacactgaaaagtggagttggaaaaacatttttaacagttatctacctgagtcatcaaatctgacagtagcaattttcttaatcctatttcttctcccctaacctctttttcttctaatggtctatcagtgggtggggtgggggggaactgttagcattttctccagtggtgtatctgttactgacttcagaaggaggaccctcttcttttttctctctctctctcaaattgttttcacggattaagaatgtagaagatggaaacgtttttcctgcaaccttgtgtatttgctctttctacttctctatctttgcttagcaattaaaacacctctcttagggctccatcaaacagaacttttagactgagtaacgctaaacatctcctaatcccttttttccttgttgagataaaagagctaggcacttagtcgtattaccgaattctcagtttgccagatatgtactaatatagtccagatgaggaaaataaggctgaaggcaagctaaacttgcctgaagccacattgctaggaagtgacagaaccttgtaaacaagatttaagatttgatatactttcttattttctaaaaatttcaatgtgcatgtagttctcagatgctttcctcgaagaaaagggagtgtcatctatttatctgaccttgcaattatgacatttcttagaagttttttttttttaactgaccgtatcttatgaaatggtcttgcgatggtgttgttgaaatgacttttttgctgcagtgtgccttgccctgataattccttcttcctactatgcttcagtgtaattatttctcttactcccactgatactgggggaaggagaggaaactccctgatgtgcctctacgctactgtcaagaattaggttttgagacacatattgacagtatgtaatgataattatatactgatctgttatcaagaggttgctttgcatttatttgggggataggatatttttaaatttttttcttgcttgttctataaggattctttggggttttttctttttgctttgttttttgttttttttgtttttgttttttttttttcatgcagaatctaaacagtgggaatgtttgacatctgaatgcagagtgctcctaattgagtctttagctactatggagccagacagcagacctgaactgcaggagaaagcagcgttactgaagaaaacacttgaaaatctggaataaattagaaggggaagaaacaaacaagtgccatgttcattgggggttgaagtggtggtgttctttgaaaaaccaagtgggaaaaagtaaagattaatctgtagcatgcatcattccttggctgaaataaaaagaaaaagccttaaattttgttccttattagctttattttactttatgtttttaaagtatctgggctgagtgagcttaatggaaccttggatgtttgaggggtggttgtaaaggaaactggcagaaatagttactaaaagagttcaagctgttattaaaggaattaatagacagagttgcagagcaagctggataaaaatcttagaactgcattcaaattagttatttcaggaaggggccctataaataacttattttaacctccctcttacacctgaagaaataggaagctgtgtcatctcagaggctttctgaggcctgtgccaaagtcagaacccaggtgtttaatgtctggccctggatactttcttttatggccatctgccaaatcagtgctaaccccggcttacccaagaaacttccaagatgaggtacgtttagggtggcacacagcagtctttgtgccagaactaaactgacccttaccattgggtttctgaaagccagaagctaaacattgtcttgtcatgtgtttaggtggttgatttggagaaaatgattgtttagcatctttacagatggagaggacagagtcagtctccttcggataattccaatcgtcttccttttacaggtggataaagtagattaggacaagatcacacattctatctgtgtctgtggctgcatattttgcaaaaccagaaacaaaatcgcagactgccgtggtttagaccatttataatgtcaaaactgtaatgacaaatttctgttcacttttatgctaccagtatgactttataggggagaaggaaagccttttaattagccacctgggaattactcttttaaaaaatgccttttctcaaaagaacatgataccactccaagtaaatcattgccactaggggttttcctccttccttctgttgcccatgcccctgcctgaaagtgtagggtaagaggaaaaacaagtaaaaccttagtgttgatggtaaactgagaactctgtagcttaccttggattccagagcagaagactggtttacattcagtactcatccttattgacgttaacaccaggaatctccatgtttattatttttcgtggaaactccatgtttattatttttggtggtctctattgaccaatgtatttcaaacttttttgactgcaagtcataataaaaataactttttacatcacgacccagaacatgtgtgtttgtgtgtgtatatatgtgcatgcctaaatacaaaatctttaaaacatttcatgaaataatacataactgtgtgataccctttagtgtctgctcccggccccctgatttaatgctcttcagactctctaaattcatttcctgactcacaacggggttgctacttacagtttaaacaacactgccgtagatagcacctagacttggctgaatatgctggggatttgtttctgattgaaaagggagtttacaaataaaaatttaagtgtttattacaaaaacatcctctttgctgatactgaacgtcagttttagtagcatcatgaattttaaggaatctatctcggattttcatttgagaatggctattgcttggggaaaaatcaacttcggatgttttttagaaagcttatggcgtcttttaggacttggtgtttttcatatcagtatttccccctccaccaagtactccctgactttcatttatggtacctgggatattcttccttggcaagaatacaatgcaggttggatgttttcagaaagtaggattataaaggcaagaattacgctcttagtctatatcaaatgttaacaccttgtcaaatgttacgctttttaagctttttgttttttaatattgggaatttcccttggtgctaagaatggtgctgaggcactcgaacctttgtgcttcgtgctattgaattcctgtacattagctttctaagcacatttctaatttgtacacttaatgccttcatcttgaccagcctaatcattcacacagctagtaatgctaaattattgtctcacaatgccccttatctttggtgtgcatgtgtacctatatttatttaaaagggttaataacagagcttgtaattgtggaatgttcgctggtgaacaaatggcagaaggactcacgcaagtttatatcgtcggcctttgttttccagagctcccccaaacagattttgattattttctccctagaaatagtgttacctgtcatacaagcaactgattggtagggtctactactgaattccttattcctggaattagttcacaagatgtatcgtcttaaatgtactgatatgtgaaaaggagatacccagagtgtggcaagttggaaatcagaatcatcaaagtagtatataattgtctttttggtgataaagagcagctgtttccttaatgaagtttgtgttgaatttataattccatgtgcctccctgtaatacagtctacctgcacagcaaaactgccaccgcattcccattgcttcccccttccatcttttactgcgtacttactaacaagacagaaaagaaaaaagatgtgcccttgttggtcttcgctctggtagcaactgcactgcgcgcacactgtctgcccttcatggggcatttctacctgctgctgccacaatatattcatgctgcttgttaagtccagggagttactttgacattggccttattgtaatgtacaaactattgttaaatggatgtatatgtaacagaattttgtattttatatgtgactttcacagaatcgtctgcagtatgtcccagctagctaagtgtctgatagatatttgaaaggaaaatcccatccatgcccaagaagatattaaatggcaaataaaagctgcatgatctgttcttttgaagtagtgcattaatttttattaattctccaggaaaatagctcaactgccaaggcattgactagttatacttaaaaaacaattaaaaacccaactgcctgccatattctgagctaactccggtaagtagaaattgctggcttaagtgtttaggagctgcaagacaaagcagaaacaaaaggaagactccctgaacaactgctgtcagatgcttggaggaaaggtatcatggaaacatttgattttctcataaaagtaacccctaaggaacatacaaaaacaacagacagttcttttgaccaagattaagatacatggctatgaatgtaaaatgtcagaggtacaggcacatcctatactgtaaactgccaagcaaatgtttagactgtggaagatggctaagtatttgcttggcagtttacagtataggatatgcctgtacctctgacattttacattcatagccatgtatcttaatatttagactgtgaaagtgagttaccttgcttattctctggagcagccaacaagcctatgccgttccctcctggtatgcttttctttttcctttcaagcaggttccaaattagcttactacagtaacttttttttttttttttttttttttttaaatgcgaagtctcactctgtcatccaggctggagtgcaatggtgcgatcttagcttactgcaacctctgcctcccaggttcaggggattctcctgcctcagcctcctgagtagctgggattacaggtgcctgccaacatacccagctaatttttgcattttagtagagatggggtttcacctcattggccaggctggtctcaaactcctggcctcaggtgatccatgtgcctcagcctcccacagtgttgggattacaggtgggagccagggagctagagtaactttttttttaagtgaaccataatgctacaaaagttggaaacagcctttcaaacgatagtttctcaaagttttaagtgtttacctttaaaaatgatacatttcttttacattcaagtagtattgaaaaaacctttatgaaaaagataaaggacagtgagaaaacaggtaataggaacatctgtgtttgtttgggtattcttgaaaagagtactcttaagaccaatgttgggtattagtggttagatgtataattcttttacgctacttttgattccagaacagtcttcaaatacaatatcttttctgaacatcagtatttttgagtatttattttattttagcactgtaaagatgccccagtgtttcttggccttcagggtttccagtatgatttctgaggttctcagagcaaattgttgctctctagatgtggtgtgtagtttttttctgtctgctttcatgatttttcctatttttggatttcagcactttgactatgatgtacctaggtgtgcttttcttcatatttatcctcaagttttgcttcgatttttgaatttctaaatgtgtgaattttactgaattgtgaattttgttttgttttggccatttacccacatgtttttttccctgtgccatcctctctcctctctttctagaactctagttaaacatatgttagatcttttgatattgttccacaggtcttagtcattttttaaaaattcgctttaaatttattgactctaccatgtctattctgatattaaagcccatctagtgagtctttatttcagatattttaattttccattctaaggtttccatttgttctttttaaaattttcaatttctaatctttctcacattttaaaaaacatcatgaagcataattatagttgcttttgagttcttatttgatacttacacatctggatcatcttggctttggtcttttttgattgcctcccccaggcctccaacatcatttcctggttctttgtatatccggtattttgggactgtaacccaacattcttagacattgtgcatgttatgtcgtggagactctggactgttcctccaaagagctgcttttcaatttgagcaggcagtgaacatggttaaactcaaactgccaactatctcccctttggtaggtggctcagatctcagttcagctcttttttttttttttttttttttggctgagctttttgcagtctgccgtgaacgtaagtgattcagagattagtcacagacttgggcagagttacacacagaaacttgggttcttcttctctgctgttttatatccaggattttccccttactttgtagtgggctctgcctgcctcaggctggagagagggtgattttcagtgggagcttccaccgttctgtgccacgctgactgtgctttaccctaaggacaaagccacaaagccccaaaactcaccccctgccggccccttccatgttttggctctccgccgaaatctacccgactccgactctagagccttaagaaaattgtttgggttttttttgttttgttttgttttgaatgcagtgtttatagtttctatatgcaaggcagtcttctgggaagttactccaccatactggacatagagtttgagaatatttgttgtttttaaaaagctatacaaagctaaacgtacccttaccattggattgtgctcattggtatttatgcaggcaaattgaaaacttgtgtcgatgcaaaatctgcacgtggatatttatagcagctttatccataattgccaaaaattggaagcgaccaagatgtccttcagtaggtgaatggtaaagtataaaataaactgatatatccagaaaatggaatattattcagtgctaaaaagagctatcaagccattaaaaacatggagaaaacatacgtttatattagtgaaagaagtcaatctgaaaaggttacatcctgtatggttccaactatatgacattctggaaaaggcaaagctgtggagaccgtaaaaagatctgtgattgacaggagttgggggaagggaagggtgaataaatagagcagagaggatttctaaggcagtgaaaatactccgtataatactacggttgtgaatatatgtcgtcgtacatttgcccaaacctatagaatgtacaccaccaggagtgagcccgaaggcgaactatgaacttcaggtgataactgtatgtcaatgtaagttcatcagttgcaaccaacttaccactatggtacaagatgttgacagtgggcaaggttgtgcatgtgtgagggtagggggcatatgagaactctgtaccttcctctcaatcttgctttgaacctgaaacttctctaaaaagtaatgcctgtttgaattatgttttagataaatcttaaaaaaacaaggttttttttttttgaggcagagtctcgctctgttgcccaggctggagtgcagtggtgccatctcagctcattgcaacctacgcctcctgggttcaagcgattcttctgcctcagcctcccgagtagctgggattacaggtgcccatcaccacatccagctaattttttgtatttttagtagagatggggtttcaccatgttggccaggctgatctcgaactcctgacctcaggtgatccacccgtctcggcctccctaagtgttgggattaaggcctgaaccacttttttttgtttgtttgtttgttttgtttttgagacagggtcgcactctgttgcccaggttggagtaaagtggcatgatcatggctcactgcagtctcaaactcctgggctcaattgattctcctgcttcagcctcctaagtagctgggactacaggcgcacaccactgtgcccagctaattcttgtattttttgtagacatggggtttcaccatgttcattgcccaggctggtctcgaactcctgagctcaagtgacacacctgccttggcctcccaaagtgttggattacaggcatgagccactgcacctggaatacatttgagttttaagtgaagaggagaatatgggtaggtaattttgcctctggtcaaaaaatgagagagttcaggtttttaaaagttagttcttcaaatatggagtgtggaatatggtatatttatttgcacttgtaacttctgctttctctcatttggattcctaggtattggattctagcttattctttgctgatatgatctttctaatttgacattgaattattctggccatttcaggaattttagaaatagagttttgaaatgaaggtttacattgttgagaactattctccagaaataaaaaatgtaagggaagaagaaaagtatgaaaaacacctttagaatatttctttcaaaaagggaggtttatttccatatactccctttcctcacacatgcacaacctcgcccactatcaacatcctgtaccacagtggtgtgtttgttgcaattgatgaacttacattgacatatagttatcacgtgtcttggggcagggattaacagtccatgggccgtaaaaccagccacaactcccaagttgatctacagattcaatgcaattcctatcaaaatgtgaaagtattgaaaccgtagaaaatatactctataatcacaatgaattgaaaatagaaattaataagtgaatgaaactgagaaatttataaacgtggaaattaagtacacacttctgaataaccaggggaacaaagaggaaatcaccaaagaaattagaaaatactttgagatgaatgaaaatgacacaaaattccaaaacttatgaagtgcagctaaagcagtgcttagaggggaatttataactgaaaaaaagccatcttactagagtatgagtaataataataatagtaataaaaaccaggtgcagtggctcatgcctgtaatcccagaagtttaggaggctgaggtgggaagattgttggaagccagcagttcaagaccagcctatgcagtgtagccagaccatgtctctctgaaaaattttaaaaattagccaggcatggtagcatgcacttgtagtcccagctacctgggaggcagaggtaggaggattgcttgagcccaggatttcgaggctgcagtgagccatgattgcaccactgcactccagtctcggtgacagagtgagaccctgactcaaaaaaccaaaccaaacaaaaaacctatcccaaacctttctcttaaagcattggaaaagaaaaagcaaattaaacctgaagggaggaaacaaagatcagagcagaaattatgaaattgagaataggaaagaaaaaaaaaaagaaactgaaagttggttctttgaaaagatcaacaaaattgttgatcagcaaatctgtaggtagactgaccaaaagcaaaaccccctgaattactaaaacaggaatgaaagagatattgctatttgctaatcttaaaaaataaaccaaaatataaaggaatactatgagcaactgtatggcaacaaattagataacttagatgaaattgacacattcccaggaagctacaaatcaaaaaattaaatctgactcagaagaaatagaaagtatggatagacttgcagcaagtaaagaaattgagctagtactcaaaaagctacctgcaacaaaaagtccaggcccagatggtgaattctaccaaacatttttaaagaatgccagttctttttaaaatttttaattttttaattttaaattatgggtacataatagttatgcctgtatcaaaagaatatcaattatttacacactcttcagaaaaatagaagagggagtacttcctaacttgttctatgagaccagtattaccctagtaccaaaattggacaaagacatagatgaaaaaactaaacaagctacagagaaatttctcttacaagtatagacacaaaacttgcaaacaaaatactagaaactgagtgaagcaatatagaaaaatgattatacatcatgaccaggagggatttatctcaggaatacaaggttggtttaacatgaaaatcaaattatataatgcctcataccaataaaggagaaaaaccatattataatctcaatagatgcagaaaaagcatttgataaaatccaataccccttcattttacacacacacacacacacacacacagacacacacaccccactcaacaatttggaataaaagggaacttcattagctaataagggggatctacaaaaaacacatagtttacactgtaagactacatgatagtacctaatagggttacatgatacctaatgaagaaagactaaatgttttccctctaagctcaggaatgagataagggtgtttactcttgctacttcctttaaacattatgctggaagttccatctaggaaagttagtcaagtaaacagaacagacggcatcgagattggaaagaagtaaaataacaatattttcagataacatgttgtatatagaaaatcctaatgaattcactaaaaacctattggaactataaatgagttcagcaaggttgaggatcaattaataattgaatttataagttaattacaaatatcacttatttctatgttgtaccaatggacaacctgtaaatgaaattaagaaaactgtttcatttgcaatagaaaattatttgttcaaaatgaatttttaggaatgaatttaatgaaacatgcaaaaattacactctgggaaattacaaaatattgctgaaagaaattaaggaagagctaagtaaatggaaagacatccatgcttatgatcagaatacttaatactgttaagatgacaatactgaccaagttgatttacagattcaatagacaaactaattctaaaatttatgtggagtgcaaaggacccagaatacttaaaatattttgaaaaagaacaaaagtaggcctagcgcagtggctcatgcctgtaatcccagcaccttgggaggccgaggtgggcggacatgaggtcaagagattgagaccatcctggctaacacggtgaaaccccatctttactaaaaatacaaaaaattagctgggcatggtggcacgcacctgtagtcccagctacttgggaggctgaggcaggagaatcgcttgaacctgggaggcagaggttgcagtgagctgagatggggccactgcactccagcctgggcgacagatcgagactctgtctcacaaaaaaaaaaaaaaaaaaaaaaaacaaatagaacaaaagtggattactcctctttcctgacttcaaaacttactaaaaatctatggtaatcaacactatgtggtgctggcataagactggacatacaattcaaaggaatagaattgacagtccagaaataaacctttacatttatggcaaattgactttcaacacgggtgtcaaattcactcaatgaggaaagaatagtcttttcaacaaatggtgctggtacaactggatatctacatgcaaatgaatgaagttggacttcttcctcacattgcacacaaaatgaactcaaaatggatcagacttaaatgtaagagctaaaactgtaaaactcttgaaagtaaatctagaagtaaatcttcctaaccttgggttaggtaaagatttcttagacatgataccagaagctcaagtgacaaaagaaaaaaaaatataaattgaattccattgaaattaacatctttttgtgttttcacaggaaactatcaagaaagtaaaaagacaacctacagattgggataaaatatttgcaaattctatacctgataaggaacttgtattcagaatatattaaaaaaaaacactcttatgactcaaaaagacaacctaatttctaaaatgggtgaaggatctgtatagacatttatccaaagaagatatataaatggccaatatatacataaaaattgctaaaaatcagtaaccattcggggattgcaaatgcaaaccacaatgagatgccactataaactgtctaggatggctatataaaaagaagacacataagtattgataaggaagtggagaaattggaaccctcaagcattgctggtgggaatgtaaaatgatacagctgctttgggtaacagttttgcagtttctcaaatgtttaaacaaagtgtaacatatactcaagagaaatgaaaacatatgtcccacaaaaaattatagataaatgttcataggaacattatttataaaaaccaaaaactgggaacaacccaaatgctcaactgatgactggataaaaattaaatgtggcatatctatacaatgagatgtttggcatgtatcattatttcattcctttacttgccaaatatctcattgtatatggatatccatacaatgagatgttatttggcaagtaaagg

SEQ ID NO: 1491 - DNA, 7047 bp, Homo sapiens
cgagtccgcgcggggagcgcacgcggggcgggcggcgacaggtgggcaggacgagccgcgagcgagcgagggcgggcgggcgcgcgaggggcccggcgggggggccgctgggaggatggctcagctctttctaaatataaaaccggcgtgagttgggcgagcgcggcgcggagtcgcagagccgccgcgcgggcctggcgcacggggattcggccgcacagacggcggcggcggcagcggcagcggctccgcagaggcgcgaggctgcgggagcgcccgagtcgcgagctcgcgggggcagcgaagggcgacgctcgcgacgcggaggacgcaggcggcggcggcgggcgggcctcggggcacagcgcggtccgcgccgagtgaacggaggcggctcgcggcccctgccgcaccgcgagccgcgagccccccggccgcgccctgcccccccagcccctccctcgttccctccccggcgcaacatggctgcggccgccgcctccgcctcccaggatgagctgaatcagcttgaacgggtctttttacgacttggccatgctgaaacagatgaacaattacagaatattatatctaaattccttcctcctgttttgctcaaactctctagcacccaagaaggagtacgtaaaaaggtaatggaactgctggtccatctgaataaacgtataaaaagccgccccaaaatacaacttccagtagagacactgttggttcagtaccaggaccctgctgcagtttcctttgtcacaaattttactataatttatgttaaaatgggctatcctcgcctaccagtggaaaaacaatgtgaactggcccctacgcttcttactgccatggaagggaagcctcagccacagcaggatagttacgtgttaaatgaatcccagagtcgccaaaattcatcttcagcacagggttcttcttcaaacagtggcggaggttctggaatcccacagcctcctccgggaatgagcttttatgcagccaaacgagttattggtgataacccatggacacctgaacaattggaacagtgcaaattgggaatcgtgaaattcatagaagctgaacaggtgcctgaacttgaagctgttctccacttggtgattgcctctagtgatacacgccacagtgtggcaacggcagcagacctggaattgaaaagcaaacagagcttaattgactggaataatcctgccatcattaataagatgtacaaggtgtaccttggagatataccactgaagacaaaagagggtgcagttctgaagccagagttgaaaagggaccctgtcagtacaagagtcaagttaaagattgtcccccatctcctccgctctagacaagctgctgaaacgttcccagccaacattcaggaccctaaactactgtcaatggcatattcagctgttggaaaactctccagtcggatgccacatttattcactaaggatatagcgcttgtgcagcagctttttgaagccctttgcaaggaagagcctgagactcgacttgctattcaagaagctttatctatgatggttggagcgtatagtactttggaaggggcacagcgaactctcatggaggcacttgtggcttcgtacttaataaagcctgaagttcaagttcgacaagtggctgtgaaatttgccagtacggtgtttccctcagatcatatcccttccagatatttgctgctactggctgcaggagatccacgtgaagaagttcatggagaagcacaacgcgtattaaggtgtcttccaggtagaaacagaaaagaaagtacttctgagcagatgccttccttcccagaaatggtttattacatccaagaaaaggcttctcatcgaatgaaaactccagtcaagtacatgaccgggaccactgtccttccatttaacccagcagcctttggagagatcgttctgtacttgcgcatgtgccttgcgcacagtgcgggggtggtgcccacctctcagagtttggctgatatgcaggatcatgccccagccattgggcgctacatacggactttaatgtcaagcgggcagatggcaccctcatcatctaacaagagtggggagactaaccctgtccagatctacattggcctgcttcagcagctgttagcaggtgttggaggtttgccggttatgtactgtctattggaagctgtgtcagtgtatccagaaaagctggctaccaaatttgtagacaaaacagaatggataaagagtctgatgaataacagtaaagaagaaatgcgcgaactggcagcgttgttttattctgtagtggtatcaacagtgtcggggaatgagttgaaatcaatgatagaacagcttataaagactacaaaagacaatcacagcccggagatacagcatggatccttgcttgcattgggattcacggtgggaaggtatttggctaaaaagaaaatgagaatgtcagagcaacaagacctggagagaaatgctgacaccctccctgatcaagaggaactcattcagagtgctacagaaacaataggctcatttttggacagtacatcacccctcctggcaattgctgcctgcacagccctgggtgaaattggcagaaatggtccacttccaatccccagtgagggatctggctttaccaaattgcatcttgtagaaagcttactaagtagaataccttccagtaaagaaacaaataagatgaaagaacgagcaatccaaacactgggatattttccagttggggatggagattttcctcaccagaaactcctcttgcaaggtctgatggattctgtggaggccaagcagatagaacttcagttcactattggcgaagccattaccagtgctgcaataggaactagttctgtggctgcccgagatgcctggcaaatgactgaagaggaatatactccacctgctggagccaaagtgaatgatgtggttccatgggtgttggatgtgattttaaataaacatatcatcagccccaacccacacgtgaggcaagcagcctgcatctggctcctttcccttgtcaggaagctaagtacccacaaagaagtgaagtctcatcttaaagaaattcaaagtgcatttgtttcagttctatcagaaaatgatgaacttagccaagatgttgcatcaaagggccttgggttggtttatgaactaggcaatgaacaagatcaacaggaattggtttctacacttgtggaaacacttatgactggcaaaagagttaaacatgaagtttctggagagacagtggtatttcaagggggagctcttggcaaaacaccagatggtcagggcctttctacttacaaggaactttgttctctggcaagtgatcttagccagccagatctggtgtataaatttatgaatttagccaaccatcatgcaatgtggaactctaggaagggtgctgcttttggttttaatgtaattgctaccagagctggagagcagctggctccttttctgcctcagctagttcctcgactttatcgttaccagtttgatcccaaccttggcattcgacaggccatgacaagtatttggaatgcgttggtcactgacaaatccatggtggataaatatttgaaagaaattcttcaagatttggttaagaaccttacaagcaatatgtggcgagttcgagaatccagctgtttagctttgaatgatttattgagaggaagacccttagatgacatcattgataaacttccagaaatttgggaaacgctttttagagtacaagatgatatcaaggaatctgtacgaaaagcggcagaactagctctgaaaactctgagcaaggtctgtgtgaaaatgtgtgaccctgccaaaggagcagctggccagagaaccatcgctgcccttctgccttgccttctggacaaaggaatgatgagcaccgtgacggaagttcgagccctcagcattaacacccttgtgaagatcagcaaaagtgcaggagccatgttgaaaccgcatgcaccaaaactcattccagctctgctagagtccttaagtgtattggagccccaagttctcaattatttgagcctccgggcgacagagcaagaaaaggctgcgatggatagtgctcggcttagtgctgccaaatcttctccaatgatggaaacaatcaacatgtgcctgcaataccttgatgtgtcagtgctgggcgagctagttcctaggttgtgtgaactgatcagaagtggtgtaggtcttggaactaagggtggctgtgccagtgtcattgtgtcattaactactcagtgtcctcaggacctaacaccttactcaggtaaacttatgagtgctttgctgagtggcctgacagatcggaacagtgtgattcagaaatcttgtgcatttgctatgggccatttagttcggacctcacgggatagcagcactgaaaaactcctgcagaagctcaatgggtggtatatggagaaagaagaacctatctacaagacctcttgtgctttgactattcatgctattggacgatacagccctgatgtattaaagaatcatgcaaaagaagtcctgcctctggcatttttaggcatgcatgaaattgctgatgaggagaaatccgaaaaagaagaatgtaatttatggaccgaagtgtggcaggaaaacgtacctggatcctttggtggcattcgattatacctgcaggagttaattactattacccagaaggctttgcagtctcagtcctggaaaatgaaagcccagggtgcaattgccatggcatcaattgcaaaacagactagctctctagtacctccatatctcggaatgatactgaccgcattgctgcaaggcctggctggaagaacgtgggcaggaaaggaggagctattgaaagccattgcctgtgtggtgacagcttgcagtgcagagctggaaaagtctgtgcccaatcaacccagcacaaatgaaattcttcaagctgttctgaaggaatgtagcaaagagaatgtcaaatacaagattgtagcaatcagctgtgcagctgatatcttgaaggccaccaaagaggacagattccaggagttctctaacattgtcatacctctcatcaagaagaactcacttgaaagcagtggggtccggacaaccaaaaatgaagaggagaatgaaaaggaaaaggagctccagctggaatatctgctgggtgcctttgaaagcctgggcaaagcctggccgcgaaacgcggagacccaacgttgttatcgtcaggagctgtgcaaactgatgtgtgaacggctaaaactcagcacgtggaaagtgcagctaggagtcctgcaatcaatgaatgccttttttcaggggttaatgcttttggaagaagaacatgccgatcctgaggctttggctgaaattctgcttgaaacttgtaaatcaatcacatattctttagaaaataagacctactcatctgtgagaacagaagctttatctgtgatagaattgctgcttaaaaaacttgaagaatctaaacagtgggaatgtttgacatctgaatgcagagtgctcctaattgagtctttagctactatggagccagacagcagacctgaactgcaggagaaagcagcgttactgaagaaaacacttgaaaatctggaataaattagaaggggaagaaacaaacaagtgccatgttcattgggggttgaagtggtggtgttctttgaaaaaccaagtgggaaaaagtaaagattaatctgtagcatgcatcattccttggctgaaataaaaagaaaaagccttaaattttgttccttattagctttattttactttatgtttttaaagtatctgggctgagtgagcttaatggaaccttggatgtttgaggggtggttgtaaaggaaactggcagaaatagttactaaaagagttcaagctgttattaaaggaattaatagacagagttgcagagcaagctggataaaaatcttagaactgcattcaaattagttatttcaggaaggggccctataaataacttattttaacctccctcttacacctgaagaaataggaagctgtgtcatctcagaggctttctgaggcctgtgccaaagtcagaacccaggtgtttaatgtctggccctggatactttcttttatggccatctgccaaatcagtgctaaccccggcttacccaagaaacttccaagatgaggtacgtttagggtggcacacagcagtctttgtgccagaactaaactgacccttaccattgggtttctgaaagccagaagctaaacattgtcttgtcatgtgtttaggtggttgatttggagaaaatgattgtttagcatctttacagatggagaggacagagtcagtctccttcggataattccaatcgtcttccttttacaggtggataaagtagattaggacaagatcacacattctatctgtgtctgtggctgcatattttgcaaaaccagaaacaaaatcgcagactgccgtggtttagaccatttataatgtcaaaactgtaatgacaaatttctgttcacttttatgctaccagtatgactttataggggagaaggaaagccttttaattagccacctgggaattactcttttaaaaaatgccttttctcaaaagaacatgataccactccaagtaaatcattgccactaggggttttcctccttccttctgttgcccatgcccctgcctgaaagtgtagggtaagaggaaaaacaagtaaaaccttagtgttgatggtaaactgagaactctgtagcttaccttggattccagagcagaagactggtttacattcagtactcatccttattgacgttaacaccaggaatctccatgtttattatttttcgtggaaactccatgtttattatttttggtggtctctattgaccaatgtatttcaaacttttttgactgcaagtcataataaaaataactttttacatcacgaccca

SEQ ID NO: 1492 - protein, 1736 aa, Homo sapiens
MAAAAASASQDELNQLERVFLRLGHAETDEQLQNIISKFLPPVLLKLSSTQEGVRKKVMELLVHLNKRIKSRPKIQLPVETLLVQYQDPAAVSFVTNFTIIYVKMGYPRLPVEKQCELAPTLLTAMEGKPQPQQDSYVLNESQSRQNSSSAQGSSSNSGGGSGIPQPPPGMSFYAAKRVIGDNPWTPEQLEQCKLGIVKFIEAEQVPELEAVLHLVIASSDTRHSVATAADLELKSKQSLIDWNNPAIINKMYKVYLGDIPLKTKEGAVLKPELKRDPVSTRVKLKIVPHLLRSRQAAETFPANIQDPKLLSMAYSAVGKLSSRMPHLFTKDIALVQQLFEALCKEEPETRLAIQEALSMMVGAYSTLEGAQRTLMEALVASYLIKPEVQVRQVAVKFASTVFPSDHIPSRYLLLLAAGDPREEVHGEAQRVLRCLPGRNRKESTSEQMPSFPEMVYYIQEKASHRMKTPVKYMTGTTVLPFNPAAFGEIVLYLRMCLAHSAGVVPTSQSLADMQDHAPAIGRYIRTLMSSGQMAPSSSNKSGETNPVQIYIGLLQQLLAGVGGLPVMYCLLEAVSVYPEKLATKFVDKTEWIKSLMNNSKEEMRELAALFYSVVVSTVSGNELKSMIEQLIKTTKDNHSPEIQHGSLLALGFTVGRYLAKKKMRMSEQQDLERNADTLPDQEELIQSATETIGSFLDSTSPLLAIAACTALGEIGRNGPLPIPSEGSGFTKLHLVESLLSRIPSSKETNKMKERAIQTLGYFPVGDGDFPHQKLLLQGLMDSVEAKQIELQFTIGEAITSAAIGTSSVAARDAWQMTEEEYTPPAGAKVNDVVPWVLDVILNKHIISPNPHVRQAACIWLLSLVRKLSTHKEVKSHLKEIQSAFVSVLSENDELSQDVASKGLGLVYELGNEQDQQELVSTLVETLMTGKRVKHEVSGETVVFQGGALGKTPDGQGLSTYKELCSLASDLSQPDLVYKFMNLANHHAMWNSRKGAAFGFNVIATRAGEQLAPFLPQLVPRLYRYQFDPNLGIRQAMTSIWNALVTDKSMVDKYLKEILQDLVKNLTSNMWRVRESSCLALNDLLRGRPLDDIIDKLPEIWETLFRVQDDIKESVRKAAELALKTLSKVCVKMCDPAKGAAGQRTIAALLPCLLDKGMMSTVTEVRALSINTLVKISKSAGAMLKPHAPKLIPALLESLSVLEPQVLNYLSLRATEQEKAAMDSARLSAAKSSPMMINMCLQYLDVSVLGELVPRLCELIRSGVGLGTKGGCASVIVSLTTQCPQDLTPYSGKLMSALLSGLTDRNSVIQKSCAFAMGHLVRTSRDSSTEKLLQKLNGWYMEKEEPIYKTSCALTIHAIGRYSPDVLKNHAKEVLPLAFLGMHEIADEEKSEKEECNLWTEVWQENVPGSFGGIRLYLQELITITQKALQSQSWKMKAQGAIAMASIAKQTSSLVPPYLGMILTALLQGLAGRTWAGKEELLKAIACVVTACSAELEKSVPNQPSTNEILQAVLKECSKENVKYKIVAISCAADILKATKEDRFQEFSNIVIPLIKKNSLESSGVRTTKNEEENEKEKELQLEYLLGAFESLGKAWPRNAETQRCYRQELCKLMCERLKLSTWKVQLGVLQSMNAFFQGLMLLEEEHADPEAEILLETCKSITYSLENKTYSSVRTEALSVIELLLKKLEESKQWECLTSECRVLLIESLATMEPDSRPELQEKAALLKKTLENLE

SEQ ID NO: 1493 - DNA, 50332 bp, Mus musculus
  misc_feature (1)...(50332): n = A, C, G or T/U
ctccttccttagcattcacttagaaatctcatggaacctaaggagagatcaagtatttctgagaaaaatgtaatgttagttgaagggctgcgagttttgaagacactagagttggataacttcaagcataccaggcaaggcaagggctggagcaatggctcagtaggtgaggggcttacactgcaagcatgagaaccagtgttcaaatccccagcacccatgtacatcttggggaagaatggccagtctgactgtaatctcagctttggggaagcagagatggggattcccgaggccagctgattacttagactagaccagtctgcaagttctgggttcagcaagaggccctgcctcaataaagaagtgggatgtggtcatattcccccacatattttctcactgtctaatccaaaatgtcaacatcaaatacattaaatcaaatatatatatatatatacgtaccacaccagatataccacacacatactacatacacacatccgacaccaaacacacaaacacacagaccacatacacccatagtacacatatagcacgcacatgcacacatagcacacaccacacatcatgcacaccacacacacacaccatatacacatactacttacataccacacacacacacataccataccacacacacaacatgtgcacactatatacacacctcacacacacacacacacacacacacacacacacacacacacacacacatgtgtgtagtccctttcttcccctctcttccttattacttctctcagtatgagtggttctcctaatgtaatgaggactccactaggtcaggtgcctttgcttgctgagtttactcttgtgccccctagcctgggccagcaagctgccctgtgagtgctccataaatgaatgtgtaaattggttcctgtcacagatgggtaaaccaaggcctcaggaagaaaaatgattcattctgggcttcctagtgacaggtcagatggtggctagatctctggtccctgaacccgcactaagtcaggccctgccccaggaaaccttgtgtttatttggatgcctgctccttcataagctggtatgtgtaggcagaatcggtgctgggagactgaaagactgggagactgcagagccagtcctggaatagaaaactaagacgtagtcagtagaacgttggtgctatctgtggggcatgcaaagtaagcaatttgcagtgccagcactgagggctgcagcctctgaattagggtctccttcccccaatggttcaatgaagtaggctgacctccactcctgaactgcatgctgacagagtagtcagacctcaggtccaggatggcagtgctgcttcatatgggtcctggtgggacactgctagggagtcatgggctgagtggtgccctcagattgccatgcagtgacatgttcattttagaagtgtttgctatgtatgtgactggcactgtattctctctaggatagccaaggccaagctggacagtgtacccctataaggggtcctagactggcctgaggttctatcaggccagctcagagtaaagatagtgggaggttagataccagtggttggagctaagctgcaaatggtgaccttttctcccttgtgtcaaccttgataatacctggtaaccaaggtgatatctctccctctctcctctacctcccccttctctttgcatgcatgtgtgagtatttctgtctctctgtctgtctctgtctctttccagttagtcaatcagaatatgggccccagtggctagccccagctatcagttagtgtgtgtccttgttctaatgaatgaatggaggtggcttgggaggcggcagagggaactcaggatctgcctgttgtacctggatctgaatcccaggcctagttctctaagaggagctcttgagtagtgtgacctcaccatcccccggggctcagtttctctgtttgtcacatgagaatgccaatctcatctggaagggttataatataagatggcttcccagtgtctctgccatggtccatgtcatctggcaggcttgtcggctgcacactaccaccactctcctgtgtgttaagctctacccatctccttgattgtcctctgcttcccatgtgtgcacacaaggcctttgcacttgctggttcctcatctctccactgccctgcatctttcttgagtttttttttttctgaaacacctactatttttgttattcaagaaatggatcagtagaaagtatgtacacaagcccacacctgcagctgattccagccatgtgcagctgaacaatgggtatatgttcatgaaatgaattattagctgattctgtcattgtgtacatatcacagtgtgtgtacaacctagaagcccagccttctacacacctaggctatacagtacaaactatttccactagcttcaaatctgcacaccatgctacttattatacagaatagggttggcaattgtaatttatgcatctaaatgaagaaagggtataataaaaagacactaggccatagatatctggctctactgtaattttattagggcttgttcatatgtgcagttcactattgaccaaaacatcattatatagtacatttgtattatatgttatagcaagtgtgcatgcatgaatgcatggaaggggtataaaaacgaagggagaaagatgcacagagagacagatatttatttcaagaattagctcaatggtataaaagatggtaaatcaaaacatccatggctggcagcagactggaagtcagggagagttgatgcagcagttgtgttgctggcagagagcgaaaagtcacttttccttaaaactgtcaggtgattgagacccacccaccctatggagaatgactcattttattcagagcttacctaattaaatattaatcttacctaaaaatacctttatagaaatctctgcaaaaggaggtagcctactaaataaaaggtactggcaaaaatactcacagaataatgaagttatatttatacctttcaccttgtatcaaaccaattcaaacaagatcagagactttagtttaaaactcaaaacactgaaatttacagggaaaatatggggatgcccttcaagatattcagggaggcaagatctttttaaacagaacaccaacacccaagtgtcaatagattgaactccatgaaaaaaaaaagttcctctacaacaaagaaaacaatggcagagttagacaatcacagagtgtgagaaaatctaccaaccacacttcagacaagatgcaaacatccagaatttacaaagaattgcagaaattaaaaacagaaggaataaaactgctggttaaaaatggcaagtggactaaatagacactggaaagaaggaaagaaaggaaggaggaagggagggagggaaggagggagagagagagagagagagagagagagagagagagagagagagagagagagagagagagagagagagagaaatagcatgcctttaatccaagcactcaggggacagaggcaggcagatctctgtgagtttgaggccagcctggtctacagagtgagttccaggatagccagggctatgcagagaaaccctgtctcaaaaaacagtcaatcaaacaaacaaaaagcatattcagtatccctagccaccaggaagatgcatcacagccaccttgtgacaccacctcaccccagtcacaatagctatcatcaacaaatctataacaaatgttggagaggaaatggagagaaaggaatccatattcatattagtggggatgcaaacttatacagacattgtggaaatcattttggagatttctcacaaactttgaaattgaactactatgacccaggtatttccttcctgagcacatacccagagtccataccctgccatagagatattgctaaccacatatttattgctactccattcactatagaaaagaatttgaatcaaactcattgtccaaacagatgaatggatatgaaatttcagtgtatttataaaatgaaatacttctcagctctaaagaaagatgaagtttggaaatttgcaggtaaatggatgggcttaaaatgtatgatattgagtgaaatcactcaatcacagaaacgaaccacatgttctctctcatatgcagaatatggctaataataaatgtatacacataagcacatgtaatgtgcatacaggataaggtgaagaaatgagaacaagaaaggctgaatataagggagggaggaaaaactgagttatgaaagaggatgcaaagctaactgctttctctaattctgtcaaaggctgttgtttacttggtttgggtggttaaaaagtgcataaaatatatccaatactgaaagtgtaaaatttaatgtgaagctccacagcttccgttctgaataccaattctagctgcgtagagtttcattgaactgtacagactttgggtctagttcattttcatgtgtgatgttttatttgcaaggattttttttaaataatgaaagcttatttaaggagagagacatctagagaaatatttcactaaatctctgggacctcagctgagtccatttgacacataatcaccatgtgtctcctccgtgtcatgttggtacctatgtgcatttctttaagccatacgtttgcttcaaataaggacaggggcaagattgtagctctgcttagcatggatcagctgtcgggtgcacaaccaaaactgtaataggctttccacaggagaggatgctaggcagtcatccacttattctttccccttgaagtcttgtaactgctatgatataaagttaagaacacttagacatcaaggtagaggcagttaaggcagctgtgttatatgacaagtggatgagaaagcaaatatatctgagataaatacacacagacatacattcacacttacctctcacacaaaataaacatattcaggcctgggactcttgcctagcatccgcaaagccctggactcaatccccagcaccatgtaaacttttattggtggctcatgtctgtattcctcacatttgggaagtggaggacagagggtcagaagttcaaggtcatcctcagctacatagtgagttcaaggccagccagggttatacaagactatatttatagcaattacagtctctgttgtttggctgaccacacatgatggccttgttactgccccccttctcttctaccatccactctgcatttcctttgctttaacaagaacctccgcttctgaggttcagaacctggccggggacctaaagcaccatttccagggttcatggaaggacttttctgagcgtgagtgctgtcattttccattgattctaatcacagggcatgagagcactgagtcaccagaagaaatcctgtgttctatgactctcttcacccgcaccgtggggaaagcaaaccagttctcttggtgttcaggacccagcctcccactgccctggctgttctgctcgctttgcctgtggacacagaagcatcccgatccaaaataatcaggaggcagcttcactgccgactcagcaggatcagcatggtatctcctccatgctgtgtattaatattttactggtgaatatgtccttctgtgtatgcctagcaggtatgctgtgtgagagtaaggcttttgtctgtgctgaccttgcctaggtggtgctcggtgagcattgtcaacctgcttaggacttcgctgtcatcactctgggctccagtctgagtagaagacctcattggtcatcccagacccttagcctgagagccaggcctgtcccaagagccctaggtccaaatcttcccttcaggtgaccaagtgagcataggcctcaagtctaccatcctattctatcttggactatttactggacttttctggaacaataaacctgtttctagcctcctggcgcctgcctttctccaccatagtagtctgtctgatgacctatttagattccaagcatacatgcaacagacgcctctggctaccttgtgtcccatgagccctagtgaaggggggtggtagaagatgcacagggtttcttggcgaccaggatgactaggactccacacaggcatccagggcgaatgaggccttctactcttctctctgtgtttgttattccatgtcatagccttagcataaacattatcctagtgtgggccactgaggctccttgtgaggaaggtttgttgttctaaggtggctgaaagtagaaggcacagagacctggggaattctgggagttgaagagggaggaagaagtcagggtaatacttcatcctaaagcttgtgcctctgtcaccctggtgtgaaggtcagaggagnnnnnnnnnnnnnnnnnnnnnnnnnnnnnnnnnnnnnnnnnnnnnnnnnnnnnnnnnnnnnnnnnnnnnnnnnnnnnnnnnnnnnnnnnnnnnnnnnnnnnnnnnnnnnnnnnnnnnnnnnnnnnnnnnnnnnnnnnnnnnnnnnnnnnnnnnnnnnnnnnnnnnnnnnnnnnnnnnnnnnnnnnnnnnnnnnnnnnnnnnnnnnnnnnnnnnnnnnnnnnnnnnnnnnnnnnnnnngagggagaagatggggatagagcttcctctgcttgttggaagtaccaggaatgctcacagaagacatactcctaaagtcctgtttgtagtaagccagacatctgaatacctcagcactacctttgagctgtgtagcccatcactccctctgcttctgtggtacccatctgtacatcgccactgtgtctctccttgacaaaacagatgtaggtccccatgagtggtgactaagaggacatgtgccaaatgcccatctcacctctccaaccttcccatcttgggaaggtatttaatgtctctttgctgtgggttgttttttatttttgtttttgttttaatattacattggagcttctgtaaagaataaatgatgaatccgcttaagaagtttgcaatgtgtactaagtgctcaataaagccaggggtctctgtatgaatgtgtgataactcctttgtgagcaggaagtggggagcacataattcagggttgtcatccttctttctgcagtgtttcctgagtatgtgacactggtgacattgaggttcagcagggaacacaaaggcagagtgctgaaccaatcccataggatatgtacctccaaagtggtctgtgcatggggagtctgtggcaggtaccagatcccaccagatacagttaatgtcacaaactagctgaggcatgcagagagctctcaagctgtcaaatggcctggccttggcttcctgtctaaggccccaacagtaaacacccctggctgctttacaaagatccagagaaactgggtatgactgtgcccatagacatcagaaggtcctgcatcgtcagccttttaatccaaggctgggagtcaggctccttggggttcactctgcccagctcactgcatggacttatgcacactctatcctactgcctggaatgctatcccctctcttacattatgaaggcacaaaatgagatcaggggttcataacctggcctccagagtcccagaaatccctgcagcaagagagcattaaatcccaccccgcctcctttatatcagcctttcatttttatctgtttcacattcaaaactccaaatgagattcctttggaagacaacaacaataataacaacaatgaaagaattctccagctaaaagcagtttgaaacctctgtaccagatgagttctaaggaccctctctcccagcaccaagcaagggagatttggagctatttcctcctaggctttatttaacaaacacatactcagagcacacttcatgccaggactgttcttaacaccgtgcagcctggaatatacttaatcccctggaatacctcccggcttcatgaaggctgtgccattggagacctgacttcatgagtcaagcaggatccgggggagacaattaccctccagccaggtctcctggcgcccaggtcgatgacctcaccccaggtcaggtggtgccttggcccaggctgatctaagaagcagcagagcaggtgtgtgcagcagctgggtgtggccacaggaagtccctctgtcttaggccctcagaggaggagagtggatcagctcgacacggacactttcactggaggcatgcaccctgtgggaggaagtgcttgttgccttagcaatgtccacagcagaaaacgtcactgcctcctgtaattcatccccagccaccatgctgccatcgacactctgcaccagatggctgcagatctgatttcagtggtgacagcaaaagcccaggggcctggagaaggctcagacatggggcgagggatctgacctcacctccagccctctcattaaggggagcagtgggggtttgctacagctcatgctatccagttctcttgccactaacagaggggacccaagtgtggccttattgcccgtgtcactgtgttggcctggccctgtatacctatttcaaaagctttttattccgattatctgtcttcatgggaatgtctgccagagccttttagatgtttgtcatcggggcttctaaagtgcctttgaactatgaaggaaacagcaggtccccgggttctaaagcgaaatggagatcacagtgccctcttttccccaggcacaatgctgagagttgtagatgcgagagccagaaaacaaaatgcatttcctgtgttcaggaaactctacctgctgtgaggctggcagttaaaacacaatggaaagctaatatgcacacactggtggaaggaagtgtggtgtatcactcatctctcactgagattgtgctgtgtaacaatggcatgcagagctcagcgtgccagggccagtcgctttgaggctccaccggccttgctggtctcctgggtctggaagttggctatctgtccattggtctgagtgccactggctgtgtaggtttagctctgtgtgtttatcgccttccagcagggtggagtcaaaagcaaagagtatatgaaggggactggcctcagcacataggtgcttcttgggctttcttttgtgatgcttacagccattgtcctattggctgaagcagggccagcatcagaatgtgtgggatcaacaaagccccttggttggccaaaagggtctggggtgccaggatcttgggatgcagactccagctcaagccatatgggtaaagtgtcttccatgccttgggcctcaatttccccatctaaagttggggttcttggccaggccatgtatggtagactgtgcctataaacccaacacttgggtggtaagacgggactgtgagttcaaggcaactgaggctacttgataagaacctgtctcaaataaactaaataaaatggggaagccgaagcagctagtctcccagggcttgtgtataagacaccagtgttctgtgggagacataaccttcaaaggccataagctgcttagaaagtgcctgattccaggaggaaggtgagttgtgtatagcattccaagtgactctggtgcctggaaacagcatccccggagccagtagcccggaaaacagagatagaggatgcatctgctgagtgcatggaaggatgggctccagggatccagctcctgagaccttctgagccttgatataaaactggggttttgtttccttttggttgctgcttggcctcattggagggtgctcttgattgcaaactgggtttgcttgacctagaacacttctaagcaaatgagaacaaaggagtcaagagggagactcactccgaactccaaactcagatggtttgctgtgcatatgccttctatttcacacctgtagccccaccgttccgtgggtggaaggctgatcccagaggccagccagtccatgagcacagccctgatgcccttctttctcctcggccaggtgttgtttgccctgaaccagactctgctgcagcacgaaagtgtgcgggctgggagcctgcaggcaccctacaccacagaggacctcatcaaacactacaactgcggggacctcaatgctgtcatcttcaaccatgacacatcccaggtgaggccctcctctcctcctgccctgacaacctctgcaccaccagctgcaaagacctagagataggcccacatgatcccacctggaatttatcagatgcctactgtatagtgggcatatatatgcttctttccagctataataaataagagctactgttgtctcctttatagaggggaaaactgagactcggagaaagcaagatacttacctaaggctgtacagcttactgttaaattagcaagaacagcaacttgaaccagaagtcccgcagacaggtttataccaagttactatgaaattggccttgtatctatctgtctcaaaaccttcttccttgattcaaatcctcaagctaagattacagacaggctagcaagaccccaagtagggccccaaaggattaaatttggcttgaccctgcccagactttaccatgcctcttcattgatctccaaccaattccagaactcccattcaacattcaaggtcccctaagatgtgccccctggtgaccttgtcacagcctacacctccactccccccagcaccccaagcctgtggaatttggagcttgtttttcagtacctctgagcctttatccaggttcttcctgccctggatttcctccaacttatcatggattaaacttacctactctgaaaaacctccccagtcccctggatggaatcagatacctccgaggcaccagagtttctcccaaggttccctctgttgtgtgtggtattttgatgttcatccactcggaaagcttgcattaggcacagaaggccttgtcccttgtctggacccttgcagtttccattttctcagggcgaaacaagccagcctctgcagtagcctgtgtgttcctcctgttctgtccccgctccagaccccatctcctttatacacaccaggagcaacgtccacatttcatcccaagagcccagctgtatgcttctaccttctcactgactcttccttcagcatagatgcttctgccaggtgccaccacagagcactctcctccatcttcagggatctcccagctccataagactagctccatccactctgtctgaactgcagcctgaacctccccctcccccccccactaaaaaacctcttattactttattatgctccgcttttctcccatggtctggaagaccacctgacacaacatactttcattagtgactacttatcatctggctcttcccactggaacataaactccatgagggcaggatttgggtctatcattcattcatctatcccctctggcaagagcagttcccagactaaagtaagactctgtacatatttgtcaaacaaatgaaatagtttgaaaatctgtgggcacagtgctcaaaggtatatggtggggagccagagaggacaattctcacaaggagattgagagacccaggaaatcattgtctcatatagaaacccttgctctggggatagaagagctgcagctatagcccaatactcattcatagggggctgcagctggggcactaagtaacaattgctacaaagtcagaggccacagaagaacctacattggccgtggacaaaggaggaatgttccagctgtgagcacagtgtgcaagcaagccagagacccaaaggagaggcaatggggagagttctggttggaggccagccaggctggggccacaatgttctgtctgtgcctgccacccaaacccagacacaggctccctgaaggcagggttgagctgctcatcccttggtccccactgctctggagaccacttggcgcctgttgtagagtgcttgccagtgagtgactgtcatgcacatcactgtaggtacataatgtacttagagaagcttagaggatagaaggaggagcccagcccttactgtggaaggctccaggtctggggactctagtctcgaagtggaagagggaggagaagaggccaacactgtgaactgatgggactcttactagggccccacttctggtgagcctcaccctaaatccactaggggcaaggtttgggaggtgacgctacacagcagagaggtcttgatggcaagttgaatagctggctgtgatgcggctggcctgagaaagaagggtggacaggacaaggcctatggctgactataagctggaggagagaggcacagggtgagcttgggggttggtcagctctgtttacctttgagcctatgtccagaaatactgctgacctctgatagcagtagccatgtccccagtaattgcaaatggtctagccagatttgaatcatagtccaggctctatatggagttcacagaaaacctgccctactgtgcagaaagccagggtcatgagacttggacactatccttgcacatccttctatgtgaagctctatcggcagccagaggcctcaacagtcttgaggtctggagatctggaagctttagggcttgtcaccctgctgaggtcaggaagacttcagggcaatcataaagtaggaactaagcttgttagtggagcttcccaggtgagaagctgacaggggggtctgacggatgtctccagagggcatggtttgcataacagagaacaaatatagctctggctgcagtggtgagattgataaagtaacctttggcagccaggatggaacagggcctgaggcccagtgccccttacccactaactgtatacctcctcactcctccatccccgtcctcagcaatgagtgctccctgatgctacagctgcaggccactggcattgttagtattcataatgggagggccactcagaagtcctccctgagaaacctgtggtccctacccccctgaggggcacagtagccacagatatgttttattcaaatagtatacagtaaaatattattacttagagtcaagataattgataggagtgcagcaatctccttcaaccataaacctgggctgacccagatgaaccagaccacataatcatacttcaaggcccctctgtgaaccctgcttccctccctgccctctcccactgcatatcccgtagttcttacaagaatggctgactcttccatgggcctaggagtctcaggggagacagcaaagggtgctgaggtagcctctagcctgacatggggcaggacctagggaggctctcagagggtatttgctgggtagatgggtactgggaaatgggtagttgagtataatcaacagacctgggcacttggctatccctagccacaggtcaggggagcctacactgaacccctcccccataacttcaccccagccctgcctagaccgtatctttgtcaccccatcacacaccaatctctctcgaactctagggacattccatgatctattggaaatgttatcatatgccctccacttaaacttgtcatgggagatttaaggccccagacaagtctaatgacatcattaatttgcttctcccccagccctggcccagacccaggccccatccttggcatggggccaaagcccatcatcatgagactctaagagagtgctaggcagtggctgggaagcccaggggaagctgaatatccagtcctacttcttcatggttttgaagtttcactctttcttgttcttataaatagctcaagtctccctggggaatccttatgcagatgcactttgtgggcaggaagcagagcaggaaggaggggtacctgctcatagatcccatgatccacagaagaaagaaggggatcaggtcctcttccttcacttctgtctgatagttctaatgaccatctgtcatctctgtaggccacctgtccctgataacccatagcatcacatgaaggtgacaatgcaggatgccattacacatatattgtgtgtgtatgtgatgcatatatatatatggctatattcacagtgccttactgtgctagcatctttcaaagctggtctcattgaatccatgtaaaagtcatgtatgtcaccctgttaccaatgaagaatgtgggactcagagagaccacataacctagagtgcaccaggcaatgaaaggtacaacccaagctgcactggctgtgtgactgcaggacctgtgctcatcaacactcttcctcaactgccaatcatcctgctcatccatccacttgttcagtgacttaacaaacactaacatgtagtaaagcttggcctcctatcctctcccaaaccccataaatggagaagagcctttgagaggcgtgtttctggaaatagtccttctagtcatagcctctctgttctccaccctgactcaaaaatctttagcatctcctggaactacatcaagtcaagtgtgacctatttcatcagagctgccagtcatcccttccagtgtggaggaggataagaactccattccctcatttgtctatctgccaagcaagcagtctctgggtgccagctctgtactggcctaggcatgagcagggctgctgtgcacattgtacacattgtgcactactcaggctgagacaatcacatcacttccttctccatcccagagcagtgggtccggctcctctgacaaaggagctgtaagatgcagatactcttactatccatttctctcacttgttcttggcagagcagaggcagatgtcctgccctcctcacaaaccctcagggttcaggctgttgactcccccatctttctcagaaaggatgttgataactcctctgtggctgtaaaaaaaaaaaaaaaaaaaaaaaacatgtgcttgggttaaaaagccataaaaattggctttcctaggggactaagatctctaggaagttggtgtcgttgggtacaacctcccctcatgtttcagtccagactagtattttatggtttgtacttagttaggtgacaatgaggaatgtcctatgaacaggagcttgaaggatgctatgcatggggaatggagaggaaagacagtgtgatttcattcactgccttactttccccagcagctccatgcacatgttgaaggagatggtgctagaatggctggacctaccttccaggccagagagatgaaacaataaaaacacaacaacccagaaggggcagtgcaatcttacattcacatttgacccctgataggcatcttttatgtagcaggccctggggacttggaatgacccgactttgtccttaaactcaaggatccctctgcctagtttaagagcacatccacagagctgttgccaggcctcaggctgtgtggaaagtgacacagtagggagagaaaaggacccagaactgtaaagatggacaatctctaggcagcttatcccacaagcatcagtctggaaggatctgtgatcctgggatagttttcaagaagtttctgaaaatttgaagacagatgggcagacagtggctcagacatgggaaaaggtgaaagttctgccctgctcatctctgtagagcaaagcgctgaataaggccacagtagtgaccctcatctcctttaatccctcccatcagtccttcctacaaatgagagtcagggctcagcaaagtggagtggcttggtcactatacgctgtatcagaactgaatccaaagctcaagtcaccttcaccccaagccctatggccttctcgacatagctgtcattctcaccctcttgttgaattgggttccttgtccacgtagtgctggattcagggctgaaggaaggacataaggaacccagcatagtcccaacaccctgggtcccaacctccagagaaataccaggcagacctgggtgtagctccactatacactggctgtgaccacaggtctcaagctctttctctctcaggcttgcttcacatgtacaacggtagcagtgctcatctttgagggtatgagggttgatgataaacaggaaacagagagcatgctctagggcttcagaaaggtaagtcgacagtcctacctggggtttatctgacatgtgccctgccacatcaagacctaaaggacctgtcttaccattgcagctacccaacttcatcaacaccaccctcccacctcatgagcaggtgacagcccaggaaatcgacagctacttccggcaggagctcatctacaagaggaatgagcgcatgggaaagagggtcatggcgctgctgcaggaaaaccaggacaagatctgcttctttgccttcggagcaggtttggctctgacctctacttgtcaagggaaaagctgaggcccagaagagggtatgaaagccacatagtacccagtagcagagctagaaccctagtgcttccccagcttctgaatcacgtgttctctcatagcatctcccttggcaagggaagcaccccctgcccagtacaggttaactttctcagctccttcaagtaccaggtggatatatgtgagacccaaacaatctttccgttctcatccaagtctggacccactcaacctagaaccagggctaatcagaagggtctgtggcctcatgagtgaggaagggagacagcccacagttgtaactccaactccaacagggccatatgtcatgtcaccttagctggtactttctcaaaagttcaatttttctcttctattaatgggaaggacagcatcaacgatttgatgaatgtaaagtatccaagctatagtgtagctgtaaggatgagtgacatttaaataaccttacatatggtggggacccagaatggcacttgcaatcatcattatcactatcatcatcacaattataatgaaccatggcaacatagtgatgcttagcatgagctaaatgtttctggggatttttcttctcctgcaaagggatcagaagatgtctacacagggctccttggggcccttagtctctgttcctctttacccttcctgcttttctctggctgtctccaatggctgtattggagccaggattgtatgcaagttctgagttagtcaattttggatctgtgatttataataactatttacttgctgccacttaaatgtgtggaatccacctgtgttctgtgaaaattttaaaataacttacagctgggtgtgatgatgtacacccatagtccaaaccctctggacaaataggcaggtagatctctgaggccagcctggcctgactagtaagttcaaagtcagccagagatatagagtaagccctatctcagacaaacaagatggcagcttatagatcagtccactgctctgcctctcttcctatagcctttacctacacccttcaggccaagcagtcagtccaaaccacacgggcccctgtgaatatttagactctgtaaacggggctgtccacagtctatctctgtgcctcctctgcccccgttcagctccaaggatgttgagagtcagagttgggagtatatttatccaagctgttttccccacttgtgaatctccatcaaagtgaggctcataggagaatctcagacatggatgcaggcccttggaaaatagctcataaaggccatggaaactgcatagagagagagctctgccccctcaatgactggtatggtccactgcaggctccagcaggtcttcttccctcttataccctcagtttgctcacttagacagaaggctctggctttgacttgaattgtcttggattacaggctgtctagaattctggcacaggtgtaagggacaggtggggcctcccagggtatctgtgaggggccttctgaaggaacccacaagaacagaacctatactaatacatggagatgggagtatcactctccgtcttacagaatatctgcagggtccctagtgtgagccatgtagccatgaggacttgtacaaaggagtggcccctcagcacctcttctctcagttgccaccagccacctctaggcagtgtgttttgtactaagtggccttaagtggatgcagtatggcagccactggagtcccctagctccctagttactcggagagagcacaatcactgagggaagccagtgacagagcaggatgcccctcaagaacaggcccaagatgatggtggtctttgcaccagctttctgctatggctgaggaagctgagaacctaaagatacagaacactgaccttctcgcgatgctccaagtccacagggcacagcagtccacttaagctctctttcgaatcaaagcatcctggaaaacaaaattgttaggggtagcagcaggaagggatctcaaggcccttacttggcagcattaaaaactggtagctatgtttagtcccacatccatccacattgcttttatatgggaaacagtttggcagagtaaaagagatgagggaccgggtgctgccaagtttaaggcaacttctatggcctttttaaagcctcattacctaagtgaggtggctgaagccgccagtatagaaagagggattcgaaaagggtattagaggaaggactagaggaaagggagagagttgatctccaggcagaagagggcagctcctcagctaaagcgtgtatgagcaggtagctgatgacttccaaccaagtccactctttcagctgaaggtgaagttgagaaggaccgttggtttgaaaaggggaaagcatttgacataaatacaagagaagctgggacaggaagttcggatggaattaactcttgggccatttgtgattaattgctatcatgtgtctagagtgtgacgctctaaaaatgtacatcagagcctagcataaaagagtcctcctgacccatctgtaatgtctcctgggacagagattccagcaggtgcctgtcatgcacttgcttcctctgctggcagcgaaggcccataaccctgacaagtggcaggttgttaggatttctctagcagcacccaacaactagaatttaaagatgggcactgtacccagctgcctcctgtgtgtacctgcacactgcctgctcagtgaccatcctcatgcatgtgcagtatatcacggcagggcccacagtttcaaagacacagtgaaccaaatcatacagaattgagtatcgtccattcatttccattcagccccagggcatctcttgagagaggggggaggggggcttagacctcagcactaggagggaatggcaatgttagccttcgttctaggaaaaaaagattttcttggtctgtttatttgttcagccacccaaggatcttgtagcatttttttcaataataaaatgcatgattcaagaactggaggagttaaattggaatccagcatgagtcaccagcaggttgtggggtggggaaacaggtaacctctggggcccattcatttccaactctagcagttggaagttgtccgtttctgtgtccctagtataatatagtgtgaatagaactccaacttctggcacttcacagtcctgggacctcagcgttctattgctctaattgcctggttgcaatatcctggctctctagtcttgtagcattccagcattccagcatggtttgtttcaattgttcttggagacttgggagtactgtggagccttgcagaacctggacatgccttccagggcagccaccaactgccccacaggaagcaaagtccagacagaaggcaggcagagtcagagacaagaacctattgctctgagtattgggacatccgggacactcggtcttaggctgctgaatggcattcagaaccacactcacggccctgaggcaggaagacattagtggtaaagatttaaacttcatggaaaggagatgtgtcattagcacaccttagctaaaggcagttgtattggctgagatatagctcaaagataaagcatttgccttgcgttaatccagcaccacccaaaatgaatgaatcaatgaatgaatgagtgaatgaagcaactgcttcctgtatactgtcgtgcttgtgcttgacaatccactcatacaaccatcatgctcaaggcctcctgtaaggataggatagcccttttgtttcttggtagacaggaggagatcacacaggaaacatgagagccccatagctctagtgaggtaatggtgattactttgttggggtggcctggctccccaaaatacccagctgatgcttgagccctctgtcctaagctcccacagcgtcctggaacttcattctcacactctgctcaagcgctgtcatctctcagctcaagcgctgtcatctctcagctcaagttgcaccccagaacttaagatgttcatccctccattgctgaatgaataaatgaataaatgaatgaatgaatgaatgaatgaatgtgatgcccttaggtatgcaaagcagaagtgccagccactcctatgttacccaaaaaacatctgaatcagaacctaagtctctaccccatggtaggaattaggggctctggcaacactacatctaccttttggaaggtgagaatacagtaacaaataaaaggtatgagaactcactagaaagtgagtcctaggtcccaatgagcaagccacacaggctgaggcaggaggcaaaggcttaaagctaagcagggtttcttgggggaggggttgcaaatggtgagaaaaaaaatctgtgagaaaagtaagccacagcaagagttaactcagggccatgagggtgagaaagggaaacagagctgggtgacatggaaacaaacagctggccttctgagatattcctgtagtcttcccagagtcctttccactccctctgcacaagggacccacaagaggtgaggcattgggttcctttcttcatcccacatcccatgcttgttggcagaggttgactcagagaagggttcctagagaaagtgagagctggttgagggatccctaatgcatgtccagaggcccgctggtttttctcatcatccatagccctcaagacaagacccatccttccctgcatttcacctgcttcctctactcaccgcctttgggacagaagcccctcggagctcacagatgatccaaggacagccagccagtctggaatggaggctgaactcccaagtagtttcttcccctcatctacagcacgcacgtttgacctgcttcccaacacaaacatgaggctacaccttccagaagtgcttcagacagtgctgaaaagagcactgtcaccccactccacacatgcatctagagctgccatcttgggaatggccagagccattcccactcaactcagagcaacctggcaggcagagcaatactctcttctggcttgtgcctagttagccttcccttgaacaggaagtcaataggaactgtaggccatgtacccccaggttgtctccagggctgtgctgtcactagaagatctgagactcccagctatgggctcagctgaatagtgccaggaaagcaagagaggaaagtgatagactagagtgtggcctttgaaactaggctgtaggacaccccagatttcccctgagaagtagctctggatggtcagcaccttcatttctcctggtctcagagtcccctctgtaagtggcctgagagcccatgagtagcacatgagtgagtggctcattgccagacacagcttaaatagcctgtcactggcaatagaaccttgtatggccactacttctcctgggtccctggttcctccaagtctacaatgctccaagaacagggttcatttcacaccagatgaagagctagaagaattctgtagcactgcatggagatctcaagaacttaggttggtgttaagtaagagtgaggctcagggcagtatctttgagttttattgctgtgaagggacaacgtgatcacagcaactcttataaaggaaaacattagttggggatggcttatagtttcagagatttagtccattatcatcatggtgagaaacatgggtgataaccagcagacatggtgctggagaggcagctgcgaggtctacatcttgatccatagacagtagaaggagactgtgtcactggacatagcttgagtataggagatctaaaagccctccccccacccccagtgacaaacttcctccaacaaggccataccccctaatagtgatactctctatgggccaagcattcaaatacatgagtctgggggagggggaggggatagctattcaaaccaccacaaacaggatgagcctctgtccctaaatatgtctctagccaacaggaggtcctagaccctgggatactgaacctcaggaaaagccagggattacagagagtgattgtcccaatcatagctgggacccaaactcatgaaggctattacgaatcccaccctagactagcctggacagacacagcagtcattgcctgtgtctgtggtcatctggcaccagagggaagagggccatggctgattcttcttggcctcccacagcctagcatgcattagatgcctgcaaaagttccaggacacaggctgttccaaataggagcctccccagagcctggaggctgggcactgtctgtgcagctaccctcaaaagtgccttgctatggacacacctgagccatggctaggcatagacccagctctgccttttatacctgtgtgacatgggcaagttggactattgagtagctgaaagagaaaattaatccaaacacggcaggcacattctgcctgcaggcagtttgtcacccagggtgtttgtgtccacctttgccacagtgatggcaaagcagagtcagtctttcatccatccctgtttcattttttattcccggcatcccagaagcttccacacaggagcacagagcgaaggctactaaaaggaaaggggctgtggctccatccctgcatcaccaactcccgaggatgtccttgtttcccgtgccacacctcaggaagcagagcacttctccaaccctgtcagacaattgctagggaaaatgctgtctggtcccttctagagtctgccctcttaccatcctggggcagtcagaattccacagcttgtccctcctgccccagtgctcacagtaccttccccctcctctttctctttatattcaactgcaggaccagtcgctattggcatcttctcttccctctgtgacattccctggtgctgtgcctccacagctaccctctccatccttcctacctcctcattccctgatccctgtgccccttcatcactgttctgtgtgtacctatctctcccttgggtagacaccacagtgcgtctcagaacctggcatgaagctagctactcagaccatgtcaagtctgtccccaatgaactgagaaggctcagccttttgctgtgtgactgcagagcaggagaggaagcccaggtcagccaggtcccctccacacagctctggatagactagaagccctggtgcccctcattatccacccctcctgtcacacttcctagggaaaacaaacatggctctggtttgatatccggccggaggccctggcagtgagattcgcatttgaaagtttcccttgcattaatttcagacggaacataaatacggacttgggatgcctcttccaggaggggaaaactggaaacccgcatgctcactggagagaaaacatgtgtgctggccgaaggcacccgcgttactctggagcctgtgcgggggaaacatctggtcctctcctcctccgccacccagcccccactgcagtcttgaaattgcccagttaattggcgcattgttcatgctgagcacttgacacactttctctccaatctgctgaaccttggaaggtacacacatttctgaccattccctgcccccaaccatgatcttggcatctctgcagctgccaagtacttcagagtagacgtgatggagcttgccatgaactggatcagttctggggatgagccccaaaaagccttacctcgtaccagcatgtgaccttgggcaagtcctattccccttgctgagcctcagtttcctcatctataaagtgggagcaccttcagtggctacttgaggatgaaatggaacagtgtggtctggaagcttctaaatgtattaaggtcaccaccaggtgaaaccatacagtgtgggggatggggaggatggaagccagatggtacaactgcatttggggaagctgagtcacaaagagggaaaggaaactacccaaggccacagggttcatggatgggctgagtattgtgcccaggctctgccatgccctacctacccatgccagagggtcaggtgggactggcagactatgctctctgtcctccaagccttgtgcactggcacagcccatcatacacccagaagaaaggaacctcttctcaactctggaacaccctaccacccctttcctgtttgtatgtagatgtctgtaagtggcccctggtttgtcttcaggagacaagtccagccttgccccatggtgttgaagcctgaatgttcctgatgaccatctaatgctgtccatcctgggaccatctctgcactgcatcctttgctgccaactctggtcctctctctcctggcttctttcttttccattctctatgtgggtttcatccaatctctgtcctatcatattctttcccccacccccattcccatctggctatctttcctcttccctcttctccccctgaagttgttaccacatctcttacagctggtctctggcctctcttctctgcccttttcttttgcttcctaggtcctaaagttctctcctccccactcccattttccccctgtaatagatagtccctctgcttttcttcctacttccctctttgtgtctccttagctccctgtgccccgccctctctttcctcttctgttgtcctctctggactcagcaaatgaaatggaacgtgtcttcctgcagagagctggccagagaacagctggaagctaatgctggagggagatgctgagtggtggccaggagccccagggaggatgggcaagccaagcaggctgagccccaacattgtggggcccctttggaaaccttccaccaccttgcctgcaggttccagcatgggggtggtgccttgttcagaatttccaactttggagacaagcctaagcactgtctgccaacccctggggacagcatatgctggaccctgactctggcctgtataggggccaagctcctaggattggtgggatcttgaggagagtcaccaagggccagggctgggctacaagaatgggggaaacttgggtctcctggggacagggtgagatcatggaaaggatgtggagtaaaaggctgtgtcactcattcattcaacaaacatttgtggagccatggtggtgcgccagatttgggcttaactctggggacaaagatgaatcaggcacggccccaccctcagaaagcttatatcccacctccacccccatcaggtggctctgtgagagcactcacagagttactcagatcagggctgtgggcaggtcaggttagctgtagttggaagggacagaagagcactgcagtgtggctgcaggtggtggtggctggatggtccagtatatttgagaggaaacattcagggtctctgttgactgggggaggatgaaggtcacggtagcttgagtagcaatgtccagtagaggcacagtaatagcatggaggagggtaagcagggttagtgagctccgtgggagggttatgtggagatgtccatgggccactgagttagtcatcactactgtgggtagcagaggtatgagtagaacagagaggaaagaggccaagggcaggtttcacagctcctgtttggactgggaaaaagaaagcccactaagggtgtcaccagatgagtaaggacacgatgacaagggcacagaccagtaggaggcttgggcactaagaagctccaactgtggatctcatgagaccaagcaccagaaagggtaaatgtcaggaacactggctgggattcaggattacatcactgagttctgggcacagatgatatagaagggtcgttcctagagttgacaaggagcatagaggagaagtaccattctcccaggaggaaggatgagagggggagagaagagtgtggctcagaggaggagatggtggaaatttgagctagacctgctcgctttctctaagtatccccagactaaggaaagcaatccaattcagaaaccttaagattgagggagtgccagggttcttaagcagacatgggagacacccagagctcacaacaaagcagcatcccttgaggtctacaccacagaaaccacatagagttatgccaagcctgggccctctgacaatccacagtatagcctcggacagtcagtgggtgtcacctgcttctcctggacatcatacaatttggagttttcactgatagctcttgaagacttctgggcagatgtggggacctcagttggaccattggagcttatcattaaagccagttctccatatacaaagagggggacttacctcattgtccagagcaggggccattagtacctggcagagtccttcctcctgagcattgaagagagtacccactgctctcttccagctcaacagagccaaatgagggtgataactcctacctatccagggacagtttcagctcccttaatatagcatccttgccaaggacttttactccccctgcctctctaggctgaagagctacaggctcatttgacatttgtggggaaagacaccagtgtcaggaaagctaggatcgtaggctgtcttagttggtttccatttctgtagtaaagcactgtgaccaaaagcaacctaggggaagaaagggtttgtcttacatttccgggtaacagttcattgcccagaaagggtagggcagaaactggaggcaggaactgaagtagagaccatggaagaatgctgctttctggcttacttggtttgctttcttatccaacccacagcctcctgcccaaggttgatacctcacacagtgggctgagccctgctgtattaattatcaaaaataaatttttaaaagccccacagacatgcccacagatcaatctaatctgatgaaggccatactcctttgaagttctctcttctcaggtgactctggtctgtgtggagttgaaagaatcgagccagcacacaggctgagggagagatgaggggcttgttgtcagcatgccaggtcaaagtcagaatctgtgcgtcacagttctcacctgtgcgtcacagttcactcctgtgcgtcacagttcactcctgtgcgtcacagttcactcctgcgcttctgtctctcctgcatagagacccctgcctgcctcgttcctcctccagttgcacacactgccctccacctggacctctcaccccaccccattcccatccccacctagtagcactgcctcctccaggaagtcttccctgtcaccacattattgtagatgtctcacacacctgcacaacttcctgcggtgtcctatgcattcgagatagtgccctgatcctaagagccagaatctgagacagaggagccgcactaggactgtcatcaccatccaagcatgggctatgcaatagtcagtgttcactaaaccaatggcattagtgtatgagaagagagagagtcaaggagaaaagaaaaaagaggaaatgaggggggaggaaagggaaaggggagggaagaaaagcaatggaaggagggagggaaagggaaggagggaggaagaaaggggaaacatcttttcaggggatcttgaataaaacaaaaccttctcctatggaccacgggctagggaagcctatgttcatcctgcatttcaatccctccctctgacagagaaaactgagactctgggaggtaccctatgcacccaagcgttcagaggaagtatagcacaggctgggatagcactcctggcatcctcccctgtagtgatatttcaagtaatgtccaggtagaaccgcaggagctctgactggccagctagggaaatatggctgtgtgtcaagctagaggaccagaaggttgagggtggcccctttgctccaaccactgtgcagggcaggtcccgcagactccctctgactcgggagattgtctgttcctgccagcttgaccactgtgtcctctgcctccccggggctgtcagtgtgctcaccttcctgcttctcacatggcaccactcatcacaagccatcagagtcgggggacagtgattaaattcctgcttcaatgcccaggatctgaactaaatgtaagcagaaaggtgctgttacctgtggggccatgaggcagactcagtatcgagagagcctggagcaaagggcaacccaaagtgctcatatgacaaagactgaggccaagagggagagagaggacagggcctaacccaggcagttactgcatccacagtcacttggcctccacaggactctcctaatcacaggctaaaatgtacaggcatcttgcctgtaccctggtgaggggaggccacccccccttcttctgggccctgggctgaattatccacctgtgtatgtatggtatctcatacaaaacagatgtactacaaatgcttgctgagaaaatgaatagtacctgagaggtgagatggaaatcacacacacacacacacacacatacacacatacccttctggaggccatctcagaaggcacctcctctaggtcactgtcaatatctgccaggtcctacattcaggagggtttatggcttctctagtatctggacctccatgggtagatggtgaagaaatgaatctagatgcttagatccacccagcacatgctaagcatgtgtaagaccctggccatgtgtaaggctgtggcaaggtggcctctgccccctggagggctctcagggaactgaggaaaggaggtatgagttgctggaagcatttacaaggaggagccatagatctgctagagcctttcatgactgttgtaggctccccactccaagtgagcaggcactagggttagcttagtagcattaggcacagtcatgaaattggcagcatttgggagccattactgtacactagcccctgttctctggagtcctcacaggctagagcaggtagttataatcacttccactttacaggtgaggaaactggagcatgcagaggtacaacctgtgagtatcagggctgggttgtggatacaggcagggcggaccaagtgtacatctgagatacaatacttggattcgaagaaaccctattgctaaagtctaggcattctacgtctcaatacccgtcctgaagaccattgggggacctccactggtataattcattagctcagtcagaaacccaagggataaccatctatcttttggatgacaacctggcatatggctgagaccacactgcatcttatgttctaggtcactttctggggaacaacactgtcatcgatgtcctaagacaggcagggctggaggtggaccacacacctgctgggcaagccatccacgggtaagcatcagggtacatgttggcatttggagcaggctttcacactgctgcctgactgcaagctatggtcactgcccatgatgacctgctcaggcctaagggtagagctgtgaaacagactgcgtgttctcgtgagaacaaactgaaccaggcattggagtgctagacagagggaggctgatatgcagttgtgttgggatctcctggtgcagtgggaacaggaacagaatgtggaataacaaatcttgatgttcggatacaaatagattggacaggggcgtaggtgacttcagttataccttagaaagtcaatggacaaacaggccctgaatgaagatggggccatgggatgaagaggctacagtttggtttattccctgtgtccatccccactgcatgctgcccctcccattcatggtcctttgcttcctgcctgaacctgctctgttgcttcctcgggctgaaccccttcctgccagtacactcccactctgcctagagagccactctcccaacctctttctgtgtgagtccctattctacctcaccccgccagtccccactctgacttttcccacggatggggatcagctctgcctagctgagcatctatagcaccaacatcaggcaataaccaggctcgagatctcagatcccctgaaactctcagttcaagtgtcaggctcctcaaactcagagattcatgctccagtctttatgtaggaaccttctcaccagcccacaagagtggcctcattgtgaattcaacctctgtccttatggttacaggacccaaagtctgaaggcggctttctttaatcacagccaagcaggcaagtggtattggctgctgactctgcatagggcttcaggtgcttctaactcatggtcagagcctggcaaggcaggaactatgaatattcctgatgtttttgggacatctgaacctaacatgaattcacctgcagggcatatttgtatgacagtcccgagagcacagaccgctccataccataccacctagttctacgtgacttctgtggggatttatgaaccctagtggtgggagctctgctgttttggagggggctagggcagggggaggggatggaggtagccttaggtcaaggcactcctctagtcctctagtcctctcctattctctcacttcaccttctgcctacaccccagaggacattccgcttgaagctcattgtgtgtggtcaggcaaggcaggggaggtgggcaggcttctattcatcttggagctcaggcattagaggaggagatccctcctctgcccccatggcctcgctggaggctccgttcagaggattctcagcctctgtctcctgtacagggaacgaagtaactggcagggcagagggggtggaaatactgtggaggcaacaacaataaaagccatccttggccacaggtgcttcctgtagctatctttttgtctgactgttttgaattatctcctcaacagctgcagcatctccaatagcttagaccctgggagtctggagttgccatgggggttgggagaggatgagctgagccatgtcctttttctcttcaaagagagtgaagcccctcacccactcacggctgcagtgtgtggaggggaggacaggctgctttcagtcctgggtaccacctccctcacaagatgtttgcttggacacaattcctaaaatcactcccaaccctccagggccagatgtccccgaggaattccttttgggccacagaaagcaagaataaaaggaagaatgtctgcagaatgagaagcatatccgacttagagcacaaattccacaaacatgactaagtgacccttgagggcttgcatagtcaggttcctttgctgggtggctcacgtcagagacgtttggtaggcaccagacactgggctgggtcctcagctcattcacacccatgccattctgatgaagtaggcaacagtattcctccatcccctttcttccccagagcactgctcatacatattctgggccatgagctgttacatgggttgtagactgtatctatcagccttcagtttgagctcagtgacttagccctgtttccacctccattcaaaagatgatcaatatacatccagtgcacagacagctggatgaattgataacacgtgcagcctgattagcattaactattcaatgtcctgggctgcctactactgccagacactattctaagcccttcatctatattcgcctataacctcacggtgtcccccggaggtacaaaccatcacgtccccactttacaggaaactgaggcacagcaaagttagataagtctcctagaatccctctgtcagaaatattgccgagtgaaaccgtgaccaagttcaaatatgagcacagacctcattttacacccattcctctgctcttgcgcctaatctctgctatgtgttggtgctctcctcagcggtgtggccaactgatagcctgtgtgttttactctgtcctcgctgtaggtatgagctgtaggcaggggttgggggcatctgtttaagtcactgctgatagtttcagaagaaaatgctagctgtggggagtctatggactaaaagatgaaaaaaaattaatcaatgttctgtctctatagcagacagtggttcccctgggtccctccagcctatcccagcagggaaactctggagtcccttggccttgaagacatcccctctgcgttcccttgtacacatggcacactcacattctgttcccctttgcagtcctgctgctgttggaagcccagctccccctcctgagatcacctctcctgccagcccagctccagcaaccccagccgctgcagtcccagaagcaacctcagcgacccccaccacccctcctgaggaggaagacccagtcctgtccccacacctcttgctccccgacagcctaagccagctagaggagttcggaaggcagaagtggcgaaagagactaaataaacatcagcggccaaggcagttcaatgacctctgggtccgaatcgaggacaggtgagcaggcggggggggggggggagcttgtctaggagctcgttgtcagcctctcctatggcttagtgcactgccacaggccctgctctgagcaagaagggacagagatgtcagagtggacacttagaggcaggctctcccctgactcctgaggatctccatgggcattttgggggtgtatagaacatgttcccatctctctttggtgctttattgtcagcatatgagcaggtagaattctctacagtttaaaagtggcatgagcctgtgacgctggctcaagaagataacaagttcaagaccagcctgggcaattagtgagaatctatctcaacattaaaagtagaaaataatctgatgatgaaacatcacaatacagtacctgcctagtatgtacaaggccctggcctcaacccctagaactactggttaattaatcagttaattgattaaagttaaaatgaagaagtggacacttcctctggtgccactagcaaaagtctgccatgccaggcctgcacctgactcgtgtgccatggactggaggtgaaagcaggagcaaacatggcaggctgggtatctcggaagatgtcagacccctatgctggaaagtgtgagcagtgtcactatagcagggagattctggagggccccaccctatgaaagaaaagagtactaggccatgcatgctgtggctcatgtgttactatgagccctgcttaagcaggcaggtacagaacacatcctgaggtgctacccccccttccacatgcccctcctgtcaacaacacctcctgcctcgggctgacaccaaggctcccattgctccaagattgtctgtcttcccctctcctactcagtttctctccagagcaatctctaagttagtgtggcagaaatctctacatatagtgaaaactgtcactagggaatgtctgaagaagggaccagggtcctttccactgtaatagtgagtcctggatctgatgcttagactgtggaacctcagaacccagagtctctgtctggatcttaataccatccagttgtgcagttatgaacatgagccaatgtctggagccaaaggtacaatcctaggcctcccagggaaccagaaactgactgataccttctacttcctggctcttctacagccaggtagctgagctagtgacaaaagattgatgtagtccaggtcctgtcacaaaagcatggcatgctctatcataaaaagactgacaatgagtaggcatcaaagcccctgagcatttaggcattggtgcaagtgcctccctgggctgctggagaatgtagttctgcagtgacctcatcaaacctactccaatggcagagccatcactaagcgccagagacacactaaaatcagatgcccggtatgggctacccagcctaactaggtacaggaacctagagttttagagagctgcatccttcagttgtggggaagtttgcaggctaccagcagtccactagaagctccaaacagtctgattagtcaaagttcaggtcagtagaggaatctaactcatggagtaacagggggctaggctgtcagctccagcaaagagtccccagcctctaactgtatctgaaagcaaaatgtagtcaaatgacattgggcagtttcctttttacaacatgggatctggaaaacagaccctggcttcagggaaagaaagcagcttttctttggcagtggggagcctcctccaccccaacaggtaaaactgaggttggctgacacaccttcctctgctcaggctgggagagaagactccaccagagagcagtttgttaaagcttttcactgcttcttggaaaagagcgggtcctgtgctctccaggaagcccaagtacacggcacaggctcccacactcaaaagctttcttccaccttcccagagtcccccaatctccagttttctgagacagagcagaggacaagatggagctcatgtgcagcccttctgacaagccacctttcttagaactttgctatattccgcttctcactctgttcctaaatccaacgagagcccgccctcacccctgcctcttcctgcacatcttccacctacactcccacagcagggcccctaaggggactctggtctctggcctcaccttgcacacctcattgatcagtagcaatcctgaaatggcccacaaggatgcttgcctgctttggggctctcacatccttttctgccttccacctccactggatcctcaccaggctacatgccctcataggctatgccttgtcccctctaccaaattgttcttgcttctctctgcttagggtggcacaccagtgggcccttgtaaagctcccactgtgctacttacacccattgcattgcatcgcagctccatcaggagtcacagagagcaggcctgttttgcagggaaggactcagagtcatccagatcagtgaacgtgctaaatgacagactcagaactgtcacccaggtctaactctaggttcatgtttgtcacccaccatctaagtgttctcatctgcacctggccaagctctcccatctgccctagcctcccatgggagcccttgtcttgacaccattgccaacaggacatttctttgcctttgtttctagactgggggatcctgagcatagatctggtttggatggcttcaggtacgggcctcactaggggaagtgtctttgactgtacacttgagcctaaggaagagggaatcagggatgcagagtgtgagtgcctgcctgggacaccacctggagcaggctggcctcccttcacccctcattaccccaagatgtaaacatggtgaaggaagtttagagtagcagccgcctgtggcaggatgatttatggggacccgtggagagggctggtgtgtccacagatggatgaatggcagcagagtgttcacaggaatctcttacctctgagcaccagatagacaggcagcagggaaaggtgtgagcagggcaagccaaggcagagaccattcctgtaaaacatgggcctatgacaatcctggtaacaccttctgctgcattagggccttgactagtttcaggaggttatggcaactctcgttctccatgtccccaggtctttaagcacacaagagtgtgtgtgtgtgtgtgcgtgtgtgtgtgtgtgtgtgtgtgtgtgtgtgtgtgtgtgtgtgtatgtatgtatgtatgtatgtatgtatgtatgtatgtatgtgtgtgtgtttgtaagagagaggggagggacagagggaaggagagacacagtgagaaataaggaggtgcagtggctggcacgtctgagttggaagcatatgttgaggatgcacagatatagagaagagaggaccttctgactcctgggtattggttaaagccaggctcagagacgagcattagtatgtgatagacagaaccttggtaagcaacactaggcaagtacaggccatccaaggtgcacatgtcaaagctctcgaagatgggaggaggcacagtacctctccagaagggctctgcaggcctcctgtcctccacggtccccccactcagggcattctcacattcttcacaatgtggggtggcccagggtagctacagtgtccttgcgaggccagaaccccatctgaactaccctgtgaggattggagaatgaagtcattcaattatttaaaaaaaaaaaatctctggaagaaccagacagagtagtgctgcagtcccactccacagggctctgacagcacaaagatgctggtaaagcctgtatcagtccagcattgaccctggcatagctactactaacattgttacttccagaatctctggtctggaatgtctcaggcttcagtgtgccctaggcttaaagctgtcaattagccattgggtaggggctatgaaacaccacccccaatttagcaaagacatgttgggtactcaaaagtcacctgttactgtggattagtactgctggggacagtgacagatggcacccaagatattgtcactgaaaaagctcaggcacctcagctctacagagactctggcaattcccacctgtgggcccatttttcacctcaggatggaaagttccttctacctctggcccactataaagctcgtagaaagcatcagatggttagcccataatctgcaaggtagaggcaaaggtgaaggcattcctggggaaggagaccgtggcacaagatgtaaaagccccagatagtgagtggacacagcaggaagcagctagtaaagctaggtagctttgcctacatttgatctcttggcccaagatgccaaagtccaattgcgaatcacaagttctcctccagctgctggcacggaggatcctagcatacaagctctgagttctccgagggtggcaccccctgcaactctccgagggtctctatggaagtaactagaggcaggtctcttcactaaaccctgccatcacttcccagagactctactccagccaagtgctttctatatggctggcgagggggctttcatatgtagttttcaaagagtaaaaggtgcactggtgccctcagccaggcacagcttctcatactatctagaaaactaatgtccatgatgcccagtgccgaggcctggagggctcctgcagacctctcctgccagacttcatccctgctccagggaggggtagcaacagacagtgcctggcactagcctcacttgtctgtacttttccttggacttctgcctgtggtcttacttctggcttttactactggaaaagagatcaaagtccctgagttcactcttgccccttcgttgtgtagattgggaaactgaggcctagaaaagagtatgggcccaaatttacagatttgccaaggacacagcccagagccctgtcttctagccaaccagaggggccttcccacacttggggtcctgtcagctcagagcagacttggcccctccatgccagtcgtcggcagagcctgggaatgtgcagtgtgtttggtttggcctctaaaccgttgtgccatgagacaattttccccaacataagcctgaaagtgggtggggacctggactgggggccagcttgtgagcagagtaagctgggaggaaggagggaggttgcactcctaggggcttgtccccctccccaccatcccacttcattttcctgggactctttccaagcaataaaaaccccacttgggctccaagggagagttttcatctttagttttcaaagtgtgaaagaaaatacctataggtaccttgtgagacacaattcccatttggtttttgcccccctagcaaaggacagcctgagctctggctccagccacttcacagggcacctggcccactgccctgaagtcagccctcagtgcctctcaactacccaggctgagacacataacagcattgaggcatggatgtgtgtgtgtgtgtgtgtgtgtgtgtgtgtgtgtgtgtgtgtgtgtgtatgtgagagagagagagagagagagagagagacagagacagagacagagacagagacggagacagacagagtcagacaagagagagacagagaaagaaggagagggagggagggagagagaatttgaggtaatgacttcttctagacacaggcactaataggactgcaaccaacaagccctcagtctgaccccggaacctcctcccacatcagtattcaaggtctcacccaggaaatagtgcacttcactaatgctcagggttcttgccacagaagcaatcgaccccactgcatctcatcttgctaagaatcctcattttcttcaagcttggaagaaactgaaatatggcacagcaaaatcactgagtgtgatgactgcctttgctactaagtacactgtaaatgcaggatgttattagttgaaaagcagagaaataaaaatattaatgatatttttttcagagaagccttcccacatctcccagggcctagcactgttgtaagactcctcagattgaaacctgctctttaactctcatagaacaaatgccccactatggcaatgaggttagtggaacgtggatagtgtcttaggtgaaccttcgctcttcaagatcatagggcaggtcatggaccttgaggagagagagagggaagtctctagtggtgacaataacagcaagacagtgggcatgatggggatgaggtaatgtaaaacagtaccgtgagattgtgaccggtcccatgtggttgaagcccagcatggcaggaaacagagcacactggtttctgtgagctaaaatgtgctgtggaagccccaaccccacccttgttttacaaacaaactcagtaggagcgctatgcctgcatctccgaaagagacagtggtcgttcctctcctgccctatgggtgtacaaacctattttgccccagaacctgatacccagtagcctctttgaggcacccttgctgaaaggaggtggtaagactcatttgaaggcttattgtgaggatagtaatcttgtttgaacagctggtgtgggggatgcttctcctatggcagataggatgatgtggtgaaaattaaggagtgtgtgtgtgtgtgtgtgtgtgtgtgtgtgtgtgtgtgttctgccaccttcagcaaccttgtgcggaacaacaaggtgtagaccatcaggagacaggtggaagctatactctagggactccagttgactttgcagttgtttctgcctggaaccctccctcatgatcggtcacatgtgggcctactctgtctttgggggtcagtggagctggctatggggttccagactattcctcctccctaaggtacctgctaaaactagagctgaacccgaagctctcttcctaggaggaggttgctgacggtccctgtgtttcctctttgcagcactacgatctcgccacctccgctgcccctgcagcctacccccagctccgaaaccaccaagccctttgtcaagtcctcacaccaactccagcagcaggacgctgtggggcctaccagcagctcagcgcctacactgggcctcctccatgccatcactgcctccattgtagcccccttcctactacacagccttgggccttcctgacctcgaccacccttgcagagaagccagagaaaccacaggagtctgtggccgtgtccaccatctgacaccacctcagatggtgctaacaccctcaaggcagttcacacaggacagggaccttagagcactagagctttattctactccagttacatcttcttttttgtagaaggtcttaatttcccatagtgctatggggctcttttgtaaaatatgtgtccatattaaaagagaaaatgtatttattctattgataaaactatttttatgtagcttatgttatagtccctgaattagtcccaaacaccaacccagggaaggagcccaggttcccatgacctctgtgacctgtgtagacagtggctttgaattggccccaagcctcctactcaggcttgacttctcccactgtaggcacctctgagggcaggcagaaaggcagccccagcttttgtgaggctaaatttcagagccaggggcatagtggccagccatcctccctaaccctgtccaggccccagaagggcaatttaaggagaaatgaagaaagaaagaaagaaagaaagaaagaaagaaagaaagaaagaaagaaagaaagaaagaaagaaagaaagaaagaatgctgctattttgaagtcccatgtgtctgtggactggcccgccagggttcctggtgggtttttccattaaagtaggagactggtgctgtgggagatgagcccagtcctgtggtcagatggcctcactgagatccaaaaagtgaatggggttacccaaggtcacaaagcaagtgggtgattgatgttccagtgtcactgatccagcttccattcaagaggggctggtaaacctggttagggctgggaagtgagctgggcagaggacaggaatgggcaggggtggacacagaacagtcttaggggcgatggagtgcaggagcctccagttgtggtgatgaccgtggtagagacagccacctgccaaaagcctgctgtgcgatgtgatgacctccaattcaatgataaggctgaacccccaaaagagggaaaaagatccacccaagatgtatgccctgcccagccctggattagggtgatacaaaaaatacccttgctcctcaaactgtgttctactcctgctctttcggtcaggagaagaaccaggggaggcagatttcccaaactggaaccctcccaatcttcccatggcagacaaggaggccatttctccagctccccctgctggcttctgtagccaggagcctctagcagccagcatggacaggcagggagttgaggcacagaagccttctgtcctccggggtctgactgagaacacagtgggccaaagctggacttgtggctcattatttaaggagtcctagatcctgagagcagaaaagagccctcacctggcaacaagagtaagaatgactaaggtccagaaagaggaaaggcctctccaaagtggcacagctgggacaggcatgttgactccggtcccgttctctcacctcactgcacatgggtttccctggcaggcttgatggcgcctggttggctacagcaccgccatgcttaggttggcagacatctcccttctgagatggcaggactctgggcaactcattgcatagtcaggggtcccacaggcatcctggcaggcagcagaattctttccagctctgccccagtggacaggtttaagcctgagacctggcaagattctggaactctgcttcacagggtcccgccagtcccatgggcaccacactgtaaactgaacttgacctcaaccaggactggagtcagtttatccttggcaaaaaaatgtgacttcctattgctgagcgggaaggggcttagctgacttttaaagcaggctcagaagttagacatcaaacggatcgtgcagagcgctattgggatgagataagtgtaaaggaattggaaacacacaggccagattcccctgtttggggcagagtatggcatgagatgtatggagatcaagctcgaggttaattaaagatgaagcatttggggaaagagtccaagcacctgaccgtgtgcccagacctgtgccaggcgtggggccaagatggtgaattaatacagcatgtaatcactgtgcaagcacagtgccagggttacacacatgggctgaattgtacccacccttctgggcccagaagagttcaccatcaacatgggataagtggagctatcctgggctactttcccagccccaacatcaggccacttgtctttccagaccccttcttaaggaagactgaaagggaaggaagtgttccaaactctcttccccaccacattttaaggtttttaaagatgacgtgccctgcttagtagcacatgtctgtaaggactgtacttgggagtctgaggcaagagcatcaacaagcatcataagaggtccagactgggatgcacagtgagttctaaaacagcttgaagtacatgaccagaccctatatgaaaaatgaagggaagggaagggaggaggggaggtaaggaaggaagaagaaagggagggagggagggagggatggggcaggagggagggaggcaggagggagggaaggagggcagagtagtccaacagatcaacaaaattcaaggtaggtgtggacttagaaagaaagaaccattgttcagacacctagggccaaagtttcctggcccctggagagctctaccaagccagggtttaagcaagtagcaaactcaacttgctggcctacatcctaggagaccttgcacacaaaacagaatgtatggctaggccacttaaacttcccttcctgctctggaaacagaccagtagtccatcagcagtttctcagacttcatgttcttgctggctagactcataaacacagagcccagttcccttgagattccaatgagtatttttaggactttcgttttaactttgagtcaaacagaaagatggaaggcctgtggcctagcagattaagtgaccagcacttagcgggaaatcaaagaggtgtccatgccaatctcggaggtcaaagacacggtctgcaatgtctggactgagggtgactcacaacgttcaccttatactgaaagacccaagcacatccttctcacatggagtgtggttaccggcaatgtcctagtcttgtccagtccagacttgggcaagcctggaagctcaggtactttgtcccaccagtgcccctatcacaacagatcccagagaaaagaactgctggttgtagttttaatgacaccctaagtggcaaaaaaaaaaaaaaagacatccctcctaccccagcctgacagatggaatcatatctgttatttctagaatagacatggtgctttatacatgttactccccaggggaagctctcttccctccccccagctatttatcccatgaggataaccctagcggcttgctccaggatgtccccacggaaccctttgtacattacgagtcccacacacacattccagagttagggctctttagatatgaatttgctccctgttgggaatacaagcaaatcaatgaggtgggtcctgtgtctgttttttttttatgacctttgacacaaaagtgatagatgaagatgtgctgagagggacaagggaggaaaggaagcaggacagaggaagaagaggttggagctaggaaaggcaaaagacagccttggctttctatttgagacaacttccacatccctagctgctaaaggatagcatctgagagtagagttctccaggtggaggtagacgcatagtatgcaaggccccagggtccactggctgaagatgtggcaaccagctggaaatcttggcaaaggattggtgtaaatgccatgaaagtgcccctggctttgtaaggtttgggttctttacacattgttagttttccaaaaattcatctaagcagccaaaaatatcaccctggctggccatctaagcctgtagattcagtactcagctaaagcctctctacacccctcccccattcttacacagcccagccaggcttgccaagaactggcagaaactcttgctgcccttgggcaggggacctcttggggaggagatgcctggattgaaaccctgcccatgactccagctcagagccacttcttagtcagtgccggaccttgaggaagggaaatcagagcttataagggctcttggaccctatctggccctttccaggcaatgtcagctcctcaccactgtctccaaaggcagactttgcctatagagaggcctttgcttgctgcttgggaagccacagaagctctttcagcttctgtttcttcatggaccatagggagagtttcctggggccaggaggataattctgtgtatcatattgacaccacaggccaccatgatgggagcatgtgacagataagaaaacataacttaaaggccccctccatcctaaaacctgccttggggaatgtgatttttaataggatccaagtctaagatgcctggagtgagaaaccaaggactcttagactggagtctctctggttgcaaggctgaggtgggtgtggctctcagctaaagaagggggaagttgaccttagcttttgcccagttctgtctcagatttgttggctaccccactgtgcctcactgtaccaaactggcctcagctctcaccatgtttgtggtgttctttatcacctcttccttcacccctgccccatgaattgtcatgaagagttctttaagagtataatagaagacaaagaaagatgctattaatgttattttgccaaaaatatttttgtagcataatatattaattaaagatgttatgaacttgaccctggtgttactgtttacttctctgttttccttctgcagggtacatttggggaattgtctggcttgtgagggcgagagcctaggacagtatggcacagagaatgtgaatgaccccattttccatgcacagatttgggtgtgggctgtgaggatggtttgagcagggagtttgtaggtgcagagggccagcaccaagggaggtatgtgtgaccctcgccaggcagagggagatgcctatggtttggagtaggagttgtgcagctgtgttacaccacactttgacctgggctttgctaaaggtaccttccttctgcctgctcctatctcactagggttgctgctgttccttatcacttccccacctctgggctctccttggctcaggcctgctgggaaattgctgccagccacaccactgtccctctagtttactctctcccccctgcagccacagtgagtttggcaagctacaaaaatgaccatgtctcttcctgctttgaacactcttcagtgcctcccagtattttgggaaaagacatccaaggccccttgagatccagtccctgtttatgtttctattaagaaaaccacttctctgtggtccctctcccaggatgcagcactccatgtcattgcctaggctttctgcttattggcactgtccaccttgtcttagtacaagctgttgccagtgctgccaggctccctgcatctctaagtctcacccattatcgatccgcgggcccctgtgcaccctacatgtaccagttccaacagtatctgcctcaagaaaatctccaactccagacacctagctagtcacttgttcccactgctctctgtacctcagggactgctgggctgaggttgttgacatgtacttggctcctagtacatgcatctcttctgtgttgtcacctccaagtgctgtggctgttagctgccactgtctggcgtgaatgcttgaggaatgaagaagtccataaaaaaggaaagaaagaagagatgggtgggcatccaacaagacacatcaaaccttttctgccacttcatatggaagcaccaagtgttagctcctgagaccttcaagtttcaccagggaaagtccccagaacttggggacaaaggagactgccactacaaagttacaagtcaaggggtacagagataactcagtcactaaagtgcttgccatgcaagcatgaggacctcagtccaatcccctagggcttgttttgtttgttttgttttgtttttaagaagccaggcatggtggtacacatctgtaatcccagtgcaaggagctgaggacagacaagtccctgggctcagtggccagtcagcatagcttacttgttgagctctgggccaataaatactataaggatgggcccatttctaggcatggatgttaatgctacaactggtatattcgaaaatgttcaaagcatttaattctagaatctttcatctgcagaatgtttacaccttagctccactgtaaagatgaagtaactgaggcacatggctggtcacatggtgtgtcaggcctggaacccacagtcaggccccaagtcaatctcttcatttcctttttgctattctggggatgggggctatgaagtgggtggggaaagcattggcatccacactctacagaccaagtgggtgaagttgggatcccatgagaccaagtgacctggaatccacccaggatttgttgcatctaacaactggagaatggggaaactccagggaataagctctgccctgttcccagcccctctgaagtcttctggggtgacatcagtggtatgaggattctgattcctgttatggacccagctctgtgctctgcccctctcccaggagccttgttcctcagttcaagtactcccagaagaaacctgagactaagaagtgggacatgatgggaaaggtagttaaggagaaaagggactccttcaggtacctgccagactgctttccacatggcaacagatgacaaaaggggacactaagtgtttgcgcctaaggtgttgaaggctttgctttccccaccaagaagccctgcccaaacctttctgtcctgaacaaataacagaatagaggacaccaccatagacacccatctctgtaatacagtctcaggcagacctttctatactgttattaacaagttcagaactgacccctggaggaagctcaggaaggtagttttcaactctgtgagggggaaacctttaagacccatgacccttgggaaaggtaatgattttctaacaaaaaaaaaaaaatgtgtgaatgggggctaggaactctcaatggagaacagagctctacctcaagctgtctctgttctctttccccttccttccctccctctatgccctgccttctgacctctcacctgtaccttcattccttctttaccatgtcaagtcctttgggaaccctccctatcactcggaacatctggggtttgctaatccgtggtagtaccaccttcagatggtgtcctatagcaactggcctttgggatgaagtcgacagacccttattttcagttctagctggaccttggtctggtttgtggcctcaggaaagctctgctcatctcttgatgtgccaaatcatattcacagaatccttttcagaaagaataccagcctgccaccgctgggatttgggcttggaagaaaaagcagcttctcctatctctaaaggagctggaaagaagacatttgtatggccagtgagataatttctgttttctttcttgacaaagcgaaaactggaataaaacgcaaaaggaagagtgataaaatagttttctgttgctatagcaaatatctgagataaatcagcttctaaaacagaaggttcatttggttcacagtttggaaagcttcagtccgttcctctgctttgggcctgtatcatgacggccacaagagcaggagcatacaactgttcactccctggctggaaagcaagaagtagagaataaagccagacctgattgttccctttggagggcccaaaagtctcctgtcagacctcacctctcaaattcccacgacctcccaacactacctgggatcaagtctttaacacgtgggcctttgggaggacacttaagaactaaactataacaaaactcaagaagcaaggaggatgaagacagatctgaggcaaacaacctctctttcatggggagaaaatctgcaagcaggtattttccatatctgagcctcacagccctgccctctcctgtaggtctggactgccaggaaagaatggagtgagacaagggctgatatgcatgatcacatagaagtggggatgccaagtggcaagctctgggacagggggaggctgggaagaagaactttgtcagatgctgctacccagtatgaagagtctagctgcatctgtgctttgagtagacaggaagaaaagttgaacctgccagtccaactagaagccctccttcctctgtgctggggatgctagtgcaggacagaaatcgagcataattgacaggacgggcacagggtatgactccagctgctgttcacatagccatcaaccaggccaatgttttatattggttagttgtgggcttgggaagcagttattctgcccctcccttgtttctctctccctccccactcctctctctctctctctctctctctctctctctctctctctgtatgtgtgtgtggggggggtgtactatgtggtgtatatgtgtgatgtgtttgtgtggtgtgtgtgtatagtacatgtgtgtataatatgtgatgtgtgtgtaatgaatttgtgtgatgtatgtgtgtagtatgtgtatatggtatgggtgtataatgtgtttgtattttgtgtggtatatgcaatatacttgtgtataatgtatgtatgatgtgtttgtgatatgtgtatgtggtatgcatagtgtatttgtatatgtgatatgtgtatgtgatatatttgtgtgtgtgcatgtattgtgtgacattcatatggtatatgtgtgtggtgtatcttttcccttttttctctctgatcagtcacagagagggatagcatttctaacctgaaaaactagttcctgacaaggaaggctggagcatcatgggatctcctggtgtccctttctggcttccattcacctcatatctccatggaatgatggcacgggatagttggatgtttagtgaatacaagcaggactttaatcaagggctagggaagagaatgcatgagatcagaaaaacagaaaaagacacattcaggggagggtagacaagaaggaagggcagtaagaaagagtgccgggggggagggaggggggaaggaaccatgcaaaggccctggattgggaaagcaggaagaattgaacctaagggagggtgcgataaggagactggacctctgcagtctgaaggacagagaagaggataacagggtctctgtggcacaaggactgtcaacatggaattcttcagcacagatcagttctggaccagagcccaacataggcctagagacagcacttctcagacagaagtctctgccctgggagatttgaaataagtcactttcaagaccagccagactcccctcacccgacccctaaggtcctccagattcagtcagtcttgggcttgtcatcaggggccctgagtcctgggtctggccttggaataggcctcagcttcccttctctctgccccattttctcatatctataatgggataataaaaatactccaatggaaaaacatttagagaggtgatgcaggaggaaacacctaggaaacaggctccttggaccagttagctgttgttgcttccccagtgacaaccacacacacacacacacacacacctgcagcagaggtcaggaagtagctgcttctggaatattctacatgcagacttcaggcttgccaacagcaacagagagcctatacccatacagctgagctaggaggcagaggctctgggatacttctctgtgaacagccagaggccacagcagctttagaacatgttacaaagtaaatctgatgccctaggtctcatccttctactgagccttagtgttcatatcctttcaatgggannnnnnnnnnnnnnnnnnnnnnnnnnnnnnnnnnnnnnnnnnnnnnnnnnnnnnnnnnnnnnnnnnnnnnnnnnnnnnnnnnnnnnnnnnnnnnnnnnnnnnnnnnnnnnnnnnnnnnnnnnnnnnnnnnnnnnnnnnatttgctgggcttcctgccttagtctggtcatggaaaacagtatgatccacatatcccagagtacccttccaatgccccactgggatccccaaggaggaatgtgtttgccaagtcctttcagctcttttctcctctgtatcaccccccaccacacacacacacacacacacagacacacacacacacacacacacagagagacacatacacaacagctataccccaactagcataagagtttttgagatgttaaggcttaggtgtcattgactccctacattcagcagctgccaccagaggacaaccatacttagactatgaccttgagctctaaacaagtgacctgaaggggcaaggctgtaaagtgggatgtgcagaggcaggctggctcagccccctcccccatccattgcac

SEQ ID NO: 1494 - DNA, 1104 bp, Mus musculus
cggccaggtgttgtttgccctgaaccagactctgctgcagcacgaaagtgtgcgggctgggagcctgcaggcaccctacaccacagaggacctcatcaaacactacaactgcggggacctcaatgctgtcatcttcaaccatgacacatcccagctacccaacttcatcaacaccaccctcccacctcatgagcaggtgacagcccaggaaatcgacagctacttccggcaggagctcatctacaagaggaatgagcgcatgggaaagagggtcatggcgctgctgcaggaaaaccaggacaagatctgcttctttgccttcggagcaggtcactttctggggaacaacactgtcatcgatgtcctaagacaggcagggctggaggtggaccacacacctgctgggcaagccatccacggcctaagccagctagaggagttcggaaggcagaagtggcgaaagagactaaataaacatcagcggccaaggcagttcaatgacctctgggtccgaatcgaggacagcccccttcctactacacagccttgggccttcctgacctcgaccacccttgcagagaagccagagaaaccacaggagtctgtggccgtgtccaccatctgacaccacctcagatggtgctaacaccctcaaggcagttcacacaggacagggaccttagagcactagagctttattctactccagttacatcttcttttttgtagaaggtcttaatttcccatagtgctatggggctcttttgtaaaatatgtgtccatattaaaagagaaaatgtatttattctattgataaaactatttttatgtagcttatgttatagtccctgaattagtcccaaacaccaacccagggaaggagcccaggttcccatgacctctgtgacctgtgtagacagtggctttgaattggccccaagcctcctactcaggcttgacttctcccactgtaggcacctctgagggcaggcagaaaggcagccccagcttttgtgaggctaaatttcagagccaggggcatagtggccagccatcctccctaaccctgtccaggccccagaagggcaatttaaggagaaatga

SEQ ID NO: 1495 - protein, 205 aa, Mus musculus
GQVLFALNQTLLQHESVRAGSLQAPYTTEDLIKHYNCGDLNAVIFNHDTSQLPNFINTTLPFQVTAQEIDSYFRQELIYKRNERMGKRVMALLQENQDKICFFAFGAGHFLGNNTVIDVLRQAGLEVDHTPAGQAIHGLSQLEEFGRQKWRKRLNKHQRPRQFNDLWVRIEDSPLPTTQPWAFLTSTTLAEKPEKPQESVAVSTI

SEQ ID NO: 1496 - DNA, 38296 bp, Mus musculus
  misc_feature (1)...(38296): n = A, C, G or T/U
gccggggcaagggttaggggccacagtgccctgctccctgtagtgagaccctcctgagttcccaatacttctcaggagcccggaaaattcagaattcagcctggatgagccactgatgaagaagatcccttcccacagcccagacccctcaggacagggcctttggggacatttaggtacaaaccacaaaagatacttaatagttccttatcttttaaatatttacttattggtttatttgtgtgtgtgtgtgtgtgcgtgtgtgcatgtgagcgtccacacatgggtacccacatgcatgccacaatgatacatggagctcacaggacaatttgtgggagtcagtcatcttccagcatcatgaactcatggggattgaactcaggctgtcagacttgttgccaaagggcctttacctgcagagttatctcacacaggaccaccagtccaggggtgatactgcccacagggatggagccctgtggccctcccatatgccagaagccagtctggagggggaattttctgacttgaggtttcctcttccaaaatgtctctggtttctgtcagagagagttctcacaaaactagccaggagagtgctttactgttggacttacattcccagatcttttgcactctttattctgagacagggtcttactgaattgcctaggctacccttgagttcactctatagtctaggctagcctcctgctccagcttcctgagggcttgtgcccctaggcctggctcagccccattcttaatgtggttaaatgaagcaatgcgcaaagtcctatgtgtgacgttccctgccgtgtctgatcatggtgtttagaacatgcttgtccataggactccctagaaagaagtgcaagagctcactccagggtgttgccccagaaaagaaaatcatcaccaaggggccagagcgggacactacctttgtggtgccatctgtcactgattcagagagccatgtgtacagcagagccggggtgtgaccgtgtgtgggagacgggcatccagatgtcacccaaggtttaaggggaggcagggaggcagagagacgctgtaccccacatgcgtggtatgagggaggtgtctgggactccacacttgaatcccctgttctcatatttataactcacatatatttcttctacaattctgtctgtcactgtctgtgatgtaaagacagcagccatctcacagggggactgtaggtgacagatgtgaaaggccagctgtcccagaggctctttggtgtgttctctccccatggccaggcagcaccggcatggctctccctgtatagagacactatttagtgcaggacctgtgccccccacccccttttcctgggcggaatgtcaggccacagatgccctaaggcagctagggagtgtggaaaatggtggcctcagataggctgtctgggaaatggtgtgcctctccaaccacaaccacccccacatttccctccagcgtgaggaggctttggggggcgggtagcaataccaatgtcttttaagacctgaaccccgggtcctcttagacaagatacccttggggtggagactttgtccagggagagacttgctcttctgcctgtgctgaatggagcctgaaggccattgggagccactgcatgctcttcagccaggcagggcttgttcagaaccaactttcagaagcacaactggctgaggtgggtggtgacaggttgggggaggagtgggtcctcggaggccacctgcccagtccaatttccccagcgttctcttatcttcatcctcacagtaattctgtaagcaggaccggctattgttacctcctttcttaccactgagaaaacaggccccagggaggtggtgatatcagcctttgtcacccagcttgccacagcagagtgaggatgggaagccaggctgtgccctccccaggatctgcacctgattcttctccagggaggtatttttagccggctgacgtcattttgatggcaccttttactaagtgggggtcttaggaacggtgactaatgtggagactgcggtccccacctggccctgcagaggttctgctgggtcctagggtctgaaacctgggccttgctgaagcccggcttgacttctgggggggtgggtatcttcgggaagcctcccggcagaaccttgtacgagtcactgtcatgtctctggagcccagccctgggcacagagtaggtgctcagtaatgaaccagtgagcatccagtcatccagtgttggcaacacagactgggatagcacattcatgatgctatcctgggtgagggtgagatcaaggaccaagttccctcgacaatgaggtggctcgtatcctgctaggatctaggtagatgcttgtgggtggggcaaggctgatctggggtgggggtggggtggccctccagtaggacaagggttcctgatctgtttgctataagctcctaattgatcatgtatatggttgtgacatggtggcccagttacttgctctttagatacagtggtccccaggtctaagaataaatccagccccttacctccctgcacctagttccttcctagtctagaaagctgtgtgtggtggccaggaggctgcccagggtggggtcttttctccatcagccctcagcttcacttcctattgaggtacaggggtatttggtgtggcacgtgagagagactgaagccccggggctggggtgaatcgagagaggaagttggagttgaagacagaggaggccaggtctgccaccttagcctggccagcaatagaagcaataggctgtcacccctaaaagggtcagtgtgagatgtaccaagtgcgttatggttacaaggcagtatatacgtgtgcacacatgtgtgcacgagcaaacatcttgtagagaggcggaggcccagccacggcctagaaggcgcttgctgtatctgagtactcagactagagctggctccctcacagagtggccttacaacctgtccagaggctgatcccggccctgccagaaggaggcctagccacaatggggctctttagcccgtggcttgctggcaggagccggctcttttcatcacctgctgagatttattggcagctccagaagctgcgggccagaggcctggcaggcagcagggcctcctggctctttacccaaagtcaagaaaccagagagcagccttagctccgtcctgctggaaggtggccagctgctgggcacagacctcagagagtgaggtgttgggcgtgcttggaccttcccagatgttacagatgtggaaacagaggctggagtggggaagtgaatatcccacagtcacacatctcttcagggcctggcttgggagcggtgcactcagactactaaggcctctttgatggacatcttctttgctggctgtctcattgagagtagagaccttgtgaattatttttttttcgtggcttaggcaaaagcgaacaccgagcaaagcaacttaagggaagaagggttcgtctgggttcctggcttgagggtactgtctgtcatgacagggaagttgtggggggcagccaacagcctgtgagatctctggtcacaccgtgtctgcggtctggaagcggagagagcggaatggtcagtgctcagctaggactccagcccacatcccaccccgattaacggagtgtagctagcccctcacaccaatgaatatccaggagcgtatctctaagctcctaggtagttctaggttccctcaagctaacgaacctaaccatacaccatgtgtcttgtggatggctctgatccaagccgctaaagtaggctttggtgtacatgcggcagtcagaggacaactggccagagccgttctctccctcatctcacgggccctgggattgaactcaggttatcaggcttagcagcaagcgcctttacccgctgagccatcgcggtggctctaaaacaagccatttgttgaactcacacaggaatttagaatacttgggcacgtttcttttttctttttttttttttcccacagtataaaatattcagggaaggaaactccagatctgaggcaggctctgtgctgtcactggggacctgggctctttctgtctcttccctccagttggcatacatagcttttgtcctcatgattccaaaaaggccgctcctccatcactgtggctgcctctctgggggggaggggatcggccaacggttagcggagcgatgctcgtggaaagctgtgttttttaaatcagaaaaatagtttaggtttcctagaagggctggacagcaggtagttcgaagcataaaatagcacaaatggctctctgccttgctttttatttttagcttttctcaggggcagggcctattatttttgtttggtggtctggccgttgttgttttatttgattaaatagaaatcccctttgtgagggaaaggccctgtgaagtaattcttcctgtagtgtgagctacaggtgctgctttaggcacttcctaggttaacaatgtgtgtgtgtacatgtatgtgtgtgtgtgtgtgtgcatgtgcgtgcatgtatgtatgtgtgtgtgtgtgtgtgtatgtacgagtgtatgctcatgtatgctcatgtgtgtatccatgtgtttgtacatgtatgtgtgtgtgcgtgtgtgtgcatgtatgtatgtgtgtgtgtacgagtgtctgtatgctcatgtgtgtgtccatgtgtttgtgtgtgtgtgtgtgcatgtatgtttgtgtgtgtgtatgtatgtatgtctgtttgcatgctcatgtgtgtgtctatgtgttcgtgtgtgtttgtgtgtgtgtatgcatgagtatgtgcatgtgtatgtgtatatgtgtgtgctcgtgtatatgcgtatgtgctcatgtgtgtgtgtgcactagtaagcgtgtttcgcacgtgtacattgggacagcgtgacaatttcacttccctcccatagcactggtcacacctatgcccctgcccccatcctcccctgtgtttggtcctggtgggcgctcagtgctgatcttcaaccaaaggcacctgccgggctgttcagactattaacaacagagtctctgccgactgtggggtagtgattctgaggcctcctgtctgcagggcccatggaggtctcaacataagagtgtgtgttatacctgagtcttctgggcagccatgtcctctacactgcctgctgatgacctgggaggacagagggaccagcacatggcctcagagtgggaccccctgaaagcctggcgctcagtggagcttgggatcttcctggtccaggcccaaggctgtgtttgccagggtgaccctcacagggttgtgtcctttcagcagaataggagagcaatcaggtcagggtcagcacagtgggtgggactgaaagggacagagtgctgtgtggcttctcacatttcttgtgactctatccttgggcctataggtctcattttcaagccccaaaaggcagaggagggtggggtcacagggtcccaaaagcataatacttctgagcaggcagaaggcctcatagtggtcaccctagggttagaagaggccccctcggaagcttcccaaagctgccccattcacagcctctcataccttctagaaggttctgctgctgggttgttgtgtatcctgtttcaagcccaggtcagataggagtaccgactaccgatttgctttcctttcccgctggagcaggggtttgtggggtgtgtgtgggggggcttgaacaaggacgggacaggtaacagcaataatggaggtcagaggtcccccccccaacccccacctggtggagatttgatagcagcctctcctatggcggcatctgggttggctgaaaggacaccgactcccacgttcattgtttaagagtgaagcttggtgaaaccgggagggttatttttacctcccagcatgtgggtggagagggatgttctgagccagctctggcctcacagaaagtggtgagcactctgaggagcactcctcagaggaggaggaggaagcagaggtctgtttagatgagagcaggctgtggcaggccacagagccagggccccccaccaggagcgcggtctcctcaggatggctgatgcgttacgctctttgaagtcccaccagacagctccttttcaaagatgctatgttaccgatttattgtgttttgcagcactggggctgggacccagagcctcacacgctaccaacccacacactcggccacttatctgcgctcccagacctctctatttgagacagtgtctcactaagttgcctaggctagccctgaactcgctcctgagcagctgggatcccagatctgctcttatcagacacggcacaaagacaattttgtgaagagattgaagccttctgttactcctaacgtgggtgacttcggagggtctgagctatccggggctccattggccagcagggagagtgcaagtttggtgggaaggaactcgggcctgccatttctaccaggaaaagacagaccgctcaggagaagtccctgttgccggtctctgtatgttcttaattctcacctaggaagtgagggttgtcctgggccatcttggtccaaccacagtcaccaccaggaagttgagggctccatgcgtatcgatatggagtatggttccgtggagcctgtgcagggactgtgggttctataatattagcatctgaagagcaagtcacaagaataannnnnnnnnnnnnnnnnnnnnnnnnnnnnnnnnnnnnnnnnnnnnnnnnnnnnnnnnnnnnnnnnnnnnnnnnnnnnnnnnnnnnnnnnnnnnnnnnnnnnnnnnnnnnnnnnnnnnnnnnnnnnnnnnnnnnnnnnnnnnnnnnnnnnnnnnnnnnnnnnnnnnnnnnnnnnnnnnnnnnnnnnnnnnnnnnnnnnnnnnnnnnnnnnnnnnnnnnnnnnnnnnnnnnnnnnnnnnnnnnnnnnnnnnnnnnnnnnnnnnnnnnnnnnnnnnnnnnnnnnnnnnnnnnnnnnnnnnnnnnnnnnnnnnnnnnnnnnnnnnnnnnnnnnnnnnnnnnnnnnnnnnnnnnnnnnnnnnnnnnnnnnnnnnnnnnnnnnnnnnnnnnnnnnnnnnnnnnnnnnnnnnnnnnnnnnnnnnnnnnnnnnnnnnnnnnnnnnnnnnnnnnnnnnnnnnnnnnnnnnnnnnnnnnnnnnnnnnnnnnnnnnnnnnnnnnnnnnnnnnnnnnnnnnnnnnnnnnnnnnnnnnnnnnnnnnnnnnnnnnnnnnnnnnnnnnnnnnnnnnnnnnnnnnnnnnnnnnnnnnnnnnnnnnnnnnnnnnnnnnnnnnnnnnnnnnnnnnnnnnnnnnnnnnnnnnnnnnnnnnnnnnnnnnnnnnnnnnnnnnnnnnnnnnnnnnnnnnnnnnnnnnnnnnnnnnnnnnnnnnnnnnnnnnnnnnnnnnnnnnnnnnnnnnnnnnnnnnnnnnnnnnnnnnnnnnnnnnnnnnnnnnnnnnnnnncccccccctcacttcgtctgccccgcagcctctgcagtgtggaaacagcagctcagagaggccaagctctgttcttgagataatgcagcaactgggaggggctgggctttcccaggggcccgagatttcaagctgggttgtagccgccatgtctacatgcaggcaagacctccttactatttcctttaaatccaccaactgccttttaatttaatgtgtctgttttaaactggagctttataaggtcttgtcaaggaggagtcatagaattcatgggctggctatcatgtatttttataaggcacattaaaataaatttatcactataaaagcaaaattgtctgtctgcagattgtttaaactgatgtcacacagggtaggtatgccttatccctctcctcggaaccggctctgcacctggctctccagaccacggtagtattaccgcaggctgtctgtcatgatttgtgtctgtccatcacctttccagccatcagatcccaggggccttggggtttcccagaagtgctcagttctactccagggcatccaccctggtccctctgctgctctccttacccagctggaagttgtcaggattcgaacccaggctacgagtccttttatgtcagggctcagcaagacttttgaagaagaaagtgactttcaaatgaagtattgaagggatgaccaggtctgccaggagcttgtgtgtgtgtgtgtgtgtgtgtgtgtgtgtgtgtgtgtgtgtaagccaggtgttgactctgagtgtctttctcaatggctctccatattagttttggagacaggttctctcactcaacccggagttcacctaccggattgcagatgggccaccttaccaagccagcacacgtgtgctgggaacctgaactcaggacctcaggtcctcaagcttgcttggcaaatactctatcgattaagctatccccccagtgctcaacctgcctgattttgttgccctgacaggacaactcttttcaagatgagtatgctgggggccgtttctaatctctcctggggcaaaaaatgctgtggtgtccaatccaaactccacagtgtcacaggacacctgcttggggcttcccacaggtctgagcaagggcttcttgtcccttcctttattgcagcgtgggtcatttatcccctgagacatcagggaagagtcttaagtcagggaagagtctcaaacttactaattccaacgtttcttagagagtggggaagaacgcacaatcccaggtttctgtctcgagggaccctgcaaagcgggttcggccaggggtctcccagatctcctccaggggttacagaccacaagagaaagagcctattacaggggcctggtacacactcatgcctatggcttcccatgtgacaattcttcagagcccagagtgaggaggagatggagatgtgtgagaagcccagcttcagggagggcctctagggcagcggttctcaaccttcctggtgctgtggtcctttaacacagttagttcctcatgctgtggtgatccccacccataaaattatgttttgttgctacctcataactgtaattttacttctgctatgagttgtaatgtaaatatctgatatccagaatatctgatatgtgactcccatgaaagggtcggccgacccctggacaggttatgatccacaggttgagaattactactctagaggcagttggcctccgttccagttcccactcctttttagactatcttggtgactgcaagggagaaatggcttcatcctgtgcctcagttttttcatctgtgcaatggggataagaatagcacctcctcctgggaagtgacagtattcgcctttaatcccaacacttggtagggagaagcaggcagatctctataagtttgaggccagcctgctctacagagtgagttccaggacagccagggctctacaaagaaaccctgccccccccctccccccgcaaaccaaaccaaatcagaccagaccaaaccaaaccaaaccaaaccaaaccaaaccaacagtccctccctggaacagcccaggtaaggagctaagcttcacaggatctcgaaggagcagtttactgacagctactgtttttacaaccagacacatttgagtttgaatccttccattagaactactgtttgattagggacagatttccatatcggattctttttctagaaaagggcttctagggcggtgttcagcatccaggaagcagagtgcatataaatgcggagcccagccctggtgaagcattggagcccctgggagtggtagatgcctcagtcgggctccctgtgaccccccccccccttccctcccctgcagctgctacaacccagacttacagacctggcccctaccgtctgagggcaaggcggaagtgaggcaggcagcctgtggcttcctcttttttgttctgctgtgggcccaagactccttactcagagcctccgaagaggggactgcgcaccatggcctcccgtgcagcgccggtcagacagacatgctgttgtttcaacatccgagtcgccaccatagccctggccatttaccacatagtgagtattggggagtctggggtgtttggtgtgtgtgtgtgtgtgtgtgtgtgtgtgtgtgtgtgtgtgtgcgtgaggacacactgagaccttccaactgggggattgctacctattacttgtctgtgggaccctggacaagccctgtgctactctgggccttagtagttccctgtggagttgaacagaatagtgcccttttggttgtggctgtgcaaagagaaaggcaggctggcaacggggaggagtgcaggttgggattgttccaggatgccaagctccacacaggcccgggtgtagggctttctgggccctttcctagtctggggtctgggtttacctttggacttctactgggaaccagcgactgcttcctctcagctcacagctcagtcaagctgccaccttctcccttcaaggatggcttaagctttgtggctggggaactgcttgggggtggtggggggcagccagcatgtcacagtggctgtcattgtcacagtgtgaccccaggtccagtcttagtgaccagggataaggctctccctttggagtggcctaaagttggagtctctgttctcttctgctgggatttacccctcaccccctgcccctggccacacttagctctctgaggcccaaacatttcttggcttcagtgactcagacagaacctgtggctaacagctctcctgggcctggaagagcttcctcaaaatcaacctaaatccgtaggctgctgcgcagagcctggtgacatctgcttccggccacaggccgtgtggcaccaggcagtggtacaaaccagttctgtcctgaagctcttgtgtgcacctccctgcccccctcccccattcccagcctttgctgtgcagtctcacatgacttgttgaacctctctgagcctgtttctttagatcaaaacagaagatgaggatgataagagctgtgtgttgggtggctgtgtgggtgaagttgatatctataaagcatgagggacatgtgcaacatggtcccctgcctttccatgagtgtgtcctgacccacctgtccaccgaaagcaggggttctcaaccttcctaatgttgcgactcttaaatacggtccctcacgttgtggtgaccccaccctccccaaccgtaacattattttcattgctacttcataaccataattttactactgttatgaatcataatgtaaatatatttttagataaagagttgtcaaaaaggtctcaacccataggttgagaaccactgttctagggcctggcatgggggatggggagactcagagtctgtcctgtacagcctcagccagcacaggagctgagaggggcggtggcactctgtctcggcatcaattctttcagattgtcattgctgagatagcacaccattctgggaaggacgtgacaagggtccttatgccagctctgccagagccagctgtttgagctcctgggaaaacccggcttggggcttgcttccctatctaaagtggagaccaggggctgtggatgggatctttgaacttagacgtttgcagtatgctggaggtgggggtgggtcactaagtggcttcagtggggtggaggggcttgcggtcgctggaacccttgctccatctgctctggtggctctgctcctgtcttgcagagaaatgtttcctgtctgattggctggcatctcagaagagcataaacatattaaaaagtaaataaacctggcaggctgcatcgtgcaaccattgggttttctttttattcatgcggtctaagcacctcagctgtgggtgcatgagtgatgtcccgtttccataaagatcaggacactgtgggtcaagcgatcagggaaggcttcctggagtgagtgtcacaggtggggatactgtagtgtgggagggggagtgtggatgaggagctggtgtgcccgaggtatgccaggttccggaccctactgagacagttggtggggggaggaagtgactttgtgtgaagttgagcctttgagcctttcctctggtgctccagtgttatttggggcttggtcattctttgcattgtgttaagaaggtcacctcctagccaccgttccaggtccctagactttgagccatgattgtgcagtctgcaaaaccactgcgtggtatgtgagtcattcagagccatggaatgttgtagagccgcggggtaggggtataagaaagagcagagaagcctgaaagtcagatacccatcccagggactgggttagaacacacagatgatcttcctacctccttggccagaggcgcttttccacttccatcaggaaaagggctgggggttggaggggggctttcctttggcacagcaggtgggtgccaggtgtgccaacaggacgtcaaacatctggtagaaaaaagagaagccaccaccagatgtaccagtcactcatgctgccgtcatctggagccagccatgggtgacttctctgtacgttgagagctatttgtgcacttggtccctgtggggaggattaaattgggccattgacgaccgagatggggccacgctttgtggaactgtagggtgcagttacaggaagatcctacctggccaacgggtttgtgctcggatgctccaggcccccggcttgccttgggcacaggggaatgagagcagggtccctggatggcctctgagttcttccttgtgtcctaagttggtggcaggaagggagagggggcactggccggtcttttagtagagaaattcctgggctctctcttgctgggttcctgcttctcttcctgatattggggtgggggtggggtggggctggtacttgcggtgaccagagaaatctacacagactcttaggtggaaggggcaagctaccaccagagagagtggggatgaatgggcagtcactagccgggaactgtaaaaggtctattttcccctcacttttctgaatttgccttcttttctttcatgtctttgaggccaggtcttgctatgcagcccaagccggcttagaactcactctcctgcttcagcctccccaggtctgtgtttccaggcacacaccactgaaatatttctctcccctctcttctttcctttattgtgatactaggaagggtgggaccaagggcctcaggagtaccagggaaacccaccagcacactcccactcctctttctattttgacacagcgtcagctaagttgcccaggctggcctagaacttgtgggcatcctgcttcagccttcagaacctctgcatcacaggccagcccacgaggctcagcacgaagactgctttttaaagcaagcattttgttttcaggacagtttcagatttagaggaagcggcagattcagtgcagagaactccccagtgtccctctcctgtctcacatcagtgggacacgcctgtgacaactgcctgtcaggacctacagactgctttctctttctgtccatatcctttttctgtttcagagtctgggttcctgtcacaccgggtgccatccttcttgggcccccctgggcagccttgggctctctggtctgctggagtctctgggattgtggactgggatggcgctgaggaattctgctgggtatttggtgcctggtggcctgcgtgacaatcagcctgcttaaggcattgcttagaagggtggtgcaccttgcaggcatcttctctgtgaaattttctttctcctctttcagtggatctgggaatgaggtttctcttctggagggtggactggacaaagtatgggagagctgtctatccccatgtgccgtgtaacgggcttatggggatattattggtgcattgattggccagcaacttgcagataaacatcatgcgtggtttaaagcagggcaactgtgtcatgttgacagagcactgcattgtacacagaaagtcaccatcctggttttctgtgttcaaatcgtgtagacaggcagagaaggggcaatgggactcctaggccctggctggggtagcttgcctgtctgagaggcccctcagtgctctgggattcatttctctttcttgggatcttcaaggaagctttttccaggaagtccctctgacttgcttgcctcggaactccaagtctccctccttaacttcgtgttgtgggcagtgtgggatgtatgtcactcactggggacatgaccctgagcacacaggtgtctatcattgctgtctgagcctcacctcttccagctgttaatggaggccaatggtctctgtgctaagggtgattcttctgaggatctgagcttggcagtccttggtgacatgggcgggaggagggtgttagctggccatgtgaccaaccgcagaggtcagtctccttttgcaagctcaagtgctcaacagggatctaagaatcagccccattggtctctcgggaaagtctcagctaaggcctgacaatctagcaccttcttctttaataccctggctggacagaggcaggatctggccacctctgtgtgtctttcctgctgtggggaggccagcagagttaggccagggttctggtttctcctcagtaccatttaggacatcttgctggagggtccccctgttgtgggagaggcataaccagggaggcatccaacacttctgtgccagggggtagaagctgcactgagttaggactggtttatgccaggccaaggcttatcctgccaggacgaggacacagtgacccaagaagcaaggnnnnnnnnnnnnnnnnnnnntgcttctacattctcaattctgtagaagaggaaactgaggcacagggaagccaagcggggctgccaaggggacaggccaactggtttgtgataaggaacaaaaagcctgggttcctgatccagacagaagctggggcatagtgatgttcctggtagccagcctggagctgtcgcacccagcagccatattcttagatgtagggcacacatgtcaagattcaatttcagcatcacctgcaccatggggaaagtggggctcctgatagagcctgcctcagagagctgaggctcgggagggtgtgggaaagggcatgtcagcattcaggggaggacttagtatgcagtaggtgcctaataattacagctctcattaacacccagtgctattattgtgggtttctgctctgaaaatggttgttgaagagcaaacagtccctgcctctgaaggtcttaacacactgtcaggtccctgacatcttttattttacagaaacggaacaaagaaagactcaagccaacagatttttttaaacgtgctggtggaaacaccacattacagccaaacagacaagtgtctgtcatgtggcctcggatgcttatctgggacatttttagtctttgggttggtggaggcttgggtcagttagcacattctggaagggtttatccaatagtcacaaagctgtaaggttaaagatgtgctcccgtgtctttgataaatgtccgtttaggggctgaaaacagcctcccataagctgactttggacctgcaacattccaaccctccacaatcatcggctctaatccatccgacttgtagttcgatgcatcatgtttagtgttttaaggaggtataggtttttattttattttatttttctggtaacatcagttaacaagataaataggaagtggtgggtgtgaggaattgcttggggtggatttacaggaagttgatgatgagcaaccaggccatgggttgagcctagagaacagtttctcatggttgctaagacagggagattccttggtgaacctccccagaacagctctgttattctgtctgtcctgtgacctgtcctttcccttcctggctgctgggtctttgggcagacctgcctcctgtcttctcttctggtgggcagccttgctggggaggggatctccagatggctagaactggctgccagtgctctggggacagcatgtcctgaggcgctggtggcaaaccgtgtcaagtgtcatcagtgatgctcagctctgctgctctgtggggggaggggtgggggaggggtgtnnnnnnnnnnnnnnnnnnnnnnnnnnnnnnnnnnnnnnnnnnnnnnnnnnnnnnnnnnnnnnnnnnnnntgggggtggggtggggaggagctactgtgtgattggatgacttccatcctgtttataagagggatgactccatttcctccgtgagggcttacactgtctttctcttgtggcatctgctatgactgagcacctttccagggacatttccttcttctaagaactcttctctgagcacccccacctccggctgccccagtgtccctgagcttccctagggtccctagatcctgcatgctgcatctctatattctcggccttacaggctggagcagcagttggcttgacccaagttatctttgataagagccgagccctggcacacaacaggtgtcagcggatcgctaatggcttcaatttttataaaccgttaacgcataagtcacccatacagacatacagatagcccactcccaaattatgtccaactctcaccaagtaactgtcccctgagatctcctgacagccactgccctgcttggtgactgtcctgactgccctggagctccccagggcagtgtcttcacggcctcacactcctgagcttcacccctaggccctgcaccccaggctccactttgctgtggagtgggagcagtgggagcctcccctgcttcccagagaggaaagatggtgcttgggtggcttcaggtctgggcctctggctgcagcttctggtagcttgtgcttcttgttcatacacatgcgctccatggggatcagcccacctttctgggccatcattctttgcggtagatagatgtctcctcattttcttctcacagtgatactctgaggtgggaagattctgatctttcttctatattggggaaactgaggcacagagctgtttaggtagactgatgcgggccacgcagggctcttgcgggtatactggggttctctcttttctcttttcctttcctgtttttcttcatttctctgctttgtccctccttccccttctccctccctcctttccctccctccctccttctaccnnnnnnnnnnnnnnnnnnnnnnnnnnnnnnnnnnnnnnnnnnnnnnnnnnnnnnnnnnnnnnnnnnnnnnnnnnnnnnnnnnnnnnnnnnnnnnnnnnnnnnnnnnnnnnnnnnnnnnnnnnnnnnnnnnnnnnnnnnnnnnnnnnnnnnnnnnnnnnnnnnnnnnnnnnnnnnnnnnnnnnnnnnnnnnnnnnnnnnnnnnnnnnnnnnnnnnnnnnnnnnnnnnnnnnnnnnnnnnnnnnnnnnnnnnnnnnnnnnnnnnnnnnnnnnnnnnnnnnnnnnnnnnnnnnnnnnnnnnnnnnnnnnnnnnnnnnnnnnnnnnnnnnccccccaggtgctgggattccaagtgtgcactgtgacatcggggcctctgagcccccacagagtccaggcagtggggagggatggttaattatgttgaggtggggtggggagggaccagcagctggggaaaagccagctcagatgactctggcacagggagggagccagctgggtgcagtggagcgtgcaggcaggatgagggtgttgtggtggcatatagaggctgggggtatgctgaggagatagtgctctgggggagtgaccccacccagtcaccccgataaactgtgacaggaagcgggggtggggtggggggaagcttcctctggcggatggcatttctgtctctctctgtgacctcccagatgagttgacctgggtccccagcgtggccagctggtcacagggagggattaatagcttccataaaggcctagagttttgcaaattctcgaggtcccaggtcacccagtgggacacagggcagggctgatctgccctttgggtcaatgatggaagggtgtgggtgacaccgaggacccgctgttggtgaggacaggcccgggcatgactctcaagctcatcttgacgggttgctaagaaatgccccgtttcctttttctccttttgatgagtagcttgtagggtgggattaaattgctgaggcagaatcaggaagtgccagggttgcaattgtacaaggggcttagaacatggctttgcctgtaatgggggctcctgggagagccccagaaaatgggtttacagccagaaaaggaggatggctttaagcagttgttctcaattgtttagaaataactttttttttttttactagtttgtgtgtgtgtgtgtgtgtgtgtatgggggtgtttcatctatgtgtgtgtctgtgcaactgcagaggtcagaagagggtactgggtcccctggaactggagtgatatatgcagttgtgagcatccatgaggatgctgggaattgggctctgaatctctccagccccactgtttgggaacttttggtgcttatttggtgagaagctccaagaagactctgaagcaagggactcctgtccttctcaggaccccatacttcccccttcctctcctgcctttgcacccagagcggggccagcgactcggccctctgtgatcaccctcatgggatcaccattgcatctgaacgtcatcgttgtcacccgatgttcccacatgtgccgtcagtgtctgtcaacacagagaccacagctgttacttcctgcctcccagcatgccactggtgtttcctccaatcacccgccactgtccctgtcacctatgccaggccgacttcaggaaaatggtgtggtccttttccatcaccatggctgtcgctggcagcctgatacctcctcttcacatcactatgactgtccccagccagtctccctcacactctttcacatttgtgctcagtcctgctcaagctgtacaccagccagctctgtgtcccgcgagccctgggaccctgcaggaaccttggaggaggtgttcatcttcattccaaagcccagagaggtcaacggttaactcagggtgcagagctcacagccacaaaatgtcggccatatggagagaggatgctggggtggggacagtaggctcaacagcatctgtttccactgtagagaggatagcacagtcccagggacactgctggccgcacacctgcagcctgggagagtctcaggactgcagccaggtggagcccagcatcagtgatgggggaggctaggcctggaaatccccctttctgtccctctgtcctttcatggctgccctgaaagagctgattctctggagctgggatgcttactgaggtatagggccatggctgagcagggcagccttcttcctctctgtcccccttgctgggttctagacagcctcattatgtcctttttgctgagctatgggtaactgtagaccagacttgtgttcaggtctctgcacacagtggggccagtaatctcaggagttgcccttccttctcttggggacacgaggtggtaggctctgaggatacctccttcctgctgtgctaactcttaggttgccttactgtgtgtactggctgggtttgtgtgtcaagttcacccaggttggagttatcacaaagaaaggagcttcagttggggaagtgcctccatgagatccagctgtaaggcattttctcaattagtgatcaaggtgggaggtccccttgtgggtgggaccatctctgggctggtagtcttggttctataagagagcaggctgagcaagccaggggaagcaagccagtaagtaacatccctccatggcctctgcttcttgacctgtttgagttccagccctgacttcctttggtgatgaacagcagtatggaagtgtaagctgaataaaccctttcctccccaacttgcttcttggtcatgatgttttgtccaggaatagaaaccctgactaagacactgtgtgacctcgggctggtacctacaccctctgagctccagacttccatttggcaaatgaggacaggctcacccaacccttcagcaacgtcttgaatagagatccaagctgcttggcagaaacctcctctctgctccctcgctgtggggaaacacttcgggcctaacaaacactgctcactcctactacctggatcagggagggcccttggccggccctcttgaggattttataagggaggatgcaggagcagcctcagcagggccaggaggccaaagacccagggagcaggcacttcctgggccattagccacttgctacagttgttgctggtttgtgaatggcggtgtccctcagagtacagggccagggtgaggagtctatggggttagggattatgaggagccttggtccccaaagtggagtaccagttagggtgaccctcactgggtcaccctcctggatgcagtattggaatatttgtttattcattttgagttagggcttcatgtagcccaggctggacacaaacttactatacatcttagagtcagtgacctgcttctacctctcaggaagtggggtgacaatatcctgtgccatgcatagtgtgtggggggctggagatcaagccaggatgttttgcacgctgggcaagcactgtccctgtgccccagccccaatgccaggggttcctaacgtctgtgctgcgtcttaaattaacctctggaaggtcttggtgtgagtttacagtgtctttagtacactgtgcagaacatagggatgtagacatattccaaagtttcccagatgttggtgtgtggccaacggtgactactccttccggggtctggaccagcggacctggctcagggtgtttggaggtggcacagtgcaaggacagcactgaagacttgggtgtcaccttactcttgccttggtgtgggacctcaggcaagcctcctatctctccgaacttctgaaaagaacagagagagctcacaatatacaagtacacccagggctcacctggcagctggaagttgacattgtctcatttgagtcacctggcaggcgcgggctcaggcgtgggggatggggctgcagccttttctcagcacctctcccccacccccacccccacccccacgtaccaatcctgctgccccttcgggcagcggccaccattttggatgaagcagagccttcgaatcacttcacattaggcaaaggagaagctccaggaggaccagacagagacagtgcccagcccaaggcaggctctggcctcagctcctgccaggcccaacctagagcttttccaactcatgcagtctgtgcctcctgcagcctgcgattgcctttttacagatgggcaaattcagagaggaaaagcgacttctcaaggacacacagccatctggatccaaatcccagagccatctctccatccatttcctgctccgcccttctttcggactcctgaacttggggttccaaatgacagatcgagatctatatctgagctagataccaaaactaatgagccaaccaatcacccagagtttggaaagggaaacagataaaggtctggctgcctgtccactcagtgtgacctgccatttggtaagccgacatgaacttaggctgataaagtgtacccacacaattcggggtggatcctgatctcagtgtgggtagattgttcccggagaactgggtgtgttgtagtggggaggaggcacagagcttcgggatgacacagacacacggaagggtgtgaggtcaacatggttgcgtggcgtgggggctcttctgttagacggctgtggtgtagacaaaatgcaatccccgacagcctttgtagctttagcagctgggacacccaatacttaggcctgtcagaatcatctcttctctgtcttgcatggtaagggtcccccaggaacaggcttcattcattcattcatttgttcattcaatgcaacagctacatcagtaagcgagacccaggcgtccttgctgggggccaacagaccaggtcacacctgcgcctcattgtacagacggagcttccatatctgccgtatgctttggccaggcaacctggctggctccccacagctctaagaggccagcgttattggctcctttatagctgggaatgtaggtactctgggtctgtggtgactgggactggctcgcccaagacctggggctctacagtgtgtcctagacctcttctagggcctggggactctacagtgcatcctagacctttgttgatggttcatggacttggagctccatgatgcttgagtatgatgaccaaaatcctgtgtcagccacagcctgttctgtgggtacagggaaggggtgcagtcagggtccttctgagtctctcctgtgcctccttaggtacaggggggtacctaaggtagcttctgtatgaaccctatttacagatgaggaaactgaggcatggagaggtcaggccagttgtcctcagccacagagcagggaagaggaagggtctggatgatgcagttgaacatcatgtaatttacccagaatgcccgctgactaggcaagcggtcactccagcccctcgatagcatcttgcttggatggtagctcagtggtgtcctttctcttctaggtcatgagtgtcctgctgttcattgagcatgtggtggaggtggcccgcggtaaagtgtcctgtaggttcttcaagatgccgtacctcaggatgggtatgtctgggcgcagtggtggatgggaggggacctgcgggcagtgtatgactaggatgcatggtatctgtgggcctgccgtttccattggactgctgtgcacccctgaatctttgggagcgcggggggggggtatttcatatgcaaatgaggctctcctgtttgcaccaggggctttctcaggttctgaggctcagacagaagttcctgccatattggccacttcacgctgccctgaccaccagtctttcccctgccagccaccacctcacccctcccagcctggggactgcttccccggctggccacttcctgcaatagtagctgcagggaggaggggcccagacataactagcacagctgagtgccagcagcccctcagcaagaccccttgggccctgtcccgctgcccctgtccacaccagcccagaaatgccctctgccaatcacagccctcacctgggtgaggagggccagcctacctcccaggtctggtctcaggcttcactgctcacactgctggtccctgcaacccattcaagctttgcctcagtctctgccctgccttgcagctgacctgctctccagcttcctgctcattggcgtgctcttcatcatcagcatcagcctgctgttcggcgtggtcaaggtgaggcccgtgcagggatggaggggccaggggcatacaccttcctgttgtcctgaacaccccgtggatcttcacctgtcccctcatgggactccataatctactgcgctatgaggggagctgtgggggtggcgggatgctcacaggagatctgcattctgtggcctgtgagtggggctggagctttaaggatgaaaaaagagaaaggggcacagtagtatgggatccagagaaagggacagtattgggctcgtcctcaggaacaaagatctcccgttgtcctgcccccactgtagagggacactcgctcatgaaactctgggagtgtggggctgtactaagaaaggcagacagacccagagagttgggtgatggggagtcggggagattgagtcatcctgtggctctacttcctacagaagaacagccatttgtcccatggcccccagggaggtaggaagttgaccttgtcgcttggccacttggagagagtcctgccctgaagatggtggggacgctggttaggtagagaagtggaggcttaatgctggcctggagtgtctcactccctggtcacccttgtggaatctgggagcctcacctgccggggtgtgtcctcactgtgtggttggctatggaggctgctgcggaaatttggtgtccagctagagaggcagagcagggagtccctaaagattcagacagggtgtcttggccacctctgatggcttagataaccacgagacaccaccttttctgtgactttgcccccagtagggacatctatgcatgggtgctgggttcccaccgagggagagagaccctgctgacctcctgaggcctcttgccgtgttctctcacatctggctttgaccacctggagggaggacaggctcctgtccctgggcctttccttgccagtgcctccacttctagccctgtggccagtcccctcgcctgtcaaattctggatctagctaggtgtcccggctaggatgtcctgttcggttcccttctccatagagtggacatcgtacactacctcttgtgttccaccctcagagtctgtcattcagcttccattgctgggatgaaaatcctcaagagaatagggagggttcgctttggctcttgtttccagcccacaacgtgccagctttctctcgccgggtgtgagatgaggaggaatgagaagaaagcagggggtggctggcaaagctgctcacttcgtggtagccaaggaggagagggaggagaaagggggtcacggatagatcccgagggcactctgagggacctgtaaccatgccccctagttgacatcttgtgactctcttgccgagctcaattggcagagggcttgcccagcgtgcacgaggttcaatcctcagaactgcacaaatggggcggggtggtgcacacctgcaacctaagcagtctggaggtagaaccaggagacatggcagttcgggggtcatacctggctacacaaggagtttgaggccagcctagaccacatgagactttgtctcgaaaaaccaaaagacagacacaaaacataacagaacccctgtatatggagcctgttccctggtgtcttctgagacacctgaatgtccctctcccaggatgcccctcatgggagttgtgtggatccgggcaggccctaatcactgatctagtagcattagtgatagccagggtgggaacagggcgaataggaacagggacagccctgtggagtgctggtgtatcaggggcaccctgacagggtggacttgccttctagaaccgggagaagtacctgatacccttcctgtcccttcaaatcatggacttcctgctctgcctgctcacactgctgggctcctacatcgaattgccagcgtacttgaagcttgcccggccccggcctgtgagtacctgtgtgcgtggcttgacctagggaggctggctagggcagggtccctttcctccttgatacccttcatcagggtcccataatccctgccaagcatcctcaggctctctcctctgcatcttccatctgcccgtgtacctcatgggtaagccttaggacggaatgagggtggtgaggggctggaacccagtgtgtaacactactgtaggatagcagcccctgcccctgatgagagtaatgtctccaggtttcagagcctggtaagatgtctatttacactggacatgagtgggttacccagggggaatcaatcaagatgaatggatggtcaagaccaagacatgaagagcatccactgaggaaaagtgtggtggccttagttgacacagctctgtcatagttgcctttcacagcccccgactctggtccttgaagggctgggctgctggaagatggtggggctggggaattagaagccccctgttgtggtcccagctctgcagacacaccgatgtgagcatccatcccatgtccctttcactgagcaaagtccatgaaggaatggctggtggcttgggtggagagccttccaagggagggccactctgtaccctgctcgtgggtcttcatgcttcctcttggcttccctagggtccttctaaggtccccttgatgacactgcagctgctagacttctgtttgagtatcctgaccctgtgcagctcctacatggaagtgcccacctacctcaacttcaagtccatgaaccacatggtgagtcttggtggaggcccaggttacaccctggctgtgtggcctggggcaaggtgtcccccatgccgggtgggtcatggttggaggctgggtttctggggatgaacactcaaggatgaatgatggattgggggagtaactgtcagagagaagcttgtagggtcaaagaaggtctggccattatgagcttcacagcatcctgccctgggaagtgcattataggaatgacatcaggtgtccacggctgtctaactcactacggccaagcacagtggcttaaaatgaccaggtcttgtcacagttctgagggccaggaactttggggtggcttgttaggtagttcagttgctgtctcagcatggcagcttggaagggggcaagtgacctgttccaccaggggtccttacatcagtgtttgtaccttccttacccagttcctcatagtgggggcatttcacagggcagcttgagtgtcctcagggcacagctgctggctttccttagtgaagggattgaaagggagaaaaggagacaccaagaatgaaatcttcattctggcttctggctggttgctcccgaaagctcacaccagtccctgaaggagtctggcccatccagacggtgatgacgaagaggccggtgcttcttatttcagaagaaggggagccaggtgtggtggtggttgcctgttatcccagcacttgcaaggccgaggcaagagggttgcggtgaatctgggaccagtctgggctagcaactgtttcgacaaatagacaggcggacagaatgtgtgagcatatctgctccttgcccagaggtggtgcctctcataccaggtgccccaaaagttggccccagctggagctaccctgatggtggtgggtgtaacctgccaggtgttagaggactacatggctcctagcagccaaagccttcccagactaggaggcaccagctacactcttcttcccctgaggctcctgagttggcagttgccaaggtagtgcatgagtgtgtgtgcatatgtggtcatttgtgtgagtgtgtgtatgcataatgtgttcatgtgtacatgtgtgtgtatatgcatatgcatgtgtgtgtgtgtgtatgacagagagagagagagagagagagagagagagagagagagagagagagagagagagagagagatctgtgacgctgtgcagggctgcggcattgatgtggccctatatcattgcagaattacctcccaagccaggagggtgtgccgcacagccagttcatcaacatgatgctcatcttctcagtggcctttatcaccgtgctcatcctgaaggtgagagggccctgaacatccatggttctgtgaccatagttaaggctgggcagtagctcagacttccccacactggaccgtgaggaggcaggatgaagtgtgcttgtggtcccctcctgcttctaacctccctagctctcctacctcagctcctctgatgtggtctggcatcgtcggggactttcttcttagaggccatgggtctgtgaagccatgagtactcagctgcctgggcccagcatggggcttcttgtgacactggcctcatgtgctgtctggggttagatgtcaaacccatgtgttctgtaatcttaaagaataacaatgtgtcaggggcttttgttttgtttttgagacaaggtctcatgtagtccaggctagcctcaaactcactatgtagcccagggtgactttgaactcctaattctcctgcctctacttcctaagtgctggagtgtcttagttaggaacggctcttataagaacagcatttaattggggctcccttacagattcagaggttcaggccattatcatcaaggtgggagcatggcagcatccaggcaggcatggtttgggaggagctgagagttctacatcttcatctggaggctgctcggagaagactggctcccacacagttaggaggagtgcctcattgcccaccgccacagtgacacacttcctccaacaaagccatacctactccccaggccaagcatattcaaagcaccacacgaggtcacaggggtgtgcccccacgctcagctgaaaggcagttttgaagagaactttcccaccattgagctctgtctcaagatggatggggtccctttgatagtgagttccccatcactcaggatggctgagtagggtgtgcctcgctgtgtccagagatgctacaggccagatcagaagttgcaagagcatttgatgcatggtggctatgggtatcagtaaagacagtctctggagcatgtcaagctggcatgtgtggaacccaaagtccgaataggggtggcatggggtctgagttgctgctgagtgctgccatttgggaatgagtgagtgttggttccctggaggccagagcctctcaggaaagggcagggggtttgtcagagtgtagtctaaacaggctctcctctaggtctacatgttcaagtgtgtgtacacatgctacaaattcttgaagcacatgaattcggccatggaggacagcagctccaagatgttcctcaaggtgagcctgacagagggtccaaagccagggctagcactctcttgctgtgctgcttggggctagttcctttccttctctgagcctcagcactttttttttccaacataatatttttattgtttgggaatattgcatgagattgggaatctcatacaatgcaccctgatcactcccatttcccagtcctctcaggttcactctcctaccattgtgtccctgccacccccaaatataccaagtttaatttgtgctgcccaaacactcattggagcacagtcaaacttccagcaggtctcagtacttgtaagaagactgttgaaccagaaacatgaacaacatcagttatgatagtctgattccatctatccacccacacacctaccccatccatccatctacctcttatccatttatacatctatccacctactcattcatcattcatccacccacctacacattcataacccatcgcccaaccattatccacctatgcatcatccatctatccatcaattcacttatccattcacctaccacccaccatcaatccatcatccatccatccatccatccatctatcatccatccatctattcattcatccatccatccatccatccatcatccatccatcatccatccatctattcatctatccatccatccatccatcatccatccatccatccatccatccatcatccatccatccatccatcatccatccatccatccatcatccatccatccatccatccatccattcatccttctacccatctatccaacatgtctgtgttagttacttgctctaacaaaaatatctgacaagcaatttaagaaaagttcaaggcagtacattttatcatggcagggaagatgcggtggcagaatatggttggccgtccaccatcatcttcagtcaggaaatagagtgannnnnnnnnnnnnnnnnnnnnnnnnnnnnnnnnnnnnnnnnnnnnnnnnnnnnnnnnnnnnnnnnnnnnnnnnnnnnnnnnnnnnnnnnnnnnnnnnnnnnnnnnnnnnnnnnnnnnnnnnnnnnnnnnnnnnnnnnnnnnnnnnnnnnnnnnnnnnnnnnnnnnnnnnnnnnnnnnnnnnnnnnnnnnnnnnnnnnnnnnnnnnnnnnnnnnnnnnnnnnnnnnnnnnnnnnnnnnnnnnnnnnnnnnnnnnnnnnnnnnnnnnnnnnnnnnnnnnnnnnnnnnnnnnnnnnnnnnnnnnnnnnnnnnnnnnnnnnnnnnnnnnnnnnnnnnnnnnnnnnnnnnnnnnnnnnnnnnnnnnnnnnnnnnnnnnnnnnnnnnnnnnnnnnnnnnnnnnnnnnnnnnnnnnnnnnnnnnnnnnnnnnnnnnnnnnnnnnnnnnnnnnnnnnnnnnnnnnnnnnnnnnnnnnnnnnnnnnnnnnnnnnnnnnnnnnnnnnnnnnnnnnnnnnnnnnnnnnnnnnnnnnnnnnnnnnnnnnnnnnnnnnnnnnnnnnnnnnnnnnnnnnnnnnnnnnnnnnnnnnnnnnnnnnnnnnnnnnnnnnnnnnnnnnnnnnnnnnnnnnnnnnnnnnnnnnnnnnnnnnnnnnnnnnnnnnnnnnnnnnnnnnnnnnnnnnnnnnnnnnnnnnnnnnnnnnnnnnnnnnnnnnnnnnnnnnnnnnnnnnnnnnnnnnnnnnnnnnnnnnnnnnnnnnnnnnnnnnnnnnnnnnnnnnnnnnnnnnnnnnnnnnnnnnnnnnnnnnnnnnnnnnnnnnnnnnnnnnnnnnnnnnnnnnnnnnnnnnnnnnnnnnnnnnnnnnnnnnnnnnnnnnnnnnnnnnnnnnnnnnnnnnnnnnnnnnnnnnnnnnnnnnnnnnnnnnnnnnnnnnnnnnnnnnnnnnnnnnnnnnnnnnnnnnnnnnnnnnnnnnnnnnnnnnnnnnnnnnnnnnnnnnnnnnnnnnnnnnnnnnnnnnnnnnnnnnnnnnnnnnnnnnnnnnnnnnnnnnnnnnnnnnnnnnnnnnnnnnnnnnnnnnnnnnnnnnnnnnnnnnnnnnnnnnnnnnnnnnnnnnnnnnnnnnnnnnnnnnnnnnnnnnnnnnnnnnnnnnnnnnnnnnnnnnnnnnnnnnnnnnnnnnnnnnnnnnnnnnnnnnnnnnnnnnnnnnnnnnnnnnnnnnnnnnnnnnnnnnnnnnnnnnnnnnnnnnnnnnnnnnnnnnnnnnnnnnnnnnnnnnnnnnnnnnnnnnnnnnnnnnnnnnnnnnnnnnnnnnnnnnnnnnnnnnnnnnnnnnnnnnnnnnnnnnnnnnnnnnnnnnnnnnnnnnnnnnnnnnnnnnnnnnnnnnnnnnnnnnnnnnnnnnnnnnnnnnnnnnnnnnnnnnnnnnnnnnnnnnnnnnnnnnnnnnnnnnnnnnnnnnnnnnnnnnnnnnnnnnnnnnnnnnnnnnnnnnnnnnnnnnnnnnnnnnnnnnnnnnnnnnnnnnnnnnnnnnnnnnnnnnnnnnnnnnnnnnnnnnnnnnnnnnnnnnnnnnnnnnnnnnnnnnnnnnnnnnnnnnnnnnnnnnnnnnnnnnnnnnnnnnnnnnnnnnnnnnnnnnnnnnnnnnnnnnnnnnnnnnnnnnnnnnnnnnnnnnnnnnnnnnnnnnnnnnnnnnnnnnnnnnnnnnnnnnnnnnnnnnnnnnnnnnnnnnnnnnnnnnnnnnnnnnnnnnnnnnnnnnnnnnnnnnnnnnnnnnnnnnnnnnnnnnnnnnnnnnnnnnnnnnnnnnnnnnnnnnnnnnnnnnnnnnnnnnnnnnnnnnnnnnnnnnnnnnnnnnnnnnnnnnnnnnnnnnnnnnnnnnnnnnnnnnnnnnnnnnnnnnnnnnnnnnnnnnnnnnnnnnnnnnnnnnnnnnnnnnnnnnnnnnnnnnnnnnnnnnnnnnnnnnnnnnnnnnnnnnnnnnnnnnnnnnnnnnnnnnnnnnnnnnnnnnnnnnnnnnnnnnnnnnnnnnnnnnnnnnnnnnnnnnnnnnnnnnnnnnnnnnnnnnnnnnnnnnnnnnnnnnnnnnnnnnnnnnnnnnnnnnnnnnnnnnnnnnnnnnnnnnnnnnnnnnnnnnnnnnnnnnnnnnnnnnnnnnnnnnnnnnnnnnnnnnnnnnnnnnnnnnnnnnnnnnnnnnnnnnnnnnnnnnnnnnnnnnnnnnnnnnnnnnnnnnnnnnnnnnnnnnnnnnnnnnnnnnnnnnnnnnnnnnnnnnnnnnnnnnnnnnnnnnnnnnnnnnnnnnnnnnnnnnnnnnnnnnnnnnnnnnnnnnnnnnnnnnnnnnnnnnnnnnnnnnnnnnnnnnnnnnnnnnnnnnnnnnnnnnnnnnnnnnnnnnnnnnnnnnnnnnnnnnnnnnnnnnnnnnnnnnnnnnnnnnnnnnnnnnnnnnnnnnnnnnnnnnnnnnnnnnnnnnnnnnnnnnnnnnnnnnnnnnnnnnnnnnnnnnnnnnnnnnnnnnnnnnnnnnnnnnnnnnnnnnnnnnnnnnnnnnnnnnnnnnnnnnnnnnnnnnnnnnnnnnnnnnnnnnnnnnnnnnnnnnnnnnnnnnnnnnnnnnnnnnnnnnnnnnnnnnnnnnnnnnnnnnnnnnnnnnnnnnnnnnnnnnnnnnnnnnnnnnnnnnnnnnnnnnnnnnnnnnnnnnnnnnnnnnnnnnnnnnnnnnnnnnnnnnnnnnnnnnnnnnnnnnnnnnnnnnnnnnnnnnnnnnnnnnnnnnnnnnnnnnnnnnnnnnnnnnnnnnnnnnnnnnnnnnnnnnnnnnnnnnnnnnnnnnnnnnnnnnnnnnnnnnnnnnnnnnnnnnnnnnnnnnnnnnnnnnnnnnnnnnnnnnnnnnnnnnnnnnnnnnnnnnnnnnnnnnnnnnnnnnnnnnnnnnnnnnnnnnnnnnnnnnnnnnnnnnnnnnnnnnnnnnnnnnnnnnnnnnnnnnnnnnnnnnnnnnnnnnnnnnnnnnnnnnnnnnnnnnnnnnnnnnnnnnnnnnnnnnnnnnnnnnnnnnnnnnnnnnnnnnnnnnnnnnnnnnnnnnnnnnnnnnnnnnnnnnnnnnnnnnnnnnnnnnnnnnnnnnnnnnnnnnnnnnnnnnnnnnnnnnnnnnnnnnnnnnnnnnnnnnnnnnnnnnnnnnnnnnnnnnnnnnnnnnnnnnnnnnnnnnnnnnnnnnnnnnnnnnnnnnnnnnnnnnnnnnnnnnnnnnnnnnnnnnnnnnnnnnnnnnnnnnnnnnnnnnnnnnnnnnnnnnnnnnnnnnnnnnnnnnnnnnnnnnnnnnnnnnnnnnnnnnnnnnnnnnnnnnnnnnnnnnnnnnnnnnnnnnnnnnnnnnnnnnnnnnnnnnnnnnnnnnnnnnnnnnnnnnnnnnnnnnnnnnnnnnnnnnnnnnnnnnnnnnnnnnnnnnnnnnnnnnnnnnnnnnnnnnnnnnnnnnnnnnnnnnnnnnnnnnnnnnnnnnnnnnnnnnnnnnnnnnnnnnnnnnnnnnnnccactcattgcagtgctcaccatggagcccctcctaccactcactgcagtgctcaccatggagcccctcccaccactcactgcagtgctcaccatggagcccctcccaccactcactgcagtgctcaccatggagcccctcccaccactcactgcagtgctcatcatgaagcccctcccaccactcactgcagtgctcaccatggagcccctcccaccattcactgcagtgctcaccatggagcccctcccaccactcactgcagtgctcaccatggagcccctcccaccattcactgcagtgctcaccatggagcccctcccaccactcactgcagtgctcaccatggagcccctcccaccactcactgcagtgctcaccacggagcccagcctctgcttgagtttctccagcacctggaggctgggaagtccaacagtctcgccgctggcctgaacatcctgttcagcgtgggaaaaaaaatgttgcttctgttttaaataatcccttcccatgagccactgctctgatggcaagctgtccttatcttcagtcaagtgttccctagggccacacagtggtgaggtccctgcaagagtccctttagcctggcagatttagggtctggtgatcacacatcccagcggccaggttgcttcagcttgcttgccctgggctacgctcaggggatggcaggtttggagttggccgccctgggggtggctgtctgtcactatggctgcccagttggggcaggctagcctatggggtgtgaagagttggccagagtcatgtgttctatggtggcagcaaggagggtcagttcatatgcctctgctggcttttctatcgctaggggttgctaggggttgctagggatctacaccctgcctgtggtgtagatggggctgcagggctgaaaagttcccactgtacctgtgtcattgcttgtgtatgacttggaagaagggccaataaagcaactgcaagctttgctctgtctcatgtggttcttgaagggtgatatagggacagaggacctgcctctgtcctccagtattcattactccagcacacatgtgcacatcacgtctgccccaccccccagggcctggccagcttgccagtgtcacctcctgaagctatgtgagcatccccacatctcccagttgacaaggggaaagatggcctccagccagggcctgctctggatcctggggatacacaggctggggctgggagacaggtccataccctgtggacatcagccagtgctgcggggagagtctgtgacctcagggttccgagggtgaaatgtcttagtggggcatctcaccaagaggagcgaaggacaggtcgtgctaagtaacagctggtccagaatacagttgtagaatgtacaggaccaccatggtggggaaggggatgggctcagtgttctgtcagctgagaccagtggaggcaggcaggggcccctgcacagcaggactctgcttgctcaccctgagagcataccttgaatgaagatggatttgaaccacagaaatcatagcgagcccatcatgcccagtcttcccaaaggtggcactgatgcttctcagctctcagcccagagggaaagtccagggagcggaacccaaggctgatgttctcccgatcttgcgtctctttgcctttgtctatctgctgagtagctgagtacctatctggaagggacttcatgagacagctaaggtagtttgagccaggatctgtcaccaagagagaccaatggcctggcatggtgacacacttaggggggctgaggccagaggatctcaagttatttaggttcaccacagcggcgtagtgaggccttgcctcagaagaccaagtgctgagtgtaaccctcagagtgttttcctggtgtgcacaaggttctgggttcaactcccagcatcacataaaagcaaaaacaaaggctaaaaatccttcagggttccctggggatggaagatctcactgcatattctgtttgctgtttggttatttgtttgtttgacgcagggtttctctgtgtagccctggctgtcctggaactcactctgtagaccaggttggcctcaaactcagagatctgcctgccactgcctcccaagtgctggggttaaaggcatgtgccacctggcttatatttgctttttcagtcagatctcaaggaaatgataacatgtgagtccaatacctattggaaaaggagcttcagagaggtccagagacaccaagtggctttcctaaggccccacagcactctggttagatgaaggtcttttgtttctcgtcccaagtgagggttgttgggatgagctagggcctcagcctgtgagagcttgtgtcttgtgaagaccctcttactctgatcctaggcagccacagaatagaggatagagccacagatgtagaggatggggcaagagcagtggtcacagaagagaggactgactttgcatcctatcactgtaggaccaacgggctagactgtggatcccaaggaccaggaggtgtctgggtgtactgcctgcctccccactccctccccccagcactggcctggagccttggtgctgagctgtgtagtgggattgtgccctgtggtcaggcagcggggagggggcagcctagggacaggaaatagctgggttttggggggaagtccatgcggccagccaagccaagcgagttgtggtctcctgggcagcccgtgtgggggcctctcaatactttacttgaggttcagacaggagctctttgatggggaatggggacccccaagggctgcctgagcgggagccaggaggaagccaactggaacagtgctgctccagggcaggcaagatggcagccgctggagtgctcagaatcacaccggatcgtggaacaggagagcatgggtttcttgaggactgtaacactggcaaaatcatcagtccacttccgtgttccatctctgaacacactggggaccagcacagatatggcctggccccagctttgcccatgacacacaggtgacttccggctgctgtgcgccctaccctggacctcaggggtgggtgactatagcacagcacctgctatgtaagtccacgaagtggagaagagtgtgtcctctggacatgtggatgggatggtcagtgaggggtgagagtgtcacccaggtagacagagatgcatgttttagtggagcatagtggtggctgctggcctctctgacaccttctatattatctagcatttggcttccagctggtgtgaccccttacggagcaaatgtgacagcacatatggctcttcatcacacagaggcaatgttccagctgctggcatggcaaggaatccactcgctttttttttttttttggtagaacctcgatgtcaaatagttctacaagtgagtgggactgtgtgtgtgatgggagcccagttgccttctattcctggcctctgctttactttggggtaactaagggtccccattcaattggatcgcttttggcaacaactccgatttaatagagttgaggcaggcaagcatagggaatggcttgaaacctgaaacttcacttggcttgcactatatactcaaccctcttccaaaaattgtacttggtaatcgaagaccatatctgccttgagttgtacattcatcccactccaaacaatcgaatatattgtttcttataacaatatattaacaaccatcagtgactcttccttttatggccccatgagatggttcagcaggtaaagatgtttgcaccaaggctgataaccagagtttgatcctggggcctccatggtagaaggaagagaactgacttctgaaaattattcattgacctgcacacacacacacacacacacactgtgaaatgtgtctgtgcacacacacacacacacacacacacacacacacacacacacacacactcacactgtggaatgtgggtgctccccccccccccaacttccttttgtggctagtttctattcaaatacatctctagctatatctggtactggactcatatagactagatggttttaggtgcacggtcaataagacaaaccgtgtcctctagtataatactatattgagcataattgagcatacatatggtttaaatcagatacatcaaagggggcgggacaagcatggtaggaaaaggttacagaacccaaacctgtcaatcaacatatagaatcactcttgctaagctccctagtaaccagcttatcttccccttgaaccccataaagggcaagcctaaatgaaccagaacccctcagtgttctctctctctctctctctctctctctctctcagcccccagctcacttgcagcaaacctgactgctcgtgtaactttgctcttgaatactttccttgctgttctgcaatcgttgtgtgcctttatttcagttccttgaacgagatgccgaggcctggaaatacccggtccagacactgaccacatttaatcattttaaatgtcagaagagcaggctgggcacttggccctggggctctccatgggcctttggtggcagcagagcatctgtggagcagctgggtaggtctctgcaaccacagacacaggagcatccttggctgactgggctcctagggaccagagccatagccatgcccttccccaggttcctggaggatgtctgcctcattactcactaggtgagtcccagcaggcaagagtggccagcacgagggagccacagctggatgtgaacagtcagcccatctgggggatggtgctgtgatcatcccagtggtctagatggcccagccaagcagttacccctggcatcctctggcccatgtgctacctctctgggaggatgggttgtatagccacatccagatgctctggtctagatgatctctgaggttctccagggcccaaaatttgaggttttacatcacttaggtgactgggacacctggttccaccccacacccccttttagatttgttctcacttgattgcctaggcttgttctgggttcaagcagtcctcctcttcctcctcctcctcctcctcctcctcctcctcctcctcct

SEQ ID NO: 1497 - DNA, 760 bp, Mus musculus
ctgctgtgggcccaagactccttactcagagcctccgaagaggggactgcgcaccatggcctcccgtgcagcgccggtcagacagacatgctgttgtttcaacatccgagtcgccaccatagccctggccatttaccacatagtcatgagtgtcctgctgttcattgagcatgtggtggaggtggcccgcggtaaagtgtcctgtaggttcttcaagatgccgtacctcaggatggctgacctgctctccagcttcctgctcattggcgtgctcttcatcatcagcatcagcctgctgttcggcgtggtcaagaaccgggagaagtacctgatacccttcctgtcccttcaaatcatggacttcctgctctgcctgctcacactgctgggctcctacatcgaattgccagcgtacttgaagcttgcccggccccggcctggtccttctaaggtccccttgatgacactgcagctgctagacttctgtttgagtatcctgaccctgtgcagctcctacatggaagtgcccacctacctcaacttcaagtccatgaaccacatgaattacctcccaagccaggagggtgtgccgcacagccagttcatcaacatgatgctcatcttctcagtggcctttatcaccgtgctcatcctgaaggtctacatgttcaagtgtgtgtacacatgctacaaattcttgaagcacatgaattcggccatggaggacagcagctccaagatgttcctcaaggtgagcctg

SEQ ID NO: 1498 - protein, 249 aa, Mus musculus
CCGPKTPYSEPPKRGLRTMASRAAPVRQTCCCFNIRVATIAIYHIVMSVLLFIEHVVEVRKVSCRFFKMPYLRMADLLSSFLLIGVLFIISISLLFGVVKNREKYLIPFLSLQIMDFLLCLLTLLGSYIELPAYLKLARPRPGPSKVPLMTLQLLDFCLSILTLCSSYMEVPTYLNFKSMNHMNYLPSQEGVPHSQFINMMLIFSVAFITVLILKVYMFKCVYTCYKFLKHMNSAMEDSSSKMFLKVSL

SEQ ID NO: 1499 - DNA, 45357 bp, Homo sapiens
aaaaaaggagaaaaaaaaaaaaaggtgaaaaatcccataagcaaatccagggattattgcgacttactttacaggcaaaagaagaatttccttaacatctaaaaaacacctgcaaatcaataagaactaggccaacaaccggaaaaaaaatagtgggcaaaggatccaggcagtttctaaaaaaggaaatacaaattgttcctaaatatgtgaacatatccttaaccttctaaaaagaattgaactgcaatgcaaaccattttttatcgatcatattagtgaagattaagaagtttgatacctcactgtgttggtgaggctatgggaagtggccactctttcaccttgctggtgggagtatgaattggtacaacctctgtgaagggcaactcgctgatactgaaaaacactggaatgatcgtaccctttaacctagtaattctgtttttaggaagctgacttccacatgtattgtattcacacatgtgaaaatgatacatgtacaatagtgcttattgctgtagcgtgtgtaattgcaaaaggctggaaacaatctaatgtctgtgggttaaaatttatttaatgatgagatagtcacccaaaggaacagtatgcagccagaataaagactgggcacactctttatgtaattaaatggagaaggctaggcccggtggctcatgcctgtaatcccagtactttgggaggccgaggctggtggatcacctgaggttaggagttcgagaccagcctgaccaacatggtgaaactgtctctactaaaaatgcaaaaattagctgggcgtggtggcgggtgcctgtaaccctagctacttgggaggctgaggcaggagaatcacttgaactcgggaggcgggggttgcagtgagccgagactgtgccattgtactccagcatggcaacaagagtaaaactctctccttcctaaaataaataaataaataaatagaacaatctccgaacacattcagtaaagaacagctggttcagaacatggttaagttatactactatttgtgatgctggtatgtatttgaatgtgtttgcatatgcatagaaatctctgaaaagcaacaccacaaaataggtaatcgtgtttgtcccaggtaagaataacagggtagctgggaggggctagatgagtacttatttttcactgtatatccttttgtatatattcaactttgtaccatgtgcatttgatatctattaaaacataaattttcaaaagtggacagcgggggtattatatgacccctaagcagaagggctaatgcgagcatctcacacatcactgaggggttgatggagagggaggggagacggagaagatctataccttgtacatatctccgaattcttttcagtcctaagcagcatcaggaggtcgtgtggggtggtggtaagtatacaggatttcatgcctgagcccagagtctaaatgtacttccagtaaaccgcttcagtccgcaatcctcagtttcttagtctgtaaaacgggggcaacacagcgcctcattcacagggtgacacttgtgctctgcgatgctgccccttcggcgttcccagacattaccatgaccctcggccactcctgggaactccctctggggcaggctccctctccgctcccctcctcaggcaggagacagagccacattgcttagcaaagcagctgagggtggagtggaaaatgtcagcatcagatagcaccatgggaaatggcgtgcttctccaaccacaaacacccccacatttccctccagtatttaggggagtggggtggggctgaggctggtgaggccttgtacaccttcaggccttgtacccctaagctttcttggccaaggcatccttgggtggtggagagtgcactagcaggggccttggccctcttggctgccgtgctctgtgggacccgggagaggtgctgcatgtgggctctgcttcaaagaaggccttggctgctctggaaagcttcagacagacaggcagcatctgattagtgggaacattccaaggctcagttgtctggctatgactcttcaggcaatagggagccattgaaagttcttgagccaggcagggctggttctgaacgagcctttaggaagtatagttggcaaagtgaaaggtgacaggttgaggaccacctgttcagtccagcttcctcattgttagcttaatctttgaagtaattctgcaagaggggccgacatattgttacctccattttacagttgagaaaactggagctgccgagaggtggtgagattggctcttggtcacatagcgtgccggaggcaaagccgggatgtgggccaggtttgtcccctcagggtctgcggacttcccctacacccgatacctctctaaagaggggcttgctatttttagcccactggtgtcatcttgattgtgcctttgactaagagatggcattgttaaccggcttgtctcgtgatgctgtcactcacgttgtgactattactgacctctgctttccccacctggagtccttggggctaccccaaggcagcctggactcgggaggaagtgtggtgggagggcttctgtgagtggggctgggatctggcgggcaccctgagcagatggcagcccctgcagccagggctgtcttggtcactgctctagggcctaatacagtgcctggcacatagcaggcattcaagacatacctgacgctgcttggagaaatgaatgatgcagtcgcctgccagattagtatattcacactgttcccctggaggatgccagaacagacccaagttcccttgatgacaaggccggtgtgtgcggggccacacggtctccacacacgcgtcctaatgggggcatcctcacaagcaagcacaggtagtgggctccaggagccgaggcagagctgttctgtggggagtgtgacctttcagtcagatgcatgccctagttgatctcctcgtttgtcaaaaggttttaattgttcaggtacatatatagccaggtgcggtggctcacacctgtaatcccagaacctcgggaggctgaggtgggagaaccttttatcccaggagttcgagaccagcctggtcaacaaagtgagcccccatttctacaaaagataaaaaagttggccgggcatggtggtgcatgcctgtggttccagctacttgggaggctgaggtgggaggattgcttaagcctgggagcccgaggctacagtgagctgtgtgcagcattgcacttcagcctgggtgacacagcaggaccctgactcagaaaaaagaaaaaaaattatatatgtatatatattctgaatttgttggtggtctagacctcctgctctttagccacttgttggacagtggcccggagccccaggcctgatagatcccagccctccaagccccttggccaaagaaacccttccctgctgggtgaagcagtgtggctggcccaggcagcagcccctggagcctggttggttcaggtcaggcctctctttctgctccctgccttttgccacagcaaagtctcaggtgtggggtggcgtagggggttggatctgggcagtaggggtggaggaaggcagacagatttgggaggtgggagggaagcagaatccacagggcttggcgattgggaggaggtggaagtgagggtgaggagagagaggaggctgtgctgtggtctctggctgggcagtggggaggctggaggggccaacacccagaggggtcagtttgagatgtatggagtgcacgatgggtgcggtgtgtgcgtgtgtgtgtgtgtgtgtgtgtgtgcacgccatacaggggtactaagactcagtggctgatctgggcagggactagccacagctggggtccccagagtagggatggtggccctagaacagcaggggtggccccctcatggcctggcccttcgggctgctctgtgccgggcactggcaggaagagcctgagtcacagttgggctcttcagcctgcagctggctgaaaatttatggatgtccctgagaggggtggtcaggaggcctggctggctgacgggagctgcctagctgtttacccagtgccgaggaatttgagggcagcaacagcccagtcgctttggagggggtccagcctctgggtgcagctgcttggagtaacctgcctggtgccggggcctggctgagaggggccaggcctcagagagcatggatttggacacctctttgatgttatagacaggaaaacagaagttggagtggggaagtggccattccaaagccccacagcaattctgtgctccagtcaagaccagaaaccaggctaggaaggcagcaggaggaagtgatggagagctgtcacttgctgagatgctcttgttcatgtgtgtccttgttcaccgcctcctctactagaatgtttgctccatgagaccagggaccttgtctgccttgttcactgctatgtcctgagcacacaaaacaaggctcttgttgaagggatgaagtcagaaggcctggggaggtttttttccctcacattacaagatgtacagagaaaggaggttcagggctggtgcagaggcttcatgatggcatcagggatcccggctcttcctctctttccgctctgcattagggtatcgtttttgttctcatggtccccaaatggcttctgtgcctccaggcattgcacctgcatttacagaaggtagaagggagttaggacaatgggtagaagacatgtgcttatgaagtctgtccctttcaaatcaagaaagttgcagctttcctagaagtgactaaatcgcacaccatgtgtagtagttctctaccttgcttcttcttcttcttcttcttttttaggtatctaaagcctggccccagatttggtcctcagtggggcctatcacttttgttgtttgctagtggttgttgtttcattttttaaaataaaaatcccctagctgggggaatgacctaatgaggtaactcctactgtggtgttgatggcagttgtgctattttgccaccaacttcttaaggtgcctggatctctgaggtttttcctgaggatgaggtcagcagcagggaggagggggctctggcagaggctggtgcttaggagggaattacctagtccttgcagcagcacactggatgcgctatgacaatccccactctacagctcagagtgaggcagaggctggttggagaccagggccaggagggagccgggttttccagctccccatggatagtacggctgcacccatgatctaaaatgctccgtcctggggtgtgcccagagctgttattcagcaggaggctgctggctcggctatgcagactttgcagccagtgctccttctgcctgctggtcccatctccctggagccttcagcctgcagtgcctgtggcagcagcagactaggatatggtgtcattgtgcccctgggtgcagccagggacccctggactgcctggctgaggggaggcctccttggagtgtctggcagaccgttggggtcccctgcctgcccactggactcagcagctggtcattggaaggtctggttgtccccaggccacaggcctgtgggctgtccttgccaggctgaccctccaggctgacttcaaggcctgggccccttccacaggcaggggagtaggggagggaccctgtgggttgcacgtgtaggccctgacccctggtgaccgtgctgggttcggggcaggagacaggagagaatgctctgccgtttctcacatttttcaggcctttggctttggccctacacattccagccccaaacctcaaaggcagaagtgaggtggggcttgcagccagaagggaatcacaggccagtggtctggcaggaagctgaccttcagcctgggtgagctgcagggggcacccaggagcccctcgggagaagacagccctggagctaccttggctgccaccactcacatgccgcccacgaagctgtccccaaggaggacctgtgtcctggctctgctcctgaccagctgtgtgtcttgcagcagatcactggccccttgggtctacgggagctgatcagtgcctctctgctgccttcctctgctggctagggctgggggaggctcagctgagaaagggtttaaaggacaggaagaatcatagtgacaatcgtgatcaaaatgcttcccactgtgcagtccttaccgtgacccagccccttctaagtgcttcatctaggttaatggaaaggacacaagactcccaaactctttgtttaaatacaaaagctggcagagtcgtgggttttatttttacctccaggcctatgggtgaagagggaagttccagtgatgttcttctgacttaacaaagaaagcttacaactaattctgcctttgaggaaacagagctgtctgtttaaatattcatataccatggcagcaaattattaagccagataaccagccagaattacagaccttttcaggattaaagatgactctctaggatctgggaaccatgtctgaagtcagggggtcttagaagattcctttgtcagaaataacattgacaagggcagtttgacaagcagatttgtatctgctctgccgtggctgcggtggcatggaacatttccttgtccttatcttgatgaattcagagggtctgaagttttcaagggttctaccactccacaaagaaggtatgaaaagcaacttgaagaagctcaaaacttatcattcgtaacggaaaacagcagaatataaatagtgagcttatgtggtgttgccacctgcatgtacagacaacgagatgggcattatcattatccccgcttggcgcaggaggaagcggaggctcagggaagttcacgacttggctggggtcacacagcaaggaagtaagggctgcacttgtgcagatggggactgtggtctcggtggagtgtgttgggctccagcgacggggccccaggctcagctgttgcttccactgagcagctgtatttgttccctgcggccgctataataaaagaccagaaacacagtgactacaacagacatttattgtcttacagttctggaggccagaagtcaggaatgcgcctcgctgagctaaaatgaaagtgattccctttcgagcctctagaggagaagccatttccttgccttttccagtttctggatgccgcctgcactccttggctcatggttcttcctccaactgcagagccaggagtgtggcatcttccactccctctctgactctgatcttccttcacttatggggacccatttgatgacctcagggccatccagataatgcaggataatctccccacccacctcaagatcctgaatttcatggcgcctgtgaagtttctttgccatgtaaggccatgtacgcacaggttccagagattagggtggattttttttggggggtgagaggcactattctgcctatcacagtggctttggccaaagggtctgacctttgggataatagccgtcctctccacagggggtttgttgggaatgacaataaagtgattcaggcttgtactccacagggagtgactgaggtgcctgccaaggggccagtgtgtgctggagcctggtgacccggtgagagacaaatgactgcatcagaactcctgcttctgcgagggaggtagtgcccgaggggactcagaatcagacagatcaggggttcaatcccagctctgcctcctcctagcagcctgagtacgggtgagatcggggagcagggacgggctggaagggagaaaacaaacagatgcattcacgtgacctcatttcaccttcaccgcagccctgccaggcaaatttctgttccccccaaccgccccgccgttttgcagaggtgaaaacaacagctcagagagatcaagtgccttgtctgacaccacacagctactaagtggggagctgggattccccatgccccaggattcccaaacggatgccacctactccacctccagggctgtctgccacatctgcgtcctcctaggctgtggcttccttaatatgttctttaaattgacttactgccttttttatttaaatgcatttcttttaaaatgagactttatattactcctataaatggaaaatcacaggattcatggactagttatgtatatttttataatgcacattaaaatgaatttatcaccataaaaaatgagaaatgtttacccatagaccatgtacaattattccacatgctgtcagtgtgtttcatccctctctttgggagttggctttgcacctgtcctggtttcaccaaatcacaatgttatgaatggctatcatttattatggtaggaaatcgtcaaatggcttctgtgcacaatcaaatgcagactccccagcatggcctcagggccctcctggcccctggtttcctgatctccagttcctctggtcttgctactcttagacaaaggaggacttctcttggttttctgcctacccagccagaagatcccaggccatgggcctgtggagccaaagttcttaaccactgcactgtgtcacctttctatgatgtcaggcctcagcaaggcttatgaaggaacaggaacagccttgaaaatgaagttgggaagggataggccaggcctcccaggagcccaaagcttgcagagtccccttggtctcattggcacatggagaatggattgatcaagtccaccaatcaagttttgtgggtctaacagagcaactcctgccaagtgggaggagcttagggactttctataacctctcctggggcagaaatgatgggctgcagcagtgtccaatcctaactccatgatctcctgggagggcagggcttcatggcagttcctgtctgctctgcactagaagcttggcattgcaaaggggctcagctgtggaatgaagcagggcttcttccagaaatgttgcatgtacttcctattccctttctttattgcaatatggataatttatcatctgaggagggagtagagattccagggtagcttgcctaagagttgtggcttattaattccaactttttgcaagatcaagggggaaaagcaatccctgattttgtgtgagtatggggattgggtcttgaggccctgaaagtgaggttcgggtctcacagattgctgtgaagagttattgacccacctagaagagaagcctagcccagggcctggcgcacagttgatgggtttgcttcctggttattcttccgtccttgtctggagccctgcacgcctcttcgtagcttaggaagaacaagcttttccctgcggctcagggtgaggaagtgggagagaacaccagctccagggaggcttctagcaccagtcagcctcagttaacatccttgcaccttcattgactagctgtgtgaccttgcacgaatcattccccctctctgtgcctcagtttcttcatctgtaaaatggggatcataatagtacctctctcaaaggattgaggtgaggatgaaaggagtgaatccaggagcatgcctggaagaggcaggaaatgcctcctagacaatagctatttttgcagccagacagatctgggtttgaattctgccaccagtgctaactactgtgtgatttggggcaagtgccttgacctctctggacagctgtttcctcatctggaaatgggcttggtaacagtcctggcttccaaagttggtagtgttcttctagtaagcaagctgtgtgaaacggtggaaccctggccctggtgcagagaagggcatgatgaccgtgttagggtctgtcctctctggaaccccctcctgggaatggcagagggcagtggggtgctctgaggcaggctgctgccctgtccccactccccctccccagctgccccgccccagctgtgacgaccttgtccctgcctgtctaaggggcaggaaggaagtgaggagggcagccagcagcttccccttctctgccctgctccaggcaccaggctctttccccttcagtgtctcagaggaggggacggcagcaccatggacccccgcttgtccactgtccgccagacctgctgctgcttcaatgtccgcatcgcaaccaccgccctggccatctaccatgtggtgagtgtgcgggccccgggtgtgtgtgcgtgcgtgcttgtgtgagtgtgaatgtctgcggtgacccgtcatctacggagccccacaaatgaaagaactcctgctctccacctctctgggggaccctgggcaaatccctgtcctgctctgggcctcagtttccttctctgtcaaatggctgggggtaccctggggagatgccgcaagagtgaggagtaagggagctggaatccactttccaggcaaatgtaactgacgttcactccgaggctggctccgtttctgcctctgtgagatggggcacagcagcggccggaaggttatttgtgtgcaaagccaacagcagatgtgaaagtgctttggaaggcagggatcttggaaggaacgtgggctgggattgtttgaccgggatgtgaggtcggccgcagacacagccccgattcttcccctggggcctggagggagcctgggccactcgaggggatgagaagtggggatctcccctttgtgcctccagtggggaggcaggggccgtgtcctctcagcttccagctcagtcaaaccacggccttctgcccaccaaagagaacttgagacctgtgctaatcattagggtaacttgcccggcccaagctcttgttgggcaacttgtgaagtcacggctgtcactggttcctcctttcctggtgactcacagtgtggtcttgggcaagtcacagtgcccgggggccaaggctgcccctctgcctggggtggctgagggtcagtgtccttgtactgtcctgcctagacccaccctactcccaaactcctggccacactcatctcccctagacccaagcgacttcctcctggggtgactcagggcctgtggttaacagttttctcatgagtctggaagggcttcctcaaaattagcctagatccacatgctgcggtgggttgctgcaaactcagacctgcctgcgtctgcttcctgtcacaggcagggcaggcagagctgtggcaagagcccagccttcaggggggcgatgctgttcagtggttagcccacggcctctggatgcagactcctgcatgcaaatcctggcttccctgcttcccagctctgcagccttgggcaatttacttaacctctctgagcctcagttttctcatttaaaaaaatggggatgtgaattatcatacccatctgatagggtttgttgtgaggctcagggagttgatacatacaaagcatgcagaaccacgcctgacgcacaggtgagtgctttattattcgttgtgcatcagacatggcacctgctgtcagcatccttggagtcaagttgtcagattcaaggactctagttttgggaggaggaactcagaggttgtccttccgagctcctgccaatgcaagagctgagagaagcaaatcactctttgagtgtccctgtaccctgtattttaggccttcaagctctgagactatgcacattcttagaaggacagtgtggcatgcaggggcgcctcacaggtagcaagtccctgggtcctcaccccagccctgccactaactggctgtatgggctcagacaagcctctctctgggcctcagtttcccttttataaagtcaggggtaaggtgatgttgactggctcagaggtctccaactctgatgcctctagggtctgggcaggccatgtgagtgacagcagggggcagatggggcctgcggtgaccccgggagcccttgcttggcccaccctgcagctgttctctgtttttgcttgttgttgccacgaaggattgtgggccctggtggccgctcttctgatgtttagagaatagggagcaggcttttgtgtcacatcttctgatgtttcaatgctagtgattgatgcatggtagaaaaaaatctcagtgcaggccaagtcaaatccatttgcaggttgtgtgggcccagaggctgccctgcaaacccgggactgtggggctgttaaggtttcttgttgatcgtgccatccgatgtcctcacctgtaaatggtggtgtgatatacggtccctgctcacagagctgaagaatgtgtgggccctagcaatcatggaagacttcttggaggtggtgccattggcaggagggagagtttggttgtgggcagtatggaaggtgaggagaaacaggtgagcaatggcgtatgtgttcggcttctacagggacacaatagagacaaacctggagtttggggaggaggtgataaaggttttgagtgacaagctaagaagttggatcttctctgcagtgcaccattgatattttgggctggataattcttcatcttgggggagtgaattgtgcgttagaggaagttcagcagcatccatggtctctacctactagatactagcagcactgcccatctccctaccctgccacttgtgataaccaaaaatgtctctagttatggggcccaatctctcccagttgagaaccaatgcctatgagtgatgagacgttctagagcaggagcaagcaaaagagcagaggggtgtcctggaagctgtgcgctcggcccaggttgtctccaggctgtggtcctcagttgactccagtggggggttatcttcctgcaccccgaaagagtcctctctccttcccagaaagggcagggcctgggggctttcccataggctagctggcaacaggtgtgctgataggaccttgagcatctggatggaaaaagagaagctgtggtccagatgtgtcaatagcccatgctggctgtcatctggacccagccatgggtgacgactctgcacatcatgagctatttgtggacttggcccctctagggagggttaaattgagaccttgccatcctgagacagtgccacgctctattgagtcatgagggcgttattacatgagggaagcctggtccgtagctttgggctcgggcatcttcctcaggatgtcagtgggtttgtgtagaggattctctgggtcacccaaacttgcacactttgggaacccagcaaactttctttctttttttaaaaaatctattctttttttcaaaattcagtaacttgcccatcttttgtggtttgatttgttttgttttgtttttgtttttaagagatggggtcttgctctgtcacccaggctggaatgcagtggtgccatcacagctcactgcagccttgaactcctgggttcaagagatcctcccacctcagcttcctgagtagctaggatcacaggcgcatgccaccatggccagctaattttaaatatttttttttgtagagacagggtcccactatgttgcccaggctggtctcaaacccttggcctcaagtgattctcctgccttggcctcccaacgcgctgggattacaggcatgagccaccgagcccagtctagagaaatttcttaaattgggtctcttgggtcctggctttttgtcaacctgaagcacgttctaagtcgatggtagaaagtggacacccccagaagacacttttgcccagaaatctctttcttcctgacccctcttccccagagtgcccggaattccactgtcagaaatgcattgtctgggttaaaaaacttaacacctgctatgatttcaacagtgtcaaaacaggatacgtcaaaactgggcgaggaggaaatgtatttgggttctaggatagtgaaagctctattttttctacttttctgtattttccatatttggtacaatgagcacgtacttagaacggttttagatttacgaaaatattgcaaacacagtacagatagttcttgcgtcccccatgcctagttcctctattgctaacgtctcaacgttagtgtggtgcgtttgttgcaatgggtgaatgaatattcgtgggctgttattaaagtcagtgcttcacccctatttccccagctttcctcttacatcctttttctgttccaagattgcatccaggatgccgcgttacatttagtcttcacacttccttaggttcctcttggtatgatggtttctcagatttttcttgtttttgataatcttgacagttcgaggagtatttgtcaggcattttgtcaaatgttcttcaactggggtctctggtggttttctcatgattagactgggaatgtgcttttgggaggaagaccacagaggtgatgtgccagtctcagaacatcgtactaagaaaaggttctgccaacttgacttaccactgttgctggtgactttgagcccccggctgaggttactcctttgtaaagttactctttttttctcctttccatgctgtatgttttagaaggaagtcactatgctgctccaagcaactcaagtttgatgaatggggagttccgccccacctccttgagggcagagtagctacataaattacttggaatttctcaaggagatttgtctgtactcccagtttattatataaataaatgatttatttatattacagggacccagggatctttactgtatgctttgggttataatccaatggtactttactttgtggctcaagtatactacttttaaattggaaaaaaaaaaaaagtacggccaggtgcggtggctcatgcctgtaatcccagcattttgggaggttgaggcgggtggatcacttgaggtcaggacaaaaccctgtctttactaaaaatacaaaaaattagctgggcatgatggcgggagcctgtagtccaagctacgcgggaggctgaggcaggagaattgcttgaacctgggaggtggaggttgcagtgagccaagatcgcgccactgcgctctagcctgacagagtgagactctttaaaaaaaaaaaaggtaaagcattcaaatcatagtatttgaagaaggagtctctattgccctgacctcgtgcaggtaagttcacccatgtgcccagccccaggccgggatacagccctgactcattcacggcctctgcccttgaggggccagtctgccaaggaaaaaccgacgaggacaatggatgacattgctggctatgatgggggcacagatgtagggctggaggttgggattctggaatagcttcttggaggaggtctgagtcttaaggatgagtagggctttgcttgggcaccttggaaaagaggtcacgctgggcggggggagtagcatgacacaggcttggaggggaaggaccctgcagtgcttcagagacctagcaggtttgtcaagctgggttaggaggggtggccacgaggtgtgtcggggaggagggtggagaggtccccaggggtgggacctgcccgagtcctttgcttttacaagcttcagagctaagaagatggatctctcttcggcctatcagctcattttgcagatgggaaaacaggtccagcagggccccttacttgctccaggacacatggagagatggggcaggagcttgcttcaggtccccctgctggcacacaggtgtgtggaatgatccagaaagtgggcaaatgagttccttccctgccccatggctggggtggtgtgtctgtctgggaggccctgccctcatccagcctcccaccattcatttcttctttatggtccagtttacgggaagcttcctcctccaggaagctctcctgatttgtcctccttagaactcctggggctcttttctctgctccactttgggggcagtgatttgtgattgaaaggaacacaggcccatctccattacttaccagcagtgtgacttgagcaggcgggcacctttgttatctgagccttgccttcctcatctgtaaatggggccagtggtccctgcctcaaaagtgatcatttggaggagaccctagcgaagccgggtggagggctagcaggtgagtgcctgaagtgggctgtggaagaagaacacaaggccccccgccccttttttttgagactgagtcttgctctatcacccaggctggagtgcagtggcgtgatcctggctcactgcaacctctgcctcccgggttcaagtgattcttgtgcctcagcctcccaagtagctggaatcacaggtgtgtgccatcatgcccggctaagttttgtatcgttaggagagatggggtttcaccatgttggccaggctggtcttgaactcctgacctcaagtgatccaccagcctcagcctcccaaagtgctgggattataggcgtgggccatagtgcctggccccactcctctgttgaaagttcatctgtttggggttgaaaaatgggtccaaactgccaggtggggaaaaccctgggtgagaatctgttagaacttgccacctttatgtccagtgcccctgggctggacagagaggccacgttctctgccactgcagctctgtgcgcttcacggaggggtgaggaggccggtgggggcagggtgggagttgtagcccctcctcagtgtcagaactgagttgttctcctcacctcaggggtgtgaaccccagcttctaaaagcaggaggcccccatggcccatcccacccagagagtggctgaagggcctagcctggcctggccgagacttctctgttgccaacctggccccgaggcctccaggaagtgaggcttttattttgagcctagagcatcagcctggaaccaggacttcgctctgagctcactgtgaggcgagcgttggtttcccaggggaccccaccctgccaagggaagtggcacaaagcaccccctaatgaggcaggaagcaaagccatgagctgcactgcctcagccctgcacaggggctgcttgggacaaggcacccgtcccccagcctcaatttcctccctggtcaagtgggattcagtaactaccatttgtggcaccggaaaaatggcagctgccacgggggcctccattttacagatgaggaaacaggctcaggagggcaagtgactctgcagcctgtgttagataaagaacccgagcccaggtgtctgctccaggtggaggcagggaaggcagccttcctggcagccatgggatgggggagggggtcagctctgccatccccagagccttgttctgagaagcacagagcccatgtgtaaagagctgatttcaattttacctgcaaaatcagaaaaatatgggactcatgttagaacctgtctctcaagactggcgcgaggttgacacgagagagtgtatggtcagtcggccctccctatccgcaggttccacatcgtggattgcagattgaaaatactcagatgcagagcccgtgatacagagggccgactgtataagttcagaagaggacctggcgtctaataaatgcacaacaataatagtatcaatacttattatcactattgtgggtctttgctctgaagataaagggagaagtgatggttttagggaatcgtttggggagtggagggtgcttccccagatatctaggaagtggagaatgacagggccttgtgtcatacctggaggccaactctgagccccccactggctgctcctaaagggagatttgataagctaccaccagccagaatatctctgctgctgggattcactggtactgtttgcctttggggcaaagttagctgctagcgcccagtcacagcacttcctgtgctgcaggtgacaacctcctccagcgccatctgagccgtccgagtctaggttctctaggttttgcatgagccgtcacatctcctgcatgctctttcccctttctctctaaccccagaggccccacccctgccaaaccggtggatccgtgtgttcccccagccaactgctgccatttactgaggcctgctgcgtattcagcacatggatgacgccaaatcacagtttactaagaggaacgtcttgccgtttcctgaatgcgtctcatgcacactggcctctgctcatgccctttcctctgcctggaacactttttccattgctctttcggggaatcttcttcaagatccacctcctctgagaagcccgccctgacccctacggttggaccctgagctctgggtgttgacccagagccctgtgtgctgggtccctgggagtcgtgccctctggcctggatgctcgtttgggtcttgacccagcctgattcatcttcatgatcccgtggaacctggcacaggaggtgccagccaatctctatttgatttttgcaaaccttttcttgatgtataatttacctatagaaaagcacagctatcttaagtgcacaccttggtgggcttctacaaggtgaacacacccatgtgacctccacccaaactaagaaatcagaccagcacccagaggcccctagagcccccgcctcgccactgccccgcccccactgacttctgcctgtctatgtagttctataatacatacatctgtagaattacgtagaaatgaaattctgcagcgcgtgttcttttgtgagcacttctttctcccaacgttatgtttgggagcttcgtctgtgtggttgcgggtagctaactcattttttccattgctgtgtatactccattgtatgaatctaccacaatgcatttgcctgttttcctgcaaaataacatttggattgattccagcttggggctgttacaaataaggcagccatggccaccaggctccgtgctgggtgtccacacacaggcacctgtgctgctcagttgatctttctgaatcactgtcttcaatgatttacttctcacacccactccaggaggtggatggattcttctctcccttctacagatgaggaaatgttacagatgaagtaacatggccaggccaggatcccacaggggatcagcggctgcactggggttctcactgaggtctgtgagccccagagcccagtggagggaggaggggatgaggtggaggcggcgggtgaggacgagaactgcggaagagtgaagaggagagagaagccaggctctggggagctgcaggcagccaggccgggctgctgcggagtgcgtggccccaggaatgggggcgtctggtggtatctgggctggctggagaggtggttggggagatagtgctcttggggggctggcccccactgagccctcataagctctgaccagaagcacagggtggggaaggggagcttcctcttgatggtgacacatctgactcccttctcacatcctcctcccaggcaacccagggaaatcagggtgggcaggtgaggttgaggggactgagcttcagggaggggccataataataatgatgatggcagaagtgtgaggctgtaggacacagggtcagggtggagcagccctgagggggaggggcaagggagggctctggcacttgggacccatatggcaaactgcattgtctgttgggaagggttgaagacaagcccgggcctgtcttcttgtgcagcctctgtcctgggctcgcacatttggtaggaggagccaatgaagtaaacggataggaaagtgtccacactctggctggcacgggtgtgtgctcactgacggctgggtcctttctctataacctttacctccctgaaaatctcagatggtgggtctccgcctgcctgcttctgagacggtgggtcctgggcctcagggagtgagagagagtgggcctgctctcctgcagaagggactggtctttgaaccccagaatcgggggttcttgtgtcatcaccaccatccacatgatattccttatcaccatcctatcctgatgtccccattgccgtcacccccatcactgtcaccaacatcaccaacagcatctctgatcatcactgtcatcaccacgccaactccaacaacatcccaacagccactccccgcctcacatggtcaccatggccagtgcctcccaggtgacacctggtgcactgttttcaccgcatcccctctggtaccgccatccttattgcccagccatgttcaatactgaccccattgtccccatcttccctgatttccatcctccagcccctgcccccattcttttagctcaacctgttgcttgctcctcagagccaccaggaaaagaaacaaatccccctgcccctggccacttccccaactggccagcttggggaagctgtgtttgtcattaagaaagaaaggctgcgtgcagacgggaataagaactgaaaccaaagatgggcagaagaagaggtgaaaagcgggaaaggagagtgggggtgggaagggtggctgagcatggctgggaccgcagcctgagcctggcttggaggcaggaggacagagctgattttgaccctgcgacagttttggtgtgtgaccttgggctggtcgctgtctctctctgggccatatttccccgctggtaacatcctcctctcagggaagagacactcccgtgccttctgagtttccctgaagggactgaaacacacctgcaccaccaggcctgtggcttttgcacatgatgtctgctcttttggaatgctttcttctcttctgtgttggaaaactcctacttgcccctcaaagccacgctcatgggtttcctgttggtgaaattctccctaagttttttagacagcaatgcgctctccctcatcaaggaccccaagccccatgcgtgtcctctgtcatggctctgagcacaccattcatgtatcgagttccctggagactgtgacaccggcacgccagggtcagtggcttttctagacagagtttggaggcggtaggtgctcagagagtgtttactgagagtcagtgaatgcccagaggtagcaaaaaccaccacccaattgtgcttgtttatggtgcacctgctgtgtgcccggctccgcgcaccacacgattccatttgacctcagcaatcctgtgaggcaggtcagtgattatccccattcctcagatgaggagccgaggcccagagaggttagtggctggctcaagggtgcagagctcggctggggcctggggccatctgaccccagcacccgagctcttatcttcatgatctcaccagcatagaatgaagggacagtgggtgaaaagatgctgtaattggggagcaagtgggtgagggcatgctgtctgcctgcgcattgttgggggagagaagccttgtacctgtcatgggatggctcgggtcccaaggtcacagcccagctgggctctcagagcttggggagaaggcagcgctgtgtccaggtggaaaccggggacatgaggggaaggcaagggcttggaggcttggaaatgttgactgtctgcatactctgtaggtcggccaggtactttccaggaactaccaacagctgttggttagggacatgggtggggcagtgagggccttctgaggggcagggtgctggccctggggtggctgggggtggaggactgtgggcagcctgggtgagatgtcctacagtgtgtaggagctccaccccactgaccctcctgcgttctgtcatcccaatggccccaggggaaaatgagggtctcttctcattgaccagaatcgaaagctgaggccagggagaagccagaacctggccagggccacacagcagtgaggcagtggaggaggcctcctgctccccagctcttgtctcctgagctctgagtggctggggctggggcttggttgccagggaagggtgggcagatggctagagagatcctggagcctcaggggagcaagttcaaccttgtggggagccctgaccccaggagagaggcaacagggttcacaccccagccgggccacgtgacacaggacatgtgagttctctctcagcctccatttcctcatctgtaaaacgggaaaatgttgcctgtcttgtaaagttttgggagattgcagtgcaagcctgtgcgtgcaggtctgagcacacagtaggtgctgaataaatgtgagttcctctccatcctatgtcctagagagccacatgggtgcctggagagccgagcttcctccctttctcctgggtcagggcctggcatcttcgtggaaggtcggggcccctcagagtctaagtcaggctctgaggttgcctcgctctgtgactgtgggctggtcccctgccctctatgagtctcgtgagccatccggcaatggggacaaagtcctccctcgtcccctgccgcagggttgttgagaaaaggtgaaatgggggagggtgagcctgggttttaaatgcaggtggttttcacaaaagtagaaatacctctggtgcctggtgctggggctgaggggagggaggggggactgcagagggagaggggatgggggcgcctctctgcctccactgaggcactgaggggaagggttaggccttaggcagagcccgggtggctggaagatgccgggcagcggagggaattggccaagatttgaaccctagccctgcatatgaccagctgggaggccttgggcaaggccctggacctctctgagctgcactttcttcgtctgtgaaatgggaaggaaagtattaagaatagtcccttttctgggtagtggggaagatcatgtggcatggagttaggctgtacaaatgtccccttcttcccctggggtgattggaggggttacagggcagtaagggatgcttggaggagaacagaggagttgtagggggagttgaggattagtagaggtctctaaagtcgggtaatgtccaaggtgacctcatggcctcaggaggacaatattaaaatttctaaatttttccatcatataattttttaatttctggaaattttttagtagctgttttatgatgttcatgataaactaggacagcaacacatgcgtgtaatttagaaagaaagaaaaatagaggcgtgtgtgcaaaaggttttactgacatagatgcatgatcaaaatatctaagtcctctccggggttcaggctagcagggctctgaggcattttgggggtcaggggaatgggaaggcatcagaacagcactgggagacttgggctcctccctcaacttgctgtgtgtccttgggcaagccacctaatctctctgagtttataaaacaagcagaggaagcttataaaacaagtacatgcaggctccttctagcaaggggaggttgagatgatctgattctaggctttgttccagatctcagataatcctggaatcttgagactttgaaagtcttctcatttcacagctggcagatgctcatggtccttctctaagcccagctgtgactcatctgtgatctgcttacatactcccaggaacagggagctcaccacttcacaggacaccccgttctgtgctggacggagctgtcatctgcctccctttctctttctctcgttcaaggtgaaactgagaggagaggggctgcggcctggcctttaggggctgaggaaggagtttttttctctcagggctgtttcctgtgagtgtcagccacagccctcaccacacctgccttctttttggggtgttctcaactttcctgatgagacaaagcctttccagctcactctttagcaggtagagggggcagttagagcatgcaccgtgctcctggtactactgccgaaccacgtaagcttgccccagccaaaagcagattctgtttgctgggcaccccctgccagtccctgagctcagtgctttgcaaatataatgcaatttaatcttcactaaatccagtgattgcaattttccagatgaggaaactcagagaggttaagagacttgcccaaggtcacacagtgacctggattcaaaatcctcttgatctgattctggagcccagctcttcatcactcttccgttcagtccctttccacgcccctaaacaggatgtaatgtggcaggaagacaagttgagacctgtgtctgagctaaaaaaaaaaaaaaaaaaaaaaaaaacccacacagtcagcaagggggaaacagatggtgggtggctggttgcctgtcagctgagcatgagttaccagtgcagggctgcctagaaagccgatgtaaacttagggccatattaatagagatagggcaccgactagaggggaggggacagttttcttgttctttatatgggcagaggttacctggagaactgtatgtatgtcataggggaagggtggagggcttgctgtgaggacatggacacacataaggttgtgagttccccatggctggaagcacttaagtagaggctgcatggcacaggtttatgggaggcatggataaggtgacctccaaggttctttaaaactgcagttttgtggctgaacttcagttgtttctagggccaccccaacactcaggcctatcagattcgccccttccacatcattcttagcaagggtcatctgagagtgtggggttcatttgttcattcattcattcattcattcattcaacaaatacaacagctaggggaatgaacaaagagacatacaggctttccctgcctggaacctacagtcgaatggggataatggataacagcacagattgagtgcttactatctgccaggtactttaagtgaattatcccatctggccccaccacaatcctatgaggaagatgttattgttccctgaggggccatgggagacagagattcagggttagatgctctccagggccctcctgggcctgtgttgatgattccgggaacctgaagctctatggtgctctctgatccccagagcttgttgttacagaaggggatgcagtggaggggccttcagcttctaccccccaccccacctctttaagcctgaccttcagtagtaacagttaccactcttcctgagaactgggcctaagggctctcctgggatagtctcatttactcctcacagtagcctcctaaggaagttactagtattatccccatcttgcagatgggaaaaccgaggcacatagaagtcaagtagcttgcccagggtcacatagctggagagaggaagacccaggattctgaacatgggctctctgtgtgtaaaggccactcttttgtctgagatgccctactgacctggcatgccatctgctccaggatccccactactggcttccctgctgtacaccactaaggtgggaggggctggtcggggggccgtgatgcaggctcagctgactgatgctttgctttgcctccagatcatgagcgtcttgttgttcatcgagcactcggtagaggtggcccatggcaaggcgtcctgcaagctctcccagatgggctacctcaggatcggtaggtccaggggacgccggtggagtggcggggggaggaggacagggagggccctggccagggatagccaggctagtgttggaggcactgccacctctccatggacgatggatgacctctggcaagtgtcttcctttcttggggcctcagctgtttcatccgcaaatggggatgttccacctgaccccacccacatctgcaggtggtgagagcagatggaatggcactttgcaaatccccaccagctggtaaaggtgatagcctcactcttctgcttaaagccgtcagtggctgctcatcacactagaataaaatggaaactcctcaccataggatccagcctctgcccacctctctgacagcatctccctgcgattctccaccccacaccttgctccagccacactgacctcaccaaccctgtccctgtctcaggccgattcctcattgctctcaggccactccccagggatgccttcctcagcctcaccctggctgaagtggaccccagcctgcacctccagcccagcaccctctgtcgcatcctcctgtgctatgtgtgatgttctgcttttgtctttgtactcactccagactcaggactgcaagagggcagggcctgggctttcctgtgcatcctcatgtccccaaaccagtggttccccaagtgtggtcctgggagcctggctggggtcccaggggcacccctgagcacctccctgctctccttgcctttcagctgacctgatctccagcttcctgctcatcaccatgctcttcatcatcagcctgagcctactgatcggcgtagtcaaggtgagggctcaggagccccgctgccccctgccccttcctgttattcacacccactggtggtgggcagtgctgggtgctgagagggtgggaggcgggtatgttaggcggtcccacctgcgttctggagatcttcacacataccttttggagaaccatgtttctccctgagattccctgggcaggtgacctcagttccctggtaacatgagcctccacggggccgggcatggtgggctatgctggtcaccgacactttggtgagaactagctgatgactcacatccttttaaacggcaggtggaagcagggaattttgagagtgaaaagaggaagtgttgtttctgggggtgagagacgggagaaagcactggattttgtaatggatgagaggagccgaagaagggggaaagtaggatgcatgcagctctatccatgcagtgacaggagccagcaccctgagggggacctacgccctggaaggcccccagagagctcatgatctgattggggaagatgggccttcagagagacagggacagtctagtgtgacaacgaggggctcctgggcccgaggcaaatctggtgggagagttgagatgggctgtagctcaatcccctgcagaagaggaacccgcggtccctgggtccccagaaaggcaggaagccagggcctcaccacatagccatgggagtaggatccagaaagagggtccttcctgtgcagacaggggcctggcccttgcagggccggaggagtggggcgatgatttggtgctggtttggaatgcgtccaccctgcctcaaatgccagcacccactccccttgctaacactcactctgtcttggaacccatgctgcctggggaggccgtttgccttgtgcagggtggctgtgggtgcttgtgcagaaactcaaagggttcagctagagaaatggagaaatggagcaggtggtccctgaagactctgagatcagtcaagattgttctggttgcctcctgagtgattttagacgaccacatgagacaccaggaaaccactgttgcagtgattttgtccccagctgtgagagcatatgaatgaatactggtcatggtggtcacttgctttcaattgaagaagagggacttcagcctcttcctggcagggcctcttactgtgactttggacccctgggagtggctggtggaggaaggtccaattgtatgcggggcgtggtggggagtggggggtgggggggaggggctctctgctgcctccgggccttcactcatgttggtctttctgcctccagtgccccgcccctccctcctgttcactcctagtctccttccccgatctagccctggtgtccccacctccagcaagtcctctctggtcccctctcctctgtaaaaagtgcacaaagcccttccttgctgggttcttgtgagcaaattgagtcaaatcctgctctttgagccctgatagatggggatggttcccttacgtctcctgggacaccaagactcctctcattcagggcctgggtcttatccactccctgtccccagagtgtcactcagagggaggtgacctcaactgaggagggcagggaaggtttgggagagggtgggaaggggatgcatgaggatatcaggctgggtggcggagtgttggctgcatgcaggggacacttgacggtgctgggcctacctttcagaaccgggagaagtacctgctgcccttcctgtccctgcaaatcatggactatctcctgtgcctgctcaccctgctgggctcctacattgagctgcccgcctacctcaagttggcctcccggagccgtgctgtgagtacccagcccccacctctcaccggacagcagagcccaggtctggcatgggagatgggaggggaccagacacgggccctgtgctcaggctggggagggtaggagccctcttcctggctggtgtcttgacccagtctctgagtccctccacattgccccaagtttcttcctctgtggaatgtacctgcaatcacatctcatcagcctgccttatgagggttacatgaggaacacacacattgggggtgcagcccatggtcagcactcagtcagtgccgctgggagtgaattgacacctgaggaaaggacatgtgcgctttttagcccccagcccccagtattatttcttctttggaaccaagttgaagaaaggaagagaaggatgattcatgccagtgagcgcccactgtggggtggcttgagggctgctgccagtcaaggacacagtctcccaaacctgcttttctcactctccccaactgttgtccttgaagagaccggggggctacatcatggaagggccctggcccgggagtctggagaccttggttctagtcttgggtctgccaccagctcttggtatgaacatctgtgtgttcatgtctctctgtgcacaggggacgagagtcactgatgtctgtagctgagacggtctctcaagtgagggcctactatgtgccgctcagtaactgggactttaattgctgctcctcattcctcctccttgtatttgtcctccccagagctcctccaagttccccctgatgacgctgcagctgctggacttctgcctgagcatcctgaccctctgcagctcctacatggaagtgcccacctatctcaacttcaagtccatgaaccacatggtgagtctggggcagggaaccatgcccatttgctggctgtgtggccttgaacaggttacttcacgtctctgtgtgtctgtggtttaggccaggttccctggagttggagcttgggaggaagattcttgtgctggtgatttattgagggagccctctcaggaagaaacttgtcaggagtgaggaaggcaggttcgagaaaaggaggaagccaagcaaagaagcaaagatgtggctgtaggagcagccctgcatgatcccagagagggctttggcatgtgaattgcaacacagacataatatcagtttttattgttgtctaatgaattatctctaagcatcatggcttaaagcaataaacatttattatttcacacagcttctgaggatcaggagcttgggagtggcttagctgggttcttctgactcagggactctggtggggctgcaccagagatggtacctggggctgtggacaactgagggcttgattagatctgaaggatgcactcctggtggctcactcacagggcgtgggctctttgcctaattcctcatcctgtggacttgtagtagtgctgcttgagtgctctcctgacatggctgctggcttcccctgcgggagtgatgtaagagataagcaaggaggaaaggcagtgtcttttaagacttctatcacttctgccacattctgttagttagaagtgcgttgctaagtccagcccacactcaaggggagaggaaataaacaccacctttagaagggaggcgtctcaaagaatgtgtggtaatatttgcaaatgaccacagaggcagtctcacctagggcgagttcccctgcatcagtcattggtttcaagctgcccctaggggagggaatgtaacctcccaggtattagtggattaggtggtccctgtcagccaaaatgatcttctagagaagagcataggtgtggcccatgggcagctgacacctgccagctggggatgggccggtgcgccagcctgggaagcagatctggagatagtagccacttggcttttcttggtttgcccgtcagtgggatggggctgaaggtagcacctgcttcctaaggctgctgtggcggtcgaccaaggtgacggctgtgccacgctgtgctcgtgtgtgtgtggagggtgggatcattattcccggatgtgtgggtgctgttggaattccttatgtccagagacattgatgtggcccccaaatctgttgcagaattacctccccagccaggaggatatgcctcataaccagttcatcaagatgatgatcatcttttccatcgccttcatcactgtccttatcttcaaggtgagtggatccctgccctgcggctctgggaggggtggtgaggctgtgctgggcccaggcctgcccatgccaagctgttagaaggcagggacatgtgtcctccatgcctcctctcctgcttttagctcctttctcttgctttcccatgccagctcctctgactttacttgggatcctccgagacagcccatttagggcatgtgaatccgtaaaggccacctgcgttcagatgtctaattccagctgtctggaattagatttggactggcctgcgtttgaatccaagccccactgtcactagctgcgtggttggtcttcagcaagtcacttctctctgggcctcaggggcaggagtcttgttttgcctgtgttacagttttatgtaattcaggcatcaaaatgtacctgagattatgttaatagaggtttggtgatgagaaggcaggaggggaatggtctcattcttctctggggtggtcaggcccagaggatagggtccagcttcaggtcccaggtctgagtgatggtgaagcactggagtgtgttcacagcagtacaaccagcaacgtgaagagacaagaaaacgctgccatcttaggaagtcaaaaaacccccacaaaacccaacaaagacctgagcgtttattcagcatggaaaatagaggactcaagggggacctgactgctgtttcttaatacctgaagaactcttgtggggaattttgtgggatcctagaggccacaatgggggcctgtggcctgaagccacagggatgctgatgaccacagaaggaagggcttttaaaaagtgttcttttctgattataaaagtaacataggtcatagtagaaatttaaaaactacagatgagctggatgtggtggctcacatctgtaatcccagtgctttgggaggctgaattgggaggattgcttgaggccaggagttcaaaaccaacctgggcaacatagcaagattctgtctctacaaaacataaaaaaaaaaaagttggatgtggtggcgtgtgcctgtagtcccagctactagggaggctgaagcgggaggatcgcttgagcctgggaggttgaggctgcagtgggccataatcatgccactgcactccagcctaggcgacagagtgagaatctctctctaaaacaaaaaacaaaaaccaaaaaactacagataagtagaaagaagacaagcactccaccatccacaccccacacagagagcatcactgctgacaactgggtgcatttccccccagcctttctgtggtggtgggtgggcatctgcagaccccagctcctgcttccatctgaggccctgggcagtctctgctgtcacctaatgccaacctagaaacagaaccttgccccttttagcatcttctccaaggactgacctagcacaaacgcactagtgagtgtacagtgagaacacccctgaaggcctcatgggggaagccagtgtgggctttccatggcactctctactgcaggacccctccgcagaccccagcacacagctccgtcccccagctccccttctgttttttatcctccagaatgaggggcttccctctttgaccctcattctgcctctctggccccctccaccgacttgattttccctgggccttcatgcttcattctttgtcactccgtacctccatatgtctccttgccccacctatgtgcccatcagggaatccatcaaacaagaccttccagtacaggaccctctcctcttactcagggggcatcctgggggttttctgttgtttcttgagcttgccccttgggattgtatgccccactctggaaagcttctgcccaattcttacattaacttgcatcagctgatggacatgtactaactgttcctcctttataaacatggaccaatactgcacatgctgttttgtaatctgcttcagaaaacaacatatcggaagcaattttgaagaaaacatgtcccaccatcagctctgtttcgagatgggcagggctgtctcaggaggtagtgagcttccaggcagtgtgggcagtcaagcaggagctgtgggactattgccagggaaattggagggtgggctagaagccccccaaatccccttgctatgtggtatctgtggggcaatgaaaagggcaatacctggaatattctggactggctggtgaggaacccccaaccagaatgagaggtccgagcaggagcagctggatgctggcttctggagagagtggtggctcctgcctggcatatgtcctaggcctgctggagcgtgagaaggacgctcagcaaagcacagcctgacctgggcctttttccaggtctacatgttcaagtgcgtgtggcggtgctacagattgatcaagtgcatgaactcggtggaggagaagagaaactccaagatgctccagaaggtgagtgtggctgcaggtgggtgccagccctgtcactaactccctgtgccatttgggtcaagtttccttccctctctggaccttggtttctctatttgtaagatgagggttggaacagaagaaatgtgttctctttcagttctggtagtctaagattcattcactcactcattcatttattcagtatttactgcctctcactctttgctagtctcatatcgattccaggaggcgcagagaaaactaagatgccacctctgccttagaggagtgtacagttcagacacatagatacaattacaacttggtgtgaagcacagggacaataagcacagaggaaggacctggcctcttctcaggtatcagggaagccttcctggaggaggtgacagttaactggtcttggagggtcaatggatatgagatagctgggaaagcagaaggaggctttccgggaagagaggatgaggtgtgcttagaagcagcttattggaaagtgacggtttaaattcctggtaacttactttcctcacctgtaaggtggagattgtattagctaagacacttttggttgcaagtggcagaaacccaactcaatctgacttcaggaatttactagctcacagaacttagcagccaaatgtaggtctggcttgggcctggctgagtcctgacatcaggatatgatctcgtcctctccaactcttgactctactttccttgatgttggcttcattttccggaagcccatcccttgtggtggcaaaaaggctgccaaaacccctaggcagatatcccaccctctcagaaatcccaacagaaaaagaaggtcccaggagtatgtctgattggaccaacttgggccacgtgcctatccccaaaccaaggactatagccagggggatggaattctactttgagtggccaagtccagccacctcgctggatctgagggatgggaccagttcttctgaaggtatatggactgagaatgttttcccaaggaaaatggtgcactgttttcaaaataagggggacttgatgctgaataggcaaaggcaaatatgtccactacagggctgggaactgcacctatctcatgcaggcaatgtctagcacatagcaaatatccaagacctgccagtcattatcatcatcattttgccagaggtgggggtttgggtcccatgaccccaggttggaattgcaggtcattcttgaccatactcagccctcatctctctgtctctcccaggtggtcctgccgtcctacgaggaagccctgtctttgccatcgaagaccccagaggggggcccagcaccacccccatactcagaggtgtgaccctcgccaggccccagccccagtgctgggaggggtggagctgcctcataatctgcttttttgctttggtggcccctgtggcctgggtgggccctcccgcccctccctggcaggacaatctgcttgtgtctccctcgctggcctgctcctcctgcagggcctgtgagctgctcacaactgggtcaacgctttaggctgagtcactcctcgggtctctccataattcagcccaacaatgcttggtttatttcaatcagctctgacacttgtttagacgattggccattctaaagttggtgagtttgtcaagcaactatcgacttgatcagttcagccaagcaactgacaaatcaaaaacccacttgtcagttcagtaaaataatttggtcaaacaacagtctattgcattgatttataaatagttgtcagttcacatagcaatttaatcaagtaatcattaattagttaccccctatatataaatatatgtaatcaatttcttcaaatagcttgcttacatgataatcaattagccaaccatgagtcatttagaatagtgataaatagaatacacagaatagtgatgaaattcaatttaaaaaatcacgttagcctccaaaccatttaattcaaatgaacccatcaactggatgccaactctggcgaatgtaggacctctgagtggctgtataattgttaattcaaatgaaattcatttaaacagttgacaaactgtcattcaacaattagctccaggaaataacagttatttcatcataaaacagtcccttcaaacacacaattgttctgctgaagagttgtcatcaacaatccaatgctcacctattcagttgctctgtggtcagtgtggctgcatagcagtggattccatgaaaggagtcattttagtgatgagctgccagtccattcccaggccaggctgtcgctggccatccattcagtcgattcagtcataggcgaatctgttctgcccgaggcttgtggtcaagcaaaaattcagccctgaaatcaggcacatctgttcgttggactaaacccacaggttagttcagtcaaagcaggcaacccccttgtgggcactgaccctgccactggggtcatggcggttgtggcagctggggaggtttggccccaacagccctcctgtgcctgcttccctgtgtgtcggggtcctccagggagctgacccagaggtggaggccacggaggcagggtctctggggactgtcggggggtacagagggagaaggctctgcaagagctccctggcaatacccccttgtgtaattgctttgtgtgcgacagggaggaagtttcaataaagcagcaacaagcttctgtctggctgatgtgtttctggaaatacagtgtagggagggtggagaccagccttctacctccatcaccccaggactcacccacaccccctacacccacatacacacccctcacactcacactcacatgccccacaaccacgcccaccaacatacacacccacacccccacacctcaccccctcatccccactcccacacacccacacatctacacctacatacacacccctcacactaacactcacactccccacaaccacacccaacaacatacacacccacacaccccacacacccacacccacccgcggacccccacccacacacacaccccccgcacccacacacacagccccactcacacgcacatactcccaccccccaccccccacacacacccacacccacacttacatacacaccaaccccccacacacccacacccacacccacacactcccaaccccctccacacacacatacccccacacccacacacacagccacactcacactcacacactcccaccccctacccccacatgctcacacatacccccacacccacacttacatacacaccaaccccccacacacccacacacagccacacccacatccacacactcccacccgaccccccccacacacacatacccccacacccacactcacacagcaactccccacacacccacacacatccacacactcacatccacaacccacacacattaacaccccccacacccacacacacatacacccatatacacaccaccacacacccccatacacatccaacacacagccacacccacacgcactcacatccacacacactcacacattcccaccctcccaccccccacatacccacacacacccacatacacaccaacacccccacacccccccacacacatccaacacagccacacccacatgcactcacatccacacacacccacacactcactctcccccacacccacacattcccacccccaccccctcacacacccacatacacacccccacccccacacacccacacatcccccacatacccacacactcacacctcctccacacccctccacacactcacacccacccccacacacccacaaatacacccaaacacccacactccccccacatacccacacactcacaccctccccacacccctccacacactcactcccaccgcctacacacccacacaccccccatatacccacacactcacaccccccacacccctccacacacgcccacccccacacacccatgtaaacactcacacatacctagttgctccatccagaaactcctcccatgggccatgctgagcgaggggtggtcctgacccaatgctgtctgatcatgaaccacagcccaagatgatgcaccctgatgtctccctaatcaggcgtgcactccactcccctggggctgggtcctgctctggacactggggaagacctcaacagatgagactcgcctccagttccccccagtctgcggtaggagggacagatctgcaaaagggctgccacgatagggaaagcctaggggacctcagacgtggcctgagggccagagaaagcctcttggaggctgtcaccaagtggagtctgaaggatgagaaggcagcagtaagcagaatgggaagggtgctctaggtctaggtagcaggacacgcaaagactctatggcattggggagaggagctggggcgagctgctcagcgtggctgcaagtggggaggggagggagaagaggtcggcccgctgtggggctgggtcaggaagagtgtttgcacacagtggggctctttaggtgcaagctcaccctggctaagttcagccaagaagggaatttacaggaaggacatggttgcaagtaacagaagccttatgagccaagtttattatgagaaaccagaaggtggttcacgatgtttcttggctctcatacaaataaaaaatccagggatttttggcttcaggtatggcaggatccaggactacaactctttaataatgtctctctgtttctccatctcttatcttttctccccggtgtggctgagctgttgaggacttacctgaaagtaaagttaataaagagaccagggctgtttgaattgggatctgtcaccaataccaaaagagccctcagagccttgaatgtcacaccgaggaacatggactaatcctgagacaggtgtctttgaaggattttgggccaaggagttacaaggtttgggttttaggaaggaagagcccaaatgcagggacccctacaaaggctggggaagtcatcctatggggcggcagggacggggatgagtttgagaggcattgtcaaccttctggtggtgtcagtttttttgtggaatggcagatttcttcatggatgttatttgctccttatcagacccccaagcagttggtgcagtgtaattcacagaaatggaaagcgagctcctgttcacacttgagggcagaggcccagagacatcaagtgactttcctgaggccacacagtggtcagagatgagaccaagcaccttttttttctactccgagtggaggcttttagacgggctggggcccagtctgtgtcagttgttgcttcttgcaaagacccatgggaagagggcccgctgagaagccccggcaagtgtggattgggagcagaggtcacgggaggagagacattggcccagccttgcatcctatcacaaggagattgaagggccatggctgcgtgtgtcacaaggaccaggaggccctgaacttcccggcgcgactctcccgtccttcccgccttccccgactcccacctctggcctggagccgaagaacaggctgagctgtgtagtgggattgtgccctgtggccaggcagctgggagggggccacccgagggacaggaaatagctgggtttggggaagtccgcatggctagccaagccaagcgagcccacgatcgcctgggcagccctcactgaggccctatcaatgccccgtttgaggctcacacaggggtcctttgacggggctgcgatggtttggacccactgacagcgcctgtttgagcttcatgcctggaaaggagccggccccaggacagagggggctgcttccaggcctgggcaggtgagggcagcctggagtggttgtctcttggagggaaaaaagagctggtaaaattaaacctggggtgctaagcggggcaacttcaggtttctcgggagctgtgatggtagcaggaagggtccccgtaattgagtgggcccttcagtgtgctggctccacaaagctcccagtggcctcacgcagcaggtgctgggtggtgatcattcctgaggttcagggaggggctgcctctgcccacagtcacgcattggccaaggggcagacctgggcttggacttcagtccacccaaatggacctgagcttgtctctctagacctttctgggtaacctcgcccttcctctgggaatttctacctcacaaggccctcatttaattcctattccaggctctgagccctcttgggagggccctggcagaagcaggaggcctcagaggcagcagggagcttttggatgttgcggaccctcggatggtggtgcccagctctgagcagaggatgcgaaacgggggatggcaaaggatgcatcgcgttttggtggggctagatttgcgcttccttgggggacatataatgggaggtgctcaggaagcagctgggtctctaggtctggagtttaggagagcgaggagggaggcaggttgagatgtgagtgctatctttggacatgtgggtgggatatcaggttgggctggtatcacccaggtgttaacccatcagaaggatgtgctgctgctccgtggcctccccagacaggccggcagatgaaagcacacgcctcctcaccctggattccagtttggctgaccatgcgtggggcctgagaccaagatagcacatgggaggtgtcatgaaccacatgtgacacctcagatcatggggtctgtggcccgaatggggcctgggcaggaggagcagcccagctgcactgcaggctcctggatggggcgatgagcatggccactttgcaggtgaggaatctgccctgtgactgtgggcccctccacatctctgcctgacttttgggaagaccagagattcatgtccaatccggtactctggcagtgtctccaatttgcaatgaaaccgtttaagtgtcaagaaaagcagtcaggttaaaggaagtcaggggcaggacccaccctcgggttctccttgggtctttgggtggcagcagggcctctgcggagggtataagcagcagccactgtgtgtctctgcagccacaggccttgcctgctgccctcccggatgggctctctgggaaccagtgctcacattccagtctgtctcccgggtcccaggaagaagtctccctaattagccaccaagagcacgccgatggtcagtgggcatagcagagagctgctggcacgagggagccacagttctaaataaataaacaacatccacctgggaaacaattttgctgccatctcagtggcccagatagtcgaacagaacactcgcctgctgcttcctctgctctatgtgctgggaggacatgcgaggctggaaaacagctgggccaaggcctggagatgtgaccgggtatcctgagaaaaggacttgggtgcaggtagcttatttgggaggtgatcccaggaaatacagtgaggggaagtgaggtggggacaggataaaagccaatacaatgtgcatgaataagctggtcacctctgtgggcaaccgcggctcactcctgctggggaccttctgaggaacggcgaggagcgtgtctcagaactgttcaatgggggatggggacgttggggtcttctgatccctgcaggttgcgggttatacctggggatgttaaatccccaggctgcctggcccactgcttgcgtccctgggaactgcctgcagctgtaggtgagctgaacccacagtgggctgaagggccatgggttggggcattaactgggccagctagagttcccagtgctaaacctgagcccgctcctccagatgctcatttcttcttccagtgtgattgattacaggggccattccccgtgggaagctctcgcagtcgctcctggggtgagggctgaccctctggccccgagaaggcacgtagcaggggtggaccttgtatttttaacaaccaggtgagtagcatgggtggccaggtgtagatgacctttgagtttccttcagagtctgagcttcagggtttcacatttccctacaaataaaatgggtcaccatgcattgagtgcaaactctgatagggagctagtgagagggctggagtctatctgggaggctctgaaaacaggagagtgactcattcagtgctagagaagagagggagatggtgggaggggaggagagggggagaaagggaaagactagagaagagagggagagggagggagggaaggagagggagagaaagagaaagactgacaatggcctggaaggtggaaggaagctgacagtgaagagctttaaatgccagccaagtctgaatttccatctagaggtgatccagtgctaacaaaggctttccccccggcaatggtgacagagactgtcactgctaactaaatgccatatcctggccctgggcatccaggtagagtcaggtaatgtgtactccttctctgaggcagttaagagagatgcttgctgtctctctcttgtccacatggcctgagacaaggacttggaaatggtggaggcagctttggagagggcctatgtggggggcacccacctggcactggacggtgctaggagagagaagcaaaccctgtattaagccattgtgatttggggggcatgtttgctattgcaacatagcctatcctagcctgactgataaaagaaggcgttgtaaaaataataagcattggcctgtcacggtagctcacgcctgtaatctcagcgatttgggaggccaatgtgggcagatcacttgagctcaagagttcgagactaacctgggcaacacggtgaaaccctgtctctacaaaaaaaaaaaattcactgggcatggtggtgaacacctatggccccagctactcaggaggctgaggtgggaagatcacctgaaaccgggaggtcgaggctgcagtgagctgtgattgtgccaccgcgctccagcctgggtaacagagtgagaccccatcctaaaaaaaaaaaaaaaaaaaaaaaaaggaaaaaactaaaacaaaaagcccaatacgcttgatgtagcattcactgcatttcttccttacaaccttcctgtggcattagcattaggattccaatgctactgacatgaaacaggcagaaaaaggagggatttaccggaagtcaccatggctggcctgtgacagagggggactcaagcccagctctctttgattctaaagccgtttcacttcacaggattcctcaaagtctgtcgtgcatgccactggcagaaaacaagaaaattttcagtgatatgtggatgaaaaagctaaatttaattagttttgaatttatttgaattttatattgaatgagtgtttattggaataaataaataaaccgtacatcaaaccagtgatttcatggctattatttcttataaggcagagaaatttttaagaagtgagttggtttagagtgaattaaacaaaaagattaaataaatactggtaaaggcgtatatggatactgccaaacagctgatggtgggcaaagagtgaagggggcaggctgccccggctgatgttgcatttgtgttagctaggtcattgcgagataaccaggtttgctctttagggaaagagctgatcctgggagcactggggagggagtcctgtgtgcttcccactgaaccacactgcccaggggcctctccgtggatcacagatgctctctcttgcatgaaacactaacggctttaagtttctggaagcccgagggatgtgaaaacaggaggagggaacagcagagcccttcacagctgcctgtttgacttgtgagcaaccttgcagaaggccccttcgtgcatttttttttccttctggctcataccggacacactgttctcaattttgagtcctggggaaaaatgtttcacatttaaaaaacacaaatattgattttctttccttaatgtatatgctgaacttttagatctcctctccaccaccgcccccaggccttgcccctgttatagaatgccaaagctgccttttttttttttctggtggtgttcggggggggacccatctctgttcctgaaaagttacctgtagtgtatttctgcagctctgctaatgagcggagaagtgacacagagaaggcgcctgtgttcttccgaggagcccatagaactgccattcagaggtggagctgaaagggctgtttcatgggccagctgctgcccagctaacggagccttgtgccctgagccctggacacagccctggccgtcaggggggttggggtggggggagcagttggtgaggagaccccagctcacgttctcctcgttcacctccagcatggcacgaggacagcattgcgtttctcaccgctggtcaccgtggatggcccttgtgtgaccctgggtggtttatagggaaatggaacaggttcgtagttagttttcattcattccttcatttgctcaccagagatcctgtgccaggcaccatgctgggtcccagggattcagtggtgactgagacgggcaagccccctgctcggagggagctcacgtccttggggagacaggtaacaccttaattacaccattttgggaagggagaggcaccaccatcatcacaccttgcagcatctctggagaagaattcgacttcaaagttgtagcagaaaaaggaatcagcagcttcaagtggtttttggaattggggagggcagtgaattaggcacacatgaaatataaggggaaaaagtcagaaggcaatgctcttaacctcctccttctctaacactggtgcaaaggggagtgaggcctgagctttaggcttggctctgcccctaaactggctggtggcttcgggtaagtcagtgaacctctctgggcctcagtttctccatctgacaaatgggccaagagactcaaatctgctgacttcacaggtttgttgggtgagcaaatgagatagagtgatagaatgagtaactgccatgtcaagggtggaagggattgttataattattgctaaagagtgtggtagcggtgagttgggtctgctgcacccagcagtcgctttttgtctgtacatttccttttattgaggtataatttacacagagtgaagtgcataggtcccaagtcttaggattctgcctcctggagcaatgacaatcctttaactccatttccacttctgtccccctcttgcccctcacatggggcaggcagatcaagaacgaccattcccactgcaccatggcaagctgaggctcagagaggttaagtcaccagctccaggtcacacagccagttaggagcagaagtggctttgaacctggatctctcaggtagccaagcccatgctctttctgctctatctcatgaactacttgacccaaatgcaaagaaggggatcgttcctgctgatgttactttgtttagaaggctttatctttgccttctctgtgctgggcctgatgcagagttgaatccactggctgacaggtgaggtgggccaagcagggacccacagggggaagagatgggcagggagaagccacctacatcaagctacactgagacagcagcatggctgagagccgggcctggggctctatcctggcaataacacttcttagctgtgtaacttcagacaagttattttacctctctgttctttaacagtagctgctttaaaaagttgtcaagaggattaactgagaaacctcatctaactcctttgctccttgaatcaaccctaggaggcgctattaccatccctagtttccagatgagcaatctgagacatgagaggtgaagtcacttgcccatggtcacacaggtggtttgctggtatagcaaacccaggtaacctggctcccaagtctgtgctcttaaccatggtctccactgccctgcccatactaacagtgaaggtacatgttagccctaattatgaccttgaaagattctacaaggcagagagttagtgagaggaaaggattctgggcagatggccctgcatgtgtgatggcctggaggccttcgaggagaatccaggggtagctggagagcagggcgtgtgcggagagcagggcacagtgaggctggggaaggggaagtgaatttaatgagaaacttggggttgtgagtgggggaaggatttgggtgtgggatgaaggtgcaggacagggctgggccgggccattggactcaggtatgcctaggcttggggtggagcttcaaggcagcgcgggctccagcccctggaagagccaccccccacccacctgagatttcccaaattccagctgccgctctagttgcttctgcaagcaaaggagcccttgtggtcagaggggcctctgaagcctgggccaggctctcccgccctctcagggcacacacacctccattcagcccaagccccgccctttgggggggctgggggccagggcgggctgcccccacgtcagtcgtcagttgggggccacctgacccaaaggctgggcgggcagtggggttgataagacctggaccccactggtcccacaaccgtgccggctgctgcccgtgctgccagaactatgagggtcctctctggcactagcctcatgctctgcagcctgctgctgctgctccaggccctgtgcagccctggcctcgccccccag

SEQ ID NO: 1500 - DNA, 2223 bp, Homo sapiens
cttccccttctctgccctgctccaggcaccaggctctttccccttcagtgtctcagaggaggggacggcagcaccatggacccccgcttgtccactgtccgccagacctgctgctgcttcaatgtccgcatcgcaaccaccgccctggccatctaccatgtgatcatgagcgtcttgttgttcatcgagcactcggtagaggtggcccatggcaaggcgtcctgcaagctctcccagatgggctacctcaggatcgctgacctgatctccagcttcctgctcatcaccatgctcttcatcatcagcctgagcctactgatcggcgtagtcaagaaccgggagaagtacctgctgcccttcctgtccctgcaaatcatggactatctcctgtgcctgctcaccctgctgggctcctacattgagctgcccgcctacctcaagttggcctcccggagccgtgctagctcctccaagttccccctgatgacgctgcagctgctggacttctgcctgagcatcctgaccctctgcagctcctacatggaagtgcccacctatctcaacttcaagtccatgaaccacatgaattacctccccagccaggaggatatgcctcataaccagttcatcaagatgatgatcatcttttccatcgccttcatcactgtccttatcttcaaggtctacatgttcaagtgcgtgtggcggtgctacagattgatcaagtgcatgaactcggtggaggagaagagaaactccaagatgctccagaaggtggtcctgccgtcctacgaggaagccctgtctttgccatcgaagaccccagaggggggcccagcaccacccccatactcagaggtgtgaccctcgccaggccccagccccagtgctgggaggggtggagctgcctcataatctgcttttttgctttggtggcccctgtggcctgggtgggccctcccgcccctccctggcaggacaatctgcttgtgtctccctcgctggcctgctcctcctgcagggcctgtgagctgctcacaactgggtcaacgctttaggctgagtcactcctcgggtctctccataattcagcccaacaatgcttggtttatttcaatcagctctgacacttgtttagacgattggccattctaaagttggtgagtttgtcaagcaactatcgacttgatcagttcagccaagcaactgacaaatcaaaaacccacttgtcagttcagtaaaataatttggtcaaacaacagtctattgcattgatttataaatagttgtcagttcacatagcaatttaatcaagtaatcattaattagttaccccctatatataaatatatgtaatcaatttcttcaaatagcttgcttacatgataatcaattagccaaccatgagtcatttagaatagtgataaatagaatacacagaatagtgatgaaattcaatttaaaaaatcacgttagcctccaaaccatttaattcaaatgaacccatcaactggatgccaactctggcgaatgtaggacctctgagtggctgtataattgttaattcaaatgaaattcatttaaacagttgacaaactgtcattcaacaattagctccaggaaataacagttatttcatcataaaacagtcccttcaaacacacaattgttctgctgaagagttgtcatcaacaatccaatgctcacctattcagttgctctgtggtcagtgtggctgcatagcagtggattccatgaaaggagtcattttagtgatgagctgccagtccattcccaggccaggctgtcgctggccatccattcagtcgattcagtcataggcgaatctgttctgcccgaggcttgtggtcaagcaaaaattcagccctgaaatcaggcacatctgttcgttggactaaacccacaggttagttcagtcaaagcaggcaacccccttgtgggcactgaccctgccactggggtcatggcggttgtggcagctggggaggtttggccccaacagccctcctgtgcctgcttccctgtgtgtcggggtcctccagggagctgacccagaggtggaggccacggaggcagggtctctggggactgtcggggggtacagagggagaaggctctgcaagagctccctggcaatacccccttgtgtaattgctttgtgtgcgacagggaggaagtttcaataaagcagcaacaagcttc

SEQ ID NO: 1501 - protein, 260 aa, Homo sapiens
MDPRLSTVRQTCCCFNVRIATTAIYHVIMSVLLFIEHSVEVAHGKASCKLSQMGYLRIADLISSFLLITMLFIISLSLLIGVVKNREKYLLPFLSLQIMDYLLCLLTLLGSYIELPAYLKLASRSRASSSKFPLMTLQLLDFCLSILTLCSSYMEVPTYLNFKSMNHMNYLPSQEDMPHNQFIKMMIIFSIAFITVLIFKVYMFKCVWRCYRLIKCMNSVEEKRNSKMLQKVVLPSYEEALSLPSKTPEGGPAPPPYSEV

SEQ ID NO: 1502 - DNA, 2004 bp, Homo sapiens
cttccccttctctgccctgctccaggcaccaggctctttccccttcagtgtctcagaggaggggacggcagcaccatggacccccgcttgtccactgtccgccagacctgctgctgcttcaatgtccgcatcgcaaccaccgccctggccatctaccatgtgatcatgagcgtcttgttgttcatcgagcactcggtagaggtggcccatggcaaggcgtcctgcaagctctcccagatgggctacctcaggatcgctgacctgatctccagcttcctgctcatcaccatgctcttcatcatcagcctgagcctactgatcggcgtagtcaagaaccgggagaagtacctgctgcccttcctgtccctgcaaatcatggactatctcctgtgcctgctcaccctgctgggctcctacattgagctgcccgcctacctcaagttggcctcccggagccgtgctagctcctccaagttccccctgatgacgctgcagctgctggacttctgcctgagcatcctgaccctctgcagctcctacatggaagtgcccacctatctcaacttcaagtccatgaaccacatgaattacctccccagccaggaggatatgcctcataaccagttcatcaagatgatgatcatcttttccatcgccttcatcactgtccttatcttcaaggtctacatgttcaagtgcgtgtggcggtgctacagattgatcaagtgcatgaactcggtggaggagaagagaaactccaagatgctccagaaggtggtcctgccgtcctacgaggaagccctgtctttgccatcgaagaccccagaggggggcccagcaccacccccatactcagaggtgtgaccctcgccaggccccagccccagtgctgggaggggtggagctgcctcataatctgcttttttgctttggtggcccctgtggcctgggtgggccctcccgcccctccctggcaggacaatctgcttgtgtctccctcgctggcctgctcctcctgcagggcctgtgagctgctcacaactgggtcaacgctttaggctgagtcactcctcgggtctctccataattcagcccaacaatgcttggtttatttcaatcagctctgacacttgtttagacgattggccattctaaagttggtgagtttgtcaagcaactatcgacttgatcagttcagccaagcaactgacaaatcaaaaacccacttgtcagttcagtaaaataatttggtcaaacaacagtctattgcattgatttataaatagttgtcagttcacatagcaatttaatcaagtaatcattaattagttaccccctatatataaatatatgtaatcaatttcttcaaatagcttgcttacatgataatcaattagccaaccatgagtcatttagaatagtgataaatagaatacacagaatagtgatgaaattcaatttaaaaaatcacgttagcctccaaaccatttaattcaaatgaacccatcaactggatgccaactctggcgaatgtaggacctctgagtggctgtataattgttaattcaaatgaaattcatttaaacagttgacaaactgtcattcaacaattagctccaggaaataacagttatttcatcataaaacagtcccttcaaacacacaattgttctgctgaagagttgtcatcaacaatccaatgctcacctattcagttgctctgtggtcagtgtggctgcatagcagtggattccatgaaaggagtcattttagtgatgagctgccagtccattcccaggccaggctgtcgctggccatccattcagtcgattcagtcataggcgaatctgttctgcccgaggcttgtggtcaagttagttcagtcaaagcaggcaacccccttgtgggcactgaccctgccactggggtcatggcggttgtggcagctggggaggtttggccccaacagccctcctgtgcctgcttccctgtgtgtcggggtcc

SEQ ID NO: 1503 - protein, 260 aa, Homo sapiens; identical to SEQ ID NO: 1501

SEQ ID NO: 1504 - DNA, 43313 bp, Mus musculus
aaaggaaaggaaaaaggggctagagagatggctcagcagttaggagcactgactgctcttccagaagttctgagttcaattcccagcaaccacatagtggccacaaccagctttaatgggatctgatgtcctactcacatgaacaaattaataaatagatatttaaaaagacagaaagaaagaagaaagaaacaaaaaaattcattaataaaaattgggcaacggatctcagttaatatttgtccaaagaagttattcaaatggtcacccacaccccagtaaacacacaagaagatggccatattatatgacttttaggtgaatgaaaataaaatcacaatgcccacactactttgtaataaagtgaatattaccaggggtgcaaagagatgtaactgtaaggaggcatgttagtggggatgtaagatgttagtggggatgcaggacattggtggggatgcaggatgttagtggggatataggatggctcccacagccatagaaatcagtctgaaattccatgaaaactccgcataggaggcagcaaggcagttcagtgggtgaagagcttctctgcaggtctggggacctgggtttgatccccagaatttatagtcggaagggggaacaggcttctgaggttgtcctttgacctctatacagatgccccccgacacccagacacacaccaatcacaaagaaaataaattcagctgagtatagtagtactcagattaatcctagcactcaggaggcagaggcaggaggatctctgtgagttcaaggccagcctggtctatatagtgagtgccaggacagtcagggctatataaggagccactgtctcaacaagtaaatagacaattaattaattaattaattaattaattaattaattaaatgtaaagttaacaacaacacacacacacttgggaggctgaggcaggaagattgcaagtctgagaccatctttagccacttagagaaattttactgcagaaagaaagtgcctgcttcacctgcacatcttctaaacgtgaagcgatacatagaagatttgaatgatcctcacacaagggagacccacaaatccaaaatcatttgtattttcaaaaacggaaggctgggtgtggtagctcacactcagaaggcagaggcaagtgaatttctgtgagtttgaggcccacctggtctacatagcatgttttaggcttgtcagagttctatagtcagactatgtatcaaacaaacaaacaagtaataaataaataaaattgaaaggtttttcagagacttcaatgtaacgttcatggtagcattactcacaatcaccagaaggtggtgctgtcgtcaaaggtgttccttccgaaaggcaaccgcgttaaatctcctggaggtagttttaagatgggccgctgtgaagaggccaccaggtcccaagggctctcttctcttcagctgagttaaggatcttatgatgaggttcagctcttccgctttgactttcctctgtgtaatgaacacagcattaagaggtgctgccctcactggacattgaaagctgccgtcgccttcatctctgattaaacacatttctgttttttaaacctaaatttaagacggcattgggggtggggattgccgcaggtcagaacaatttgcagttggtcctcttctctcatcctgggggtctaaggacttttgttcattcactgagcgataccgaaactttggccaggagggctaaatgttcagggctctgaattcttgaaaggattttccgggagggtcaggtttactgtggctatagagtttgactgaagccacattggcccagtttttgagtttatagcagattgtccttgtatagccaccgcttcttccagggccacttgagggtgccctggatgatagcttcagctccgactcggcgctggacttcccagtcttccacaaagattgtggtgttggttcatgagacacataagccttggtggctgagtctgtccagacaccatggcgcctcctccttgtgtagtttagagttctgactggcttggcctttgggatgtagtcctggatggcttggggctttaagtaattaagattttcctcaggtttggtggagagatccattgagatgtaatttaggcaaaaatctgctttaggaatgtccaggaccctgactgcaaagcctgggggtggcaggggtaggagagctaaaagcaactgacagagcattgagaatcccacactttcatccactttaaaggaagggttctgaatttaacagattaaagaaggtggcagatgggctggtgagatggctcagtgggttagagcacccgactgctcttccgatggtccagagttcaaatcccagcaaccacatggtggctcacaaccatccgtaacaagatctgactccctcttctggagtgtctgaagacagctacagtgtacttacatataataaataaataaatctaaaaaaaaaaaaaaaaaaaagaaggtggcagataggacattagttgtggatgactccctctatagctggagtgtctgttctgacaccaggaacttgctgtgtagccaaggctggcctccaatttacagggatccaagtgccaccttcatctcctgcttagtgggtgttctgtttaatcttttattttgagacagggtctcattaagttgcccagaacggcctggactcagtctgttgccatggctggtctagaactcccaaagagctccctgcatcagcttctagtgtgctggcattaagctggtgatagtgtggtccaggagcaatcttcccacgtcagcccctgtggtgactgatatttacaagttggtgacaccaggccctaatccttttttttttttttttttttttttaatttttctgtggtcaccaaactggaatttacttcttctagttgggtttttgtttttttgtttttgtttttgttttttttgttttttttttgaggtggaaagaagctaactttaaatcagttttcagttacattattgctatgaagctttcagtctgattctccttccaaatgctcgctccttccttccttccttccttccttccttccttccttccttccttccttctaatgcagatgctttcttttggtggctgtagatggtagttttatattacacttccaacaacggttaacacttctatttcactcatagattctttgaggctccccgaagcaccccgccactttctgtcatggcattttgtaaatgttttattgagtctgaggacgcctcccacggattccctgacttccttcgctcacggtcgtgtcggtgaacaactagtcatagacataactgtggacttgttttggttttggtttttttagagacaggatttctctgtgtagctttggctgtcctggaactcactttgtagatcagggtggcctcgaactcagaaatccgcctgcctctgcctcccaagtactgagatgaaaggtgtgcaccagctctgtctggctagtattgctttctttgaagaaaatggatagacacttttttgtttgtttgtttccagtttcctcaaaggtatacccagccaatgctgctaaagacacaaagaaacaaaacgtggtaaacaccttgaggcttagctacaggaggaggaggcaggcagatctctgtgagttagaaaccaacctgatctacagtagcaagttttaggccaggcagaacatatggagacactgtctcagggcaaaacaaaacacaaagaaagacatgatgtgtaaaggcagagtttgacagcttagacattcagcaaacacaaagtaacaggacgcatgcgctgctatctcaggtcagccttcaagtagctgttaaccctgttgactggtgtctcttgctcttctcctggactctgatctaagctgtgctttcttgttctgagacggggtctaaaaggtctcctggactctaaaaccagctgccctctatgcatcgtctctcaaggctcctctgtgggcatctcctccttagctagagttctgtttgagtttctttcgtctcagcaagggtctttcttcttccatgactccaaggtcgtatctggtcatgctcagaacactacctccacatgcagatccacaatcccctcaaacatctgtcttttatgggctggagagatgctcagtgggttagagcacttgccaagggccggggtggactcctagcacctacacagtggctcacaaatgcctgtaagttcaggggagccaacaccctcctctggctttcaagggcaccgggcaaacactgggtacacatgaatacatgcaggaaacaaaaaacacaaataaaaaacctacacacattaaaaacaaagactgggatgtatctcggtggtagaaagcttgcctagcaggcatgaaaccctaagtttgagccccagcaccacatgaactgagcaaagtgactaaggcctttgatctcagtacttaggaggtagaggcaggggaattagaggtcatctgagtatatagagtgtttgagcctggaatacatgagactgtgtctcaacatacaaacacatacagacagacacacacacacagagacatatacacaggaactcagatatacacatacacatagacatacatacacatacatacatacacacaaacacacgcacatatacacagacactcagacatacacatagacatacatacacacaaacacgcacacacacacacacagaggcatgcaactattttcctggctagagatgtactaaaggggttgaaagtataacttcagggcgcaagacccaagcactgcagaaattaaaaaaacaaccctttcagtcttcatttcacacttctaagagatacaaggaacccacaagctagagacgctggagttcttgctgctctaacagaggacccaggttcaatgcctagcacccatgtggaggctcacagatgattgtaattctagtgctaggggtccaacatcctctggtggcctccttggggaccaggcacactcgtgatggacctacatacatgcaagcaaaaccctaataccatataaaataaatgagatctcaaaaacaaaaacaaaaaaaaaacaaaaacaaaaacccaaagccaaaccaaaagaccttactaactagatgatgtgatgtctctccatatggatctagaagctagcatgtcaaaacaaccctttttggttttggcactgaatgtcacctaatcttcccttttgtcacaagtcccgcaacacacacacacacacacacacacacacacacacacacacacggctaggcatgttgatcattatttacatctgcccttcccttcccacctcctaaatgaaatccactgggcatcctgttcactctagcaccacgcatgtcttgaatcctttacttctctccactgtgacctctaacccaccacctctagcctagagaactgcaggagactcctaaaatgatagctaagcatttattccagcccgggaccatcaattctgatgtaattgttgtctggaaggcttactgcttctgtctgctaacccaggctacaagcccaggtgcactcttttttttttttttaaagatttatttatttattatatgtaagtacactgcagctgtcttcagacactccagaagagggagtcagatctcattacgggtggctgtgagccaccatgtggttgctgggatttgaactttggaccttcggaaaagcagtcaggtgctcttacccactgagccatctcaacagcccccaggtgcactcttttctgggcttagaatgttctcagcctctgagacttactgctgaataagctccccttttctagttctttctgatctctgattggctggctcaattcaactgttgtgactcaaactccactccatgctaaccaattcaatctggtttctctgggcttctcctggactgctctttttgccctcaaactatctctgtcaatctgttcaaatcttctggctccttctccttctctggcttgttctgtcttcccctgtgtctagtttgttctctctctgcagcctacctctgtaccactgtcccagtaaacctgcctccctctttttcctctctctacactgcctcttaagtagcttccctttctctctcttctcgtgagttgggaagacccgactctgtcaaatctgattcttttgataactttgaccactttgtctgccattcaattggacattaatttcgaccttggttgcttccgtctacaaactaattttacattcattgtttgggattaaaggtattcactaagggtgtatgtgcattctagctagagggattaaagctgctgggctgaggctgagccacaccacaaacacaacctcggggctcatcgtgtgatcagatctcctgcaagaacagggtctcacggaaaccaaaccagcatcgacatcactgtgtggagaaaaatcaccttgaatttcgaattctcctacctctatctcctgagtgctgggattataaatctgcaccattgtgtccagtttatgcagtgctgtagactggaacctagggcatcctaaaggctgtacaagtttttaacacttggcctcacatgtagcccccactggcctggagctaactacatagacaagagcagactcaaccctttatcaatcctgcctctgtctctgataaatcttttttaaaaaaaatcaggcttactttatatgtatgaatggtccacctgtatgtatgtatgtatgtgcaccacttgtatgtcccctgactcccctggagttggggttacagatgtttcaacaccataaatgtgctggaaactgaatttaggaatctgaaccagctcttcctcctgagtcatcgatgcagcccctcagatcaatctttcgaaaagacaaactcagtcatgtgactccttgcttaaaaaaaaacaacaaaaaaaaaccaacctgccagtaacatctttcctatttatttattgccttgtataatccactatgctaaaaccccattcggagccagggagtggtggtatagacctttaagcccagcattcaggagacagaggcaggtagatctctgagtttgaggctagcctgatttccagagcaagttccaggacagccagagctacatagagaaactcccatctcaaacaaacaaacaaacaaacaaacaaaccaacaacaacatcatcatcatcgatccacacagggcccgaggtgctgcccacaatgccctgtccacgctgtaggtatcctttctctccctcttttcctctgaggcccaggtacatggggcttttctcccatctcagggccttctctctctgcagagaatactcttggttaaatcaggaggctaaattcctcttgactttgagatcttggcccctcagaaagttctctgcgtctgagcacacggctggccagccaccacaaaaaaaaaaaaagaaagaaagttctccgttttatcattctatcatctcggtctatcctacctatctcccccacacacccccatcctcccgtcctaggtctgtcctctttccttgcaggatttttttttccccctttcttccttttttggtcctttgcagccctggctgtcctggaatttgctctgtagaccaggctggcctccaacacagagctcggtttagttttggcccctgaggacaaggaactgaggtgcacattttacagatcaaagcagacctggcctccaggttctcccagcatccctcagtccctatctggcacaccctgcccccaatcctgaactttccagcccaggggctaggctgcccttctccagaggcacattttgttctcttgtgttctctctctctctctctctccctccctccctctcctccttcctcctcctcccccctcctccttctcttctttctctgctcaccatttttcctctttctctcccctgacctttgccctcatggtgactcccctggccttaatccttggggccagtgaacttgccagagagcccaataaacctccatttaatataatgtaatctggcttgaatttggcttgtttcatggatggagaaataatttatcaagatccacctgcctctgcctccctggctgtggggttttttgcttgtttgtttttaaagacagggtcacatggagcttagctagactcaaacttagtaagtagtgaaggatagagttgaccttctgatcctcctgcctccagttcccatgtactgtgattacaggtgttactgctatgctcaacttacggtttgtcttttcatttatcatagccccttttggctaatttgccaaacaaaggcagagatcatgtctggcttattgattgtgtgcataagccagaattgtcacatagtaaatacttaacacgttattcaaggagggtctggagagatggctcagtggttaagattacatactgtttgtacagtattcatgtcagacagtttaaaactgcctgcaactccagccctgggggactccatctagccttgataggcactgcattcacacacacacacatacacagaggcatgcacactcacaaacacatttttaaaaaaagatttatttatttattttatgtataggggtacactgtagctgaacagatggttctgagccttcatgtggttgctgggaattgaactcaggacctctgctggctccagccttgctggctccagccccaagatttatttattattatatgtaagtacactgttgctatcttcagacacacactagaagagggcatcagaccccattacagatggttatgagccaccatgtggttgctgggaattgaacttaggacccttggaagacagtcagcgctgagccatctctccagccccacaaacacatttacaagtaaaaataacttttaaaaaaggtttattgtatgaatgatcatcgatattttctattcctttctttcctctcacttcctatgccctacctctttttctttctccagtgctagagatcaaaccaatccctaagtctcacacacactagaacggacagatcaattagctccatattaagtgagggggacacagagacacacacacaaactaaaatgtattaaaggttttgggtcatgtacagatggcctccatacacacacagccaaccgatctcaagagtatcatggccaccgtgttcctattgcctttaattctagcttcaggtctctactgttttaccattttacaactgcccatcttttgtaagtgcacgtgagtgcaggtgcctgctgagttaagaggcatcagggatagccctgcagctggagttacaggcgatctgagcctccagatgtgggtgctgggaaccaaactttgcaaaagcagcattcggagccttctctccagcccatagaggacactcatttaatatcctgcttttcccctccgcctgctccaaagatagactttcctccttggttgccagtgggtttaaactccggatggtctcgtagttcgaatccgacgttgcccgactgtcaccccaatcccacactccttcggctagcgggaagctccatggcaacccaaaacatcacaacttcatcgagtatcgcgagaagctccaatgctccggcagcccccggagaggcggagcgagggcggagcctcagcgggcaggtgggcggagcccgagggcttccgctatcctactcggaagacgctcttttcaggcggcgcccccgcgtgactgcgctttacataatcgcggccccgagcgtcacagtggcgtagtccaacccggaccgaatcagagccgtcgggaactccacgttccgccccctcccgcgtgatcgacgtccacgcgagccagcgaacggcctctgagcaccggagagcccgcccctgcgcccgcggcccgccctcgcccgcccgccctccgcagcccgcggcccggccgccgccgccaggttgtgcctgagactgtcagataaagcggcgggccggcgggaggggcggcggcgatcacggcccgggccggacatggcggcgctgtacgcctgcaccaagtgccaccagcgcttccccttcgaggcgctgtctcaggggcagcagctgtgcaaggtgcgcgggctggggcggcggccgggagctggggacgctccaggcgcggttcggaactctcggtccagcgaggacggctgccggggtcccctcgggcagggtgtggccggcccgttttgcggacgagctgagccgggcccgcagaggactgcagggtacttgtgggagccccgggccgagtccaggccctggcagccggcgtgtcctggtgcttagcaacggctggggtttcttctccgacctggtgaggtcgcgggaggggacagctcccctgtttgtccccgactggccccccgggaagatttccttggaccgccttctcttctgatgtggtcgtcttgagtgtagaatgacggtccagagatttcccttgtcctggatgagattgaaccccggaatcaggtgctgcttgtgaggagtgttttgaactctggacacttcgtgggcactttacagccgatctcaaagttagaggtggcaaggctttattagggaaaatgaaaaaagtaccccaacagtgtcttggaacacacacgaacagggtgactttttagcatctaattggtagccttcctcctcatcctaagcattttttaacccctgaaatgccagcgtttttatatataacttcctcccacctcgtcggttcaagagagcaacagttaagtcggcaagctcgtgcagagttgccgttgacagatcctcagatatttcagataaagaatgtgtgtctgtgtccgtccgctgtgtgtagttcacctccccgcgtccccccaaaaagatgcccacatactttccttaagccacttgggtttactgagtccgaaagatagtgtttgaaggcccccttggacataaaaactttgatctaaacatttttcttgtttgtttccgaggcagggtcatataacttgtagctctggctgtctttgaactctcagagatctgactgcctctgtcttccaaacgctgggattaaagtcgtgtactgttgctcagtctaaggctgtatgattctttgttgttatttttgttttttgtttttccaagacagggtttctctgtatagccctggctgtcctgaaactcactttgtagaccaggctggcctcgaactcagaaaatcctgaactcggcctcctgagtgctgggattaaaggcatgtgccaccacctcccggctcttttttttttttttttttttttttaaaggaagttcaataaacaagacagctttaatcttttgccttcgtatcacaagtgatccttctcattatcccacaacagcagacggaccagctggactcttacctagagagctaacgacccatctagagcttattcatgatatatttgttttaaaatctatgagtagttcatacagattcctactcccacatcaacagcagggaagtgatacgcatatagaggagaaggtccagagagttacatgactcacccaggcctcttgctagcaacagttagtacccagtctgcagctttttactgaattcagactttctgctcctctggtccttttcagactgtctcctttcatttcaggaatgccggattgctcaccctgttgtgaagtgtacctactgtaggaccgagtaccagcaggagaggtacagttctccttgacctcgaaagatgttttttgtttttcttgttcttttgtttatagttgttttgttttgtttttgagatggtagtccaggctagctttctttttttgtttgtttgttttcttttttggtttttgagacagggtttctctgtatagccctggttgtcctggaactcactttgtagaccaggctggcctcgaactcagaaatccccctgcctctgcctctggagtgctaggtttaaaggcagactggctttcattttgagaacagtctttatcttcaacctccctagggctgggattaaaaatgtgaaccaccacatctgcatagagaaatgtaaacagctctgggcgtggtgagtcacttctttaataccagcagttccattggctctgagtgcttaagtgaactgttcttccagaggaccagagttcaatcgaggcactcttaggagattccttgtaagtttacttccaggggaatctgactgctctggtctctgtgggcacctgaagagacaggtacaggacacacgttttaaaaaatagtaaaattaaaaaaaaaatgtaccagacatggtggcaaaggtctataaacctctacaaagaaggcagaggcaggaagatctctgagttcaaggccagccttgtcaacacagccagctccaggacagccagggttattatatagagatcatgtctctcttacaaagtcttatacaaaaatatcagtgctcctttaattgtagactgggaagcaatctggtctcagagtggaagttcaagaccctgccaggtttacacattacacggtgaaatcatgtcttaaaaataaaatgtgccaggcagtggtggcgcacgcctttaatcccagcacttgggggaggcagaggcaggtggatttctgagttcaaggccagccttgtctacagtgaattccaggacagccaaggatatacagagaaaccatgtctttttttttttttttgagacaggatgccaccacgaccagctggataaggtcttactatgtagactagattttttttttttaagttttatttttattgttaactctgtttgtgagctcagttgctggtagaagcttaaaggtgtcagaagccgctagaactggggtgaaggtggtagtgagccatggaatgtgggtgctgaaagtgaactctggccctctggaaatggaggaaatgtttttggtttttcgagacaggatttctccgtgtagccctggctgtcctggaactcactttgtagaccaggctggcctagaactcagaaacccgcctgcctctgcctcccaagtgctgggattacaggcatgtgccaccactgcccggctggatgaaatgttcttaaccccatatctctctagtcttaggatggtctcatgctcaagagacccacctgcctctgcctccatagtgctgaggtcaaaggtgttcaccgtctgcgaagctaaatcttacagagaggtagtcagttacattgtatacaagttatgtgtttcttgtatattaatgggtttagagtataaacattatttcctgttaacccattgtttgcttaggttttttgttttactagtgtagttttctgccactttaaaaaagaagtggcgagctcagcatggtggtagagatctgtaatcccagggactgttgagacctttctcagctaaacaaaggtaactctacacaaatgatcaaggaactggaaagtaattaacaagtgactttaaacatttaaccaggctggcagagcactcagagagagagagagagagaccttgtctcacaaaaacaacaacagaaaccacacacacacacacacacacacatcatcatcatcatcaggcctttaactgcagcactggagaagcaagcctggtctccatagtgagctccaggtgtaagaccctgatgctgggcctccgctcaagtcccgggatgagctggccaacacccaacttctcgagagaaaaccacacctgatgcaaactgcaagaggttttattatcagctagctgaggactagccgtgcagggcaggggagttcgaccccaagaggtgacagtagggggttttaaacaactagctgaggaattgggaggagttgggaggagttgggaagagttcttctcttccgcgtgtccttggtgaaatttacaaggcaggagtggggagtgagttctttctgaatttttatctccgagtcctcggcacaggaaggcaggcatctctggttgtaaagtatagaaacaaaaaggctttttgctggctatagagaacaaagagcttctttctggctgtgtttttagagatcagggaaaacaagcttggggaacgtccaggggctttaccttccagggagaaatgctctaagtcggggttccacacaggcagcaccaaaagtaagatgatgaggtcagcctggggctcatgctgcagacacacatcttcctcctcacctttgagttctcacatactcatctgaagccaagagaattgacttcttttctggtgtttcctttcatattttgagggatttttctatatgtggtagttttatttagggatatttaaagatgtcataattaaagctgggcatggtggtctcacagatgtagtcctagcaacaggaggtcaaagccgtccttctcagctacattagtgagtttgaggccagcatgggctacatgactaaagttccaaacctgagggtgggggatgggatgtggaacattgtctgaagtaacccatttaaactaagttgtcattattagtttaccaaatgcccataccatgtcggctgtcccctagcacctaagcagtgacaatttccttggatttaagaggattacgttttcaggtgttctaaggaaatccttgtgtttccttttttctttaacagtaaaaccaatacaatttgcaagaagtgtgctcagaatgtacagttgtatggaacggtaagtagcatttccttaactaagtcctagcaagaatgagctggagtgatggctcagtgctgagagtgcttgttcccagcagccacatggtggctcacagccatcagtaacgccatttctttttttggtttgttaggttttttgtgtgtgttggttttttcaagacagggtttctctgtatagccctggctgtcctggaactcactctgtagaccaggctggcctcgaactcagaaatccactgcctctgcctcccaagtgctgggattacaggcgtgcgccaccacgcctggctgtgtaactccgtttctaagggtcctgaagccccttctagcatcttcagacagtgtgcacatgtaatgcacactcagacatgcagacacccgtacatgtaaaatagctttaacacacacacacacaactttgccttcccatttttccttcctctccctcctctcttctttgtgccttctgtcctgagtatctgttgacacagcatgcatgtgaatatcagaagtaagctttggggagttagtgctcttctaccttcgtgagctctgggctttggcaagcacctttgcacactgagtcttctcttaggctgttttttggggtaacgttttgagtcagggtctcactaggtgaaactcacactgtagattaagctggcctcagaatcagaaatccacctatgtctgtattctgattgctggaattaaaggtgttcaccaccatactgggtatgtttttgtttttgtttagagatagagattcatgtagcccaagctggcctcaaactcagctatgtcgtattgaattttttgttgaatttttatcatggattctagtgggttttagttgttatttttatttctttaaaacaaccctatgggggcggtgttactttttttttttaatttatttatttaaattttttttgttgtttttgagacagggtttctctgtaaagccctggctgtcctggaactccctttgtagaccagactggcattgaactcagaaatctgcctgcctctgcctcccaagtgctgggattaaaggcatgcgctaccatgcccggcctttttttttttttttttaaaggtttattttatgtatgtaagtacacagttgttttcttcagacacaccagaagggggcattggattccattacagatggttatgactcactgtgtggttactgggaattgaactcaggtcctctagaaaaacagtcagtgctcttaacagctgagccatctctcaagccccagagtgttcctttcttaagtgctaagaattggacttcatttgagccctgtggggcaaatgggtaatattggggacacatgtttaccatgtgtcatggactacaaagtaggatcattgcagtaaaaatgggccagtggtttaagatatactaatttgccctttctttctgcctaagcctaagccttgtcagtattgcaacataattgctgcatttattgggaataaatgccagcgctgcacgaattcagagaagaagtatggacccccatattcctgtgaacagtgcaagcagcagtgtgcatttgacaggaaggatgatcgaaagaaggtaaatgctgtgtttttctccttcctctccttcctcttcttcttcttcttcttcctcctcgacttccttctcctctttctctttctcctcctcttaaggagttgagttgggcccaaatcaggtggatgtgcttttgagacccttccctgcctctgttaccaaccttgaagagttagactttgtttcttcattcatccaatcttgactattctaacatttatttaaataaaggttttttgttgttgtttttgattttgtttttgaaacagggtttctctttgtagccctggctgtcttggaactaactctgtagaccaggctggcctcgaactcagaaatctgccagcctctgcctcccaagtgctgggattaaaggcgtgtgcctggctcataaagtattttgttaccttttttaattgtgtttatatgagagggatgctttgtttgttcgtttgtttatttagaattatttgtgcatgtttggcctgcatatatgcatgtgcaccacatgtgtgcttggtgctggagaaggtcaggagagggcatcagactccccggtcttggatttgggtgctgttgtattcaccatgtatgtgctgagaatcaaaccagggttctctacaagagcaacaagtactcttaacagctgtgccatctctccatcgggtctcccattttgcttttttaagacagggtcttggactagagaggtggctcttcagttagcagcactgactgctcttccagaggtcctgagttcaattcccagcaaccacacagtggcttataaaccatctataatgaggtctgatgccctcttctggtgtgtctgaagacagctacagtgtactcatacataaaatagataaatgattctttaaaaaaaaaaaagacagagtctctttgaatctgtggctatcttttgtttttcgagacagggtttctttgtgtaaccctggctgtcctggaactcactctgtagaccaggctggtctcgaactcagaaatttgcctgcctctgcctcccaagtgctgggattaaaggcctgcatcaccatgcccggcttgtggttatcttttaacttgctatatagaccaggcaggccttaagtgtcgagattaaagggctgtgccaccatgccctatctatttcttccctttacaattacattttgggtatttgcttttgtgttcttatgcacgcacatgcctgcccttgtaccccaggcacacctgtggcaatcagaggccggcttgcaggagtccgacctcctcctctgtgcttcccaggcctggcagcagatgcttttattcactgagctgccttgctggcccctatcatttctgttttgttttgttttgttttttgtttttttgaggcagaatcttaactccttatcctgtcttagaactcactctgtaacacaggactgagctaccaccagtgtcttgtctgtctgtctgtttgtctgtctgtctctctctctctctctctcagcagagttagagtttaataagaaagacgttggggccccgggaggagttcagcccctctggctgggttgagcacccagcacccgcatgacagtgtctaatgacacctgtcactccagcctcatctgatctccagaggcacccggttgcctgtggtacacagatgtctctgcagccatacacccatacacataaagaagataaatctaaaacatctttattttaaaggtattggcccagataccatggcacatgtcttctttttttttttttcgagacagggtttctctgtgtagccctggctgtcctggaactcactttgtagaccaggccggcctctgcctgcagaaatacgcctgcctctgcctcccgagtgctgggattaaaggcattcgccaccatgcccggctacatgtcttctttaacataggtgagacagacaaatctccctgggcgacatagtgaattcctagagacacagagatacttggtaagaccatgtttctctgtgtggccctggctatcctggaactcactctatagaccaggctggccctgaactcagagatctgcctggctgtgcctcttgagtgctgggactaaaggtgtgcaacataaataagtttttgcgtgtgtggtcccacactaagtggcttatgtacattgtcactgagtcctctgtgacttgccccaggctcacagggctggagtgtagctggttctagctgccccgtgcattcctggtgctcatggtctctccgctgaccgcaccctgtctcgtcttgtctcctctttcaggtggatgggaagttgctatgctggctgtgcacgctgtcgtacaagcgtgtccttcagaagaccaaagagcagaggaagcacctgagcagctcttctcgaggcagccatcaggagaaggagcagtacagccgcctgagtggaggcagccattacaacaggtaaccccagacacacggaggacagaggagccggcagggcgtgtgccgtattttcacaggcagttgaagacggtgttgtctcatagaagctttctgtggaaagactttaggaagtttcttgcttgccatacttagagttcccgtgtttcccagggccaaggaggtttctgtatcatggctctaaggtctgtggaacttctgattgcacttctcagccttactgtgcataagcttgtggggactggacattttgtttcctgtctagagacagcatttgaaatacatattttgatgaatagttgacagatattctagactttttcagagtaggagctagtcaaaagatgtccttcccttgatggctaaagcttccttttagaggatgtacaataatgttggggctttaggtttaattgtgtatctagcaggttttctcatggacggtgaggagagaagagggtcacctcacggggctgctgtgaaggctgactgcgtaggatgtggatagcagtctgttttctgatgatgggatccaatgggttttagctggtttgttattactgtcattatgggtttgtttgttctctaggcattagtaagtgctctcgtgggccagggctctgctgggaatacagagatgaataaaaaccatgctgctttcaatagtatgctgtctggtggagaagacagacttgtaatcaaatcattgaagtctaatgcaatgggcagtactttaaaaacttgtcaagattcagacgagaaaggcagttctaattaactgcctaggttatccggaaggctggcttccagagagcctgccgtgactctcccagttacagcgattggtcttgtcagatgacaatgaagcagggtcatcctctgagagggactagtgcttgcagaggaccagagggcatgagaccacacagatcccttgagatttgtgttgctggaaactggagcaggaggaggaaagggcctcgtaccttgtcagtggtagtgggcagccactgataggcccttcgagggaagggtgcaacctgtgttggcaggaattacaaaactagtagagaaggcactgaaaggataggtagccgaggactggaaatgtagttcactgtggtgtttgcctgatgttctcaagaccttgggtgtgacctcttcccaatggggctgctcttttgtatacgtatagatgagctagaaatgttctaggaacctcatctcaggctggaggtgactgtgctttcctgtagctctctggaggtggtcgcagaaggccagctgcagctgcatagtaagccagtctgagctacaggaaaccctgcctcaccctcacataccccaacttctcctacccttccccccactacacacatacaaagaaccatcctgatgatgccttgcgacagtaagaagggactggggagcgaagcttctaagaaacttggatgcatggttcatttgatgcgtgtgattctcagggttctcacgtggatgaatgcatagatcctaacttaagagaaaacaggaagggggaggaagaagttcagttttgaaatgttttgtttgaggttccagcggcattgtttaaactgatcctggaactgagaagattcaggcatgagttggtaggagtacattaaaaaaaaaaaatcactaagagcccaggagtggcagtgcacaccttttaacccagcactcatgaggcagaggcaggtggatagctgtgagtttgaggccaccctggtctacagagggagttctgggacagctagggctacacagagtaatcctgttttgaaaaaccaaaataagttttttttttttaaagatttatttattttataaataagtacactgtagctgtcttcagatgcaccagaagagggtgtcagatctcattattggtggttgtgagccaccatgtggttgctgggatttgaactcaggaccttcggaagagcagtcagtgctcttatctgctgagccatctctccagccctccatgcctgttaaagccacgctgcttgatatataacttcagagcagagactgaagacagaagttggaagcattcagtgttcaagaatcagaaagcagccatcccaatataggatgtgtggtggtgaaggttccaagaaggagcgcactcactgaggtcacatactgaagagagagaggtcagatgagaagtgtggccgccgggaagggggctctgcagttaagagcactctcagagtttcttggttcatttcctagcacccccagggtggctcccaaccgtctgtagctccagttccaagggatctgatgtttctcttctggcctctgaggatgcacacagtgtgcacaggtacatgtacacaaaatactcacacatataagataaaatgatttttaaaaatggtatgtagcaggagtgggtggcattggaacacttgtcaatgtaaaggggtttcatgctagtgactaggaaggccaggagttgaactgcgcctgctctgattctcagcacatctttcctgctggagatcaatggtagctcagggaaccttgaagaagtcgtcttcagggccgagaggataacttgtctgtttcccagaactgtggggtggagggtgcatttgattcaggaaacaaaggctgtttcttactgcactgtcatagttctgttttatagtgattaaatcaggatggttttgaccccatgggaactgggatctaagtggactgaccctgtgaaacctcctcggttgattttactaattaaaaataataagctagtgcatggaagaaattgtttgtccatttcacagactttccttggagtgcgttactaatctttgatttctaatctctctctttctctctctttgccatcaaaagccagaaaacactttctacatcttcaattcaaaatgaaatcccaaagaaaaaatccaagtttgagtcaatcacaactaacggagacaggtgagccagacggagtgtgagtgcatacttggaacacacacacagaacttgactacactgagcgtgaacctcggagttagccaggctcccaggtggaccagttacgagtgctgtgctagtcaccttagagttggtagataagctgtgctggtggctgtttatcaactgaatataagaacttagttggcatgctggctcatgcttgtaatctcagaatttgggaggttgaggcagttgggtggccttgagttcaaggccagtctgatataaataaatagttccagaccaccttggactacagtttgagaccctgcctcagaaaacaaaaacaagatatttgtgtgcgatggcatattcttttaatctaggatttgggaggcaggggcagataaatctctgagttcaaggccagccagggctacagagtgagaccccatgcataatagaactagtaaccagattaactgtagtcaaattcttttttttttttaagatttatttatttattattatatgtaagtacactgtagctgtcttcagacactccagaagagggagtcagatctcattacagatggttgtgagccaccatgtggttgctgggatttggactcaggaccattggaagaacagtcagtgctcttaactgctgagccatctctccagccccaggcaaattctttagtccactaagaaggcctaagtgaggtgccgaatatcctgtgtgtctgtctgcagcctcctctgggaggagttggtttagagacaggcagaggtggggtgaaggcagggctgcatgtctgacaggatagtccttgcttccttggagccttcctctgcagatgctggggcaggcgagagtgcgatacagttcaggattttgtttgattttggcctgcctaaatgcatattttcattcctcgatttcctctcttctcagcgatgcttcctctcatgagctgcattgtcctaatactcagagcccgtctgtgttggtgcagtgggctgcttcccaacagagtcttggagccatccattttcctgtttctccaggcccaggcatcctgaagtgagaacacccaaaggctttggaatcttcttcattctgaacgctggcattcacagcactcccttccagcctgtgggcctatgggagcggccagcagaggggctttgcagggctggctgttgctttctctcacaaagtgtgaagtatctggggagggtgctcttctctgtggcagattttatttacttgacttcaggtcctaccaacatagtctctgttggctccaatttaattggtttccaacttcttgaacgtcctggcaatgcttagccttttcagactgcatatgggaaggaaccctgcagactaactttctggtcccttctcctgtttttttgagcagctagtcttactgttctgaagaaaacagatgtgttcatcatctttgaccttgtaaaaactgcttcaagggccgggcagcggtggcgtgcacacctttaatcccagcacttgggaagcagaggcaggtggatttctgagtttgaggccagcctggtctacagagtgagttccaggacagcctgggcaacacagagaaaccctgtctcaaaaaaataaacaaaccaacaaaaaacaaaaaaacaaaaaaactgcttcaaggaacaattgaagccctagaaagtagaccactaaagcccagccccacactttcttttttttttttttttttttttttttttttttaaagatttatttatttattatatgtaagtacattgtagctgtcttcagacacaccagaagagggagtcagatctcgttacggatggttgtgagccaccatgtggttgctgggatttgaactctggaccttcggaagagcagtcgggtgctctaacccactgagccatctcaccagcccaagccccacactttcaaacctacctcttgtaccccttgtactgctcattgcccagtctgtgttagccttccagggagagctcatctctaagctccagctcagccagcccggtcttgagcagctctgcctcctctcagcttacttgttcttggggcatcatctgttgccttggatgcaccaagataaagccccaggctgatgtacacattgttgaaccacatctggccgcaactggcctttctgaatgggatgctagaccttaccttggctaccgggtcttttattatgtcgtcagagaagacgatgaaggccatttcccatactgtttttgagtgtgtgtggcagtaaagtgctctactgctggcctggatctctagcctcatactaactgtaaaaggttatttattgccatgtatgatggcccacgcctttaatcccagcactcaggaggcagaggcagacggatcgcttgagtttgaggccaacctggtctataaagagagttccttgctagccagggctgttacacagagaaaccctgtctgacacccccactccaaaattatttttattttattggtttctctgtgtgtgtgtgtgagctctgtaacttgtatgtagttcaggctgacctgaagtcattgactcacccagcccactggttacaagatgtgccgccatgtccatcttataatttgaaatttaggaaattctatttgttgccacagaaatgttcatttataaacacattccttttgaatgttcacacattactagtgcttctaataatgttgtctacttacttgcattttctttaaattattgataacacagcataaagtatattttgctgtcctttttactttttgtggggtttgtcctgatcttttgcttcactttgaaagaaaagcattcagacactgggctggtggcgcacccctataatcccagcactcaggaggtggaagcagaagcaagagttcaaggttgggggtctggagagatggctcagtagttaagagcactgactgaagaaaaaaaaagagaaagaaagaaaaggctgggtgtggtggcacacacctttaatcccagcacttgggaggcagaggcaggtggatttctgagtttgaggccagcctggtctacagagtgagttccaggatagccaaggctacacagagaaaccctgtctcggaaaaaaaaaaaaaaaaaaaagcactgactgttcttccagaggtcctgagttcaattcccagcaacaacacatggtggctcacaactatctgtaatgggatctgatgccctcttttcttctgatgtgtctgaagagagccacagtgtactcatattcatatatatatacacacatatgtatatatctttaaaaataaaaaaagagttgaaggtcaccctcagctacatagggaggttaagtaagcctgcagtgcctgaggcactgtttcagaaacaatagaagcatttctacagttttttttatattaatattcaaacaatattttatttataaatatggaatatttaagaatttgcatattgtccttgggcaggtgttatgttaactttttattcaaattttagtgtttgtgtggctgaagcaaacacttgataaactgcctgtgttgcctgtatgtctgcgtgcctgcctgagtgcaggtggggcacatatctcatgtatcccaggctggccttattctctgagtagtggaggatgacagatgaccttaagcttcctgtcccatctctacctcctgagttctggagttacaagcttgagccattctgccaggtttatatagtactgggaatccatcccagggccttgtgctcactaggccagcactctgtcagccagatgcatccctaaccctgagggttctcatgtacttagctgtggggcagctgctgagtgacagagtacttcctgagcctgtgtgtaaggctctcagttttcatctctcaacgctttttttttaatttatgtttttactctttaatttttattctttgtgtcttccttttgttgcttcgtgacagttctatgttgatcttttactgtcatattctcttatttaatatggaggcatgtctgattctcttatttgagacagggtcttactactatgtagacctggctagcctggaactttctattagcatgataagcatggattacacttgatcttagccaagaggctaaggagcagttctggaactttttgtggagaccacggctggcttggacctcagggatctggctgcctctatctctgcctcccaagtgtaggatcagtgatgtgcaccgccgtgcctagcctcctctcttaccactgtcctttagctttccatctggaaactgggcagaatgcgttagcttagctgtgtctaatgctttgatacttacaagctgtcttagtttatttggttcttgtagcctacaaagtttacagtccctgctcagtctagtcttgtcttttcctttcctttcttttaaagatttgtttattttatgtatgtgagtacatccttgctctctttagactcaccagaagagtgcatcggatcccattactgatggttgtgagccaccatgtggttgctgggcattgaactcaggacctctggaagagcagttggtgctcttaaccactgagccatctcttcagccctagtattttctaattcactagttgtgacaaaagctttccagtgtgaggaatgtgagttagacagtattccttccttgagaaaacgcaccagtcacactcttcagtcagcttgctaaatgctccctttgtaggcagtccaaagtcaactccgcagtgggcggcagccaagtacctagtttgtcatttccaaaggacattttagatttcattttattctctgcccttgagctgtgtatagtattggggttcctaatggcctttgaagatggcctcaggactagtgtgttgtgttattgcaaacctgttttgatttcacccaaggaaaatagttgtcctgagagtgggtcttacagcatagcacaggctggtcttgaatttctagtctccttcctaagcctcttagcatagaacttgtcttgtattaaaagctttcagaaaggcaggaagtcctggagaagcaataagacccctgtgtggaggtgtttggagagactagctgtctgtcatgctaactagttgttgcttttcatttctagcactgtctaagctaagatctagggtcggagggatcaggccctgcccagcccaggataaactgggctggttttacctacagctgattggtgcaagagtaattactacggctggcgctgaagctcagtggtagagagtttgcctctcatgcatgaggccctaggtcagtcccctgcactgccaagagcagtcatggcacaagtaatgtaagaagcaggtagagcagaggattggggacaacaaaaagttacactaggacagccaggactctgtgcctttgcttgtgagagttataagtttaaatagacactgttgggttgagggaagatgcgtactgatgggtattgaaacagatacaaggaaccttgtagatctggccttggaggcgcctgagtgcaggctttattgctttgactggctcctgctcaccctgtatcagttaggggcgcatcagtctgttcttcctcggctgcgttgttcccggtgcttagtgtgcacaggatgcaggctgtgctttcgtcaggtgttggagccttccagccccagcctgaggaggggttgacttggtaactaggaggaagcagtgcagtggaaaggctgctgttttgcgtttcttcctgtgtagagaaatgctgcacattagctgccatgtaagattcagggaagagcaaatgcatgcagaggggctgtgagttgttgctctgttgacaaagggttaggaccagtgtccagggttgtgtattgctttaaagagcgttcagagacgtaaacacagagagaacgagaggacttctttcagaattccctggggaaagacaggaaatgacctttggcatggattcctattctgtcagaggagcttccggcacttttgaaaattttggatcctcacccagaaaacttcctgttgtagactcagaaaaggttctgcacatagagtttcagggctttatagagtccctgacatgggagaaatcaggagggtatgttcaaaggacaggagagtccccagtacgtgacagtggagagagcggaaagcatatggcctgcatgactagagttggccacctttgtccctttctcagcatcacagaattcttgttgttgtttgagacgaggtgtctcgtaccatttagctcagactgttctgaagttcactgtgtagcccaggctggcctcattcaagagcgcttccgatgactattgagattactggccgccattgcagcacggagaaagctagtcttcctcctgtgcatcccatcttttaggggagacttgctgcttccagggtaagggccatatttttgtaggagctcaacctcatcacaggacattagacctgagaatgtgcccaaaattgatggtctgtctaggattctagggaccttctctgatgacagctatgactgtcagcagcagtgcattggagatatggactgagcctggagcagtgcccgtggctttaagatggtcccacatatgagaagtcgtgggttgcggtttgggttggcatggttttctgatgacctcctttcctatgcagttcaagcctagcagatatggtgagtctgaggggtggagcaattcattgatggctggaattgagatcatttctgaagcccctgagtttaccatcaagtgacctggagttcaggaccggaagtgcatccttaagtagaaacgttattccattcaagttatgaaatttccctcttcctcttctctccagcttttctccagacctggctctggattccccaggcactgaccactttgtcatcattgctcagctgaaggaagaggtggccactctgaagaagatgctgcaccagaaggatcaaatgatcctagagaaagagaagaaggtataaccattaaccctttcaggccagaggcttacaaaagtaggatctgtcgaatggggtgtgatgcttactctctgttgggtacttgccattgcatagaataataaataaatcctaaaaagaaaaagggaaaaaaagtatttgaaaaataagagtggagatggagaggggttagatcactaaaggcattaaatcagaatatatcaaaatgtttatattcagggctggagagatggctcagcagttaagagcactgactgctcttccaaaggtcctgagttcaaatcccagcaaccacatggtggctcacaaccatccgtaatgagatctgatgccctcttctggagtgtctgaggacagctacagtgtgtacttacatataataaataaaattttaaaaaatttgtttatattcaaccctacaaaagagacaaagtatttaactacatagttagaaaaagatgagttaatttttaaaaataatagtgccggcaagatggcttaacagatacagttgcttgccaccaaacccaaagacctgagtttgatctctaggatctacatggtagaaagagggcactgacttcgtgagtctccctgacctcagcacgcacacatctaagtagagaagcaagtgggactctgaatgcttctataaacaaaacagctgcagcaggcggctcagctggcacagtgctggcttcaaaagcctggcgacctgagctggaacccaatgaaaaggtgaaggagacaagcagccacctccatagccagcctcagacctccgcctgcgtgctgtgtcacttggtgcccatgggagctacacacaagtaacagtcgggtatacattttaaattaactgatagatgaaggttgatccaagcagtgaagccagcttttcagaactgaagggagagattactctcagaactcctcagacccagtcaccttggagtgagcgtccggggttgttggcactgtcgaatcctaaaacacattggtgatttcagttttttgctgttgttgttttgggtgtgtttgttttgtttgttttttgagacagtctcactattttgcctaggctggccttgaactcaaggtcgcctcctgctttggcctcttgaatgcttagattatacttctgcaccaccacctggaccagctgaaatgcactcagagtcgggggaggtggtgtggagctgaagcgtggaaggatgtgggtgccttcccttgattctctaccttactgcttgctgaccttgggaggccaaagcaggaaaattcttgactctaggattttgaacatagcctgggaaatgaatccccaccccccaagaaatagaaagaaagggcggatttgaagagaaggggaggaggaagaaagggggagcagtgagctcaggagcttgtgaccgttcagcagagccttaggaaaaggaacactgtgtggcttcgatgaagcgtgcttgggcaggaggaccctgggttccagtgaatgcaagacagtgtttagtcctgaatccaagacagttacctttatcaaggtgttctttctagcccctctgatgttttccttcagatcacggagctgaaggctgattttcagtaccaggagtctcagactcgggccaaaatgaaccaaatggagaaaacccacaaggaggtcacagagcaactgcaggtgagcgtgtgctggccgtctgtgggggttgtgtttgatagccatgtctagattgctttttctccacgtacggaggacacagacccctttagacagctttcattgtttggagttggctgtgttttcatctttttcccctaagaactggaattaatggatgtggttttgatttctttaattcagcagacgtgggtccaggtgtctgcattatagatttgcctgtcccactcaccaaagcttgtggtgggctttgttgcgtacatcttctttctgtaacagtagtcaccaagaggtcagggctcaccatgcacctctgtcaggtcctttttaactccgtgtcaagtcccagaatttcctgttctcttcctaggaccacttcctgcctcttgagttccctctttctacctgcacagacagctggctggctggctttctttctttcttttattgtttatttgtttgtttgtttaagacacagtttctctgtgtaccctggctgtcctagaactcaagactaagctagtttcagacaagatccgcctgcctctgcctcccaagtgctgggattaaaggtgtgcaccacccccacccagttaccgttgttactatgactcattaaacctattctgcattaaaaccacattctatgctgtggaaactgagtgtgtactgactttatttttattatttttaggccaaaaaccgagagcttctgaaacaggcagctgccttgtccaagagcaagaagtctgagaagtcaggcaccataacgtctccgtgaagacgtgaggaggctcccagcaccaagcccgtgctcccgggtcagggctgctgagctggctggtctctgggaagtgtgcttcctacaaaatctctatattttcttaccttaccctctttgttcggatgcagtgggctgaaaggaactcctggtctgtgccctgttatggctgcatgctgagcggttagggtcccagacctcctcctttcctcctcccgctccccgcccccgtggccccccctctctctgttttagtactctgttttccatagtggtcactgctcagtgtcacgtgcagagtgtctgtccaccatcacacctgccatccccgtgagcaagcagtctgtcgtcagctgtacatcactgccgctcccaacctcgaaaactgccacctggagactctgtgcagtgagggaggctttttctcaccaataaaccttttgcttcagggtatactcttgggttttttccaggtatattatgtatgacctttgtactatgtatagacagagttttatttattttttaaaaaggaaaccttttcttgataaaggaatgatggtagcctagctagttcttgtaaaagtgatgcctctttgaaaaaagaaaaaaaaaacaaaaaacaaacccagtcccgtttgctagcttttagtagaagaacgcaaccttttctttctcattgccttagagtcttgatgctgaggtaatgttggaggcgtacgtgtggagctaagtgccttttggaggaccccatggaagagcgtgtgaggagaggcttaaggacggttgctgagtatggccagtctgtctttaagtagggcagaaagacgcttgtccaggttgtactggacacttcctcctctacccacccctcctcctccttctacataattttaaattcccacactgccacttcttttttaaaagtattcctgtttcttgctacatcagctgtcgtaccacgttgttatcacaacctggatctttggttttgttttttaacttgagcagattcaagcgggataagatgtgaactactgagcatttccgagggttggcatgggttgcttgggtgtgggctgcacggtggggaggacctcactgttccttcctttctctccctcatcccgcgtgctccctgttcttaatggaaagtcagaaagcacgcgcttctgggagccgaagggtgtgcccttatccctgtctgattcagtagttgtgggaaggagctgtgcccctccatctttgggaaaggaactagagatggggagtatgtgctgggacacagagcaaaccctgcagtgagtgccagcggtgctggagctagagcggatcctgaaggcagtgacattgggacagtcagggtcactgttcacctgctctgtagtctgggattacgttctccaaagagtcacgtgcacacaggtgagcagcggtccgcactcgagtggctcttcccgacaggagattcgaaggactgtgtttttgtaacactggtcgggagtgcaattttcccttctaagcagggaaagctgctgtgctaaatcattttgtaactttccgaatgagagacttcggtaaagataaactcgttcagtatttttcaaatgcatttgcattggctgtggggaaaagatggtaggaaaagaataacagtcatggtttcgtcaatgaaaagtaagactgagaaattgttggtgtggtgtgacaatatacaaaggcttacttagttttatactaaaccttttttaaggtcttagcatttaatattcagcaaatccacacattttctaaactaccacaagctcctgaaagatagaggaacctcagtcctgaaatggtgattttttttttaaatcatgacagcattttaccatgtaattgagtaacttttggtaacaccttctgcttctttgtatgtttgtaataatggacattttaaaacataggaatgtttgctttgtacagactttgacaaatgtgtgttaataaaacttcatactgactcagatgcatgttgtgattcagttgctgggttgcttcccccctcctctccctccctgcctccccgtcttcttttcctctgtgctggggtggaacccaggcccttacgaggtcagcaaattgaactgctgagctgcccctggcccacatgtttgttcttgttgattctcctagtgatatatcctcctgtgtcctgccaccctaaaaatagtttagcctgttttagattactagggaattgaatagtaacagagggatctagttgctgttcctataagacaaatgaccccaaaatttaatgacttaaaacaacaattttatatgtcacttgaccctgttggataatctcaacaggacaaggacaagagttggtttttttttcttttttttttttttagatttatttattggttatatgtaagtacactgtagctgtcttcagacactccagaagagggagtcagatctcgttatggatggttgtgagccaccatgtggttggtgggatttgaactccggaccttcggaagagcagtcaggtgctcttactcactgagccatctcaccagccccaagagttggtttctaagccgggtgtggtagcacaagcctttaatcccagcacttgggaggcagaggcaggtggatttctgagtttgaagccagcctggtctacagattgaattccaggatagccagggctacacagagaaaccctgtctccgggggaaaaaaaaaaagagttggtttttgtttcgtctctagttgtgagctgtatcagatgaatcagccaggaagattgaaagttcacagggctggggttggccctctgctcgtgtagctgcacttgcgctgggtgaagagaaagtggaacagagctggctcaggtagccttccccgggcatggggacctcaagttaagcagacttaggccgcacctgaagacgccaagcagcagtgttacagccaatgagacccgagctctgtccatcccaccgacactcctgaggccacatgtcctcatggctgctgtacacctgttgtttaagcagttagaaacccactcagactcaaggagaggacacggatcgtgccccttgatagcttaatgacaaagtccatgtgtgatgggagccattctgaccatcatgaagtaggatctactacatgagatcgcttcgggaactaaaactaaaaggtccaaaagagcaaggcagcagctgcagtgtgttctgtgtcgtgcctcaggacaagaccgtttcctagttcctccaatatcctattgattgcagaggcaaaattaccactgctattcagcacgtgttcccaggagcaagaatcacaggttgaggctggagggatgttcagtggttaagagcactagctattcttccagaggacccaggtttagttcccgacacccgtgtggtagttcatggttagctgttagtctagttccaggggaatctgaccacctcatctggcctctgagggcacttaggcatgcatgtggtgcagaaatatacatggaagcaaaatagccatgcacaaaatgaaataattcaaaacaaaacaaaactgaatcctgctcttttggaggacctggtctcagttcccagttgcagtatttagccaagtgtctgaaacagcagttgtgggtgatctgacaccctcttctgacttctgcaggcttctgtccatacatgtatacatatgtacacacacataatattaatatcagctggctcccacactgatcttggcttgtagggttaagttctaaagttggttagcatttttcagaagtagctcatatacgtcttttttttttttaagattttatttatttattatatgtaagtacactgttgctgtcttcagacactccagaagagtgagtcagatttcgttatggatggttgtgagccaccatgtggttggtgggatttgaactccagaccttcggaagagctgtcgggtgctcttacccactgagccatctcaccagccccatatacgtcttaactttcactttaatagatgacttcattgtttcttagtagatagaggcatatttttaatcttgcttgagaaagtaaggtcatgatgcatctggtggtgtgtgcttataatcccagccctctgacagctaagtgggggaagatctttagtttaaggctagcctgagctacatagagcatctcaaaaagataccaccactgctagcaacaatgaaactaagatcgtggtgtgctgccaagtctgagtgcctgggctttactcttgtctctgtcttaagattgaactgaggttagtaacacatagaaactttaggacagtgctctgcacaggattgatccagttgtataagctgtaagcactcatgctttatagcattaacatcttctgttgggagtcccactgtatgcttggctgtttggagactcagaaatcccccacctctgcttaccaagtgctgaattaaagaggtgtgccaccacactgcaccccatcttctgtttcttatgcatatcagtgttttgcttgcatgcatatgtatgtggtacccactgaagccagaagaggggatcaaatctccctgaatggagtcacaggccccgtggttcctaggtcctctggaagagcacccagtggtctcaacagctgagccacctctccacctccacgtctatctgttacttgagacagaaggtgatagacaaattagaatgagccttgcccccttcccctcctcctccctctcctctgctgcgccttatgtatattaggccagtgttctaccattaagattcatctccagctccagtcactctttttttacttccattaaattaaattttaccatcacctgagcaacgtggcacatacatgcctgtaacccagcagaaacagggaaggttgaagtcaggagtgaggctgctgtgtattacaatttctaagatagctagaactacaaagtgagaccctgactcaaaaaaaaagaaaaagaaagaaaaaaaaggaaagaaaaagggaagtccagcctgcctgttaaaatctagcaaaacagaactttattttctggttattttcattttagctaattcgtttttttttttttttaagatttattcatttattatatgtaagtacactgttgctgacttcagacactccagaaaagagcgtcagatctcattacgggtgttttgtgagccaccatgtggttgctgagatccaaactccatgaccttcagaaaagcagtcagtgcttttaacccctggggtatctctccaaccccaagttaattctttaaaaccaattactttttcaaataattaattgtaattattttcctcttgaactaatcacaggcccaacagtattagaaactcccagtctttgtctggtataaaacatatatttctctctctctcttttttttcccctttgttacaaattctctctacatcaccctgattgtcctggaatcagctatgtagaccaggctagcctcctgagtgctgggatcaaagtgtatcactatacccagcctgacagtttttctcttctgcaagagtttctagtttatcttccgtaaatgttggctttggttcctgttctccttcctccctctcttcccgagcttcaccactgagcactaccccagctctgcttacgtcttggtgtaaactaatgtgcactaagccaaatacaaaagcctgagtgtttttcctcaacaaataaccctgaaagataatcaaatccgagtgggatgtgggagcactccctgcatgtgggatgtagcagcctgcagatctccatgaatttggggccatgcttgagccttgtctgcatcacaagttccagggctacatagaccctgtctctaaacaaacaaacaaacaaacaaatacaccaacaaacagaaatagcaaagcaggggaaaaaaatccgtggcgtgagccagcacatgctttacaataatggcagcaatgtgaagctatgaaaactagaatgtgacaactggtgggtaaagaagaacataagctaaaactttctggggcaatgaagatgctgtctctcggtttgcttggtatttacaggactgaacaaatattgacccatcgaaactgaatacttcctattgcatcccattgcaaagcagttctaattcaattctggttctaattcaagttctgagaaatgttaagtcttagaagatgctgctgggagcacaacttttaggcaggactacagggtatgtatgaatcctggcttctgcttaatgacattacaacaccaggaatctcagagtgtttttcttatctgtaccaaaacaaatcaaacctcaatggggacaaatcctgggacggttgcttctgttaattaacaagtggactgatgctgagagatcttaatctctaaagtcctagattgtcggaaattttgttttgagatgtctgtaagaacagattttttttaacctggaaggtttgagtcatttgggcagaggagcctcccgggtttctaaggaaggtgtagagcttcagataagaaatttccagcgagagcatcccacatttatcttcacacggtagtttccaaggaaacaggatcctgagccgccttgatagctcaagcctgctgataatccctttacacagcccagtgtgctttgaagcgatcagaataccaggctggagaccatcgcagtgggaactctcacctggcaggctcaccctaagggcctgacccacagtgctgcagaaaccaagccaaaccaaagaggtgaagcccacccctgtttcttttcggtttaacttgcattccctcttttccccacaaacagataacttcctctcacctggtaatctggtgacacagtccatggttcctgcagtgtgtggtttcccttgcagcaatgaatgtgactttgtcctatcaccagttttcattaggcacacattatcgtggggatcaagttgggactgtctgtggagggaccatagctcagttggcaaatcgcttgccttgcaaggatgagggtcagactttgatcctcagcgccctcatttcctgacagatacttagagcctagagctggggaggcaaagacaggcagatccctggtcctgaccatggagccagcccaggctacttggcaagtttcagatcagtgaaaaagatccttacttaggaaaaaagaaatttgcaaagagagctgaggctagggagatctcctttacgttgctaaagtgctgctcaaggcagagcagctgaatttggatccccagcacccacataaaagtggggtgtggcccacttacctgcactctcactgctgggagacaggatccctggggctctctggtcagttagtttagcctgagttgatgactccaggttcagagagagtccctgtctcataaaaagatggagagtgattgaatggagagtgattgaagaggcctgacagcagcctttaggtcccccccccaacaggttcatatgagtacatgaatatatcatacacacacataaatgcattagaggaagttcaagatggtcagcactggaggaatgccatccaagagctgtcctccacctgtgtgtgtgcacagatgcacacgcacctgcaaagaaatacacccgtgcgcacacacacacacatgatagtagaattagccaggtatgtttgcatctataatccaagcactggggaagctgaggcaggaggattgtggtggatttggaggaaacctgaacagagggataccttctctcaaatcacatcccctccacatgcagaaaacaacacacaagttgtttattgaggtgaatttatatatttcaagaaatgacctgattctaaagcacagtgtatttaatctccctcaacttttgtcatttcaaaggcatcacatataatacttctagtggtgtaccataaaattgtcaatataagacacatctataggactggagagatgactcagtggttaagagcaagtgctcctagatgggtagtggtggcaacacctttaatcacagcactctggaggcagagagagacagaactccgagttcaagatcagcttggtcagcagggtgagttctaggagagccaaaacaaaaaaacaaataagcaaaccaagcaagctctgctcttacagagcccttgcgttcagttcctagcatcaagttgtacagctcacactgcctgtaactccagctcagataccctcttctggactctgagagcagctgctctcaggcacatatacccacagacagacagacagatacacacacacacatgcatgcacatgtactcacacacacacatatgcatataatttagagtaaaaacaaattttaaacataaaaatgttaaaacattaataagttaattaaaatttcccattaaaaatctcaagtcaagggctggagagatggctcagtggttaagagcactgactgctcttccagaggtcctgagttcaattcccagcaaccacatggtggctcacaaccatctgtagtgtgatctgatgccctcttctggtgtgtctgaagacagctacagtgtactcatatacataaaataaatgaataaattttctttttaaaaatctcaagtcaataatgagtgttcttgtatattctgtcaggttttttgtttgtttgttttggtgttttgaagcagggtttctctgcatagacctgcctgtcctgggactctttctgtagattaggctagccttgaactcagagatctgcttgcctctgcctcttgagtgctggaactaaaggtgtgtgccaccatggggctgccaccaccatttggctactgtcaagttattttgtttgtttttgtttgtttgttgttgttgttaagaacaatgtaaggaaatacccagctatgtgttaatttattctttttttcttttgtaggcaagtggtatactactgagcttctatataatctcttttttttgagacagagttttatacagttcagattagccttgaccttgccccataaccgaagatgacccggagagtttctgatcttcctcctgcctcctctacctcaggagtgttcagattgcacgcatgcttcaccaaacctgttgtttgttttaaagttaacgtccttatttatgtgagtgtttgcctgcatgtacatcagtgcaccgccagtgtgcctggtgctctcagccttggatcctgtgaaattaaaagttagagatggttgtgagccaccaagtggatactgggaattgaacctgtgtcctcttcaagatttggcttggaactcactcttcagccaaggcccgcttggaacttgtgagaactttcaggaactcccttcctgagagctgagactacaggcttgtagcattgtgctcagtggaaagcacacattctcttaccacagaattattacatgcatggccatgtaatagtgataacctttattttttttattacctttaccttggtagactttctgtttgtttgtttgtttgtttttcgagacagggtttctctgtatagccctggctgtcctgaaactcactctgtagaccaggttggcctcgaacttagaaatccacctgcttctgcctcccgggtgctgggattaaaggcgtgcgccaccatgcccggctccaaagaacctttcttttctttattttttaaagatttatttattattacattattatttatttattattatattagtatactgtagctgtcttcagatacaccagaagggggcgtcagatctcatttcagatggttgtgagccaccatgtggttgctggggatttgaactcaggatctttggaagagaagtcagtgttcttaaccgctgagccatctctccagccccaaagaacctttctaaacaggtccaattcccccatttctttttctttccacaacctctgctaggtggtaggctacaagggaggttaacacgtttaaggaccatcattaaaaataaagtttgaaaaaaattaaagttacacacaagtgcacccacacacaggaatacacatgtgcacacacacacacacatgcagccatgtatacatgcatttgtacaccacacacacacacacacacatgaaactgaaaaaagaaaaaaaatatagtttactataatatgctgttgcaccgcattatgataaaaatatctcttccatgggtctctcagccaaagctaataatactggcccggtttacaattgttaatggctactgttacaatcaatgctgctgattgtagagcatcatgccttgaatcccagtgttttggtcttcctcacccatgggataagacctcagactcaatcaactaaaaggtttattgattattattagcaggataacaatctctaagctagaattgagattgctgtaaggaggacgtgaggggagaatttttttctttttgaattttttaaaaaagatttttatttatttattattaagtacactgtagctgtcttcagacgtaccagaagagggtgtcagattccaatacaggtggttatgagccactatgtggttgctgggatttgaactcaggacctttggaagagcagtcagtgctcttaacccctgagccatctcacctgcctcctgataatttttttctgagaattttttaagaaattaaaaaatatatattttatgtatgtgagtacactgtcactgtcttcagacgcaccaggagagggcatcagatctcattacagatggttgtgagccaccatgtggttgctgggaattgaattcaggatttccagaatagcagtcagtgctcttaaccaatgagccatttctccagccctgagggaagaatctttaaagggaaaaaccacaagaagacttggagcgtttgcacaggcaagtcaagatctgttttgctctgcttagattaagtagtcaaggtggcccaaatatctgcataagcaggttacagaagacaaaaacaaaagaaaaacaagaacagctcagcaaactgtaacaagtaataacatggtcatggctttacatttcagtgtgtgtgtgtgtgtgtgtgtgtgtgtgtgtgtgttatgtgtgtgtgtgtgtgtgtgtgtgtgtgtgtgttaggttttctatgacccaaagcaagttgggaggaaagggtttcctcagcttacacttccacattcatgttcatcaccaaaggaagtcaggacaggaactcaaatggggctggggcgggaacctggaggcaggagctgatgcagaggccatggaggatgctgggcaggaacctggaggcaggagctgatgcagaggccatggaggatgctgggcgggaacctggaggcaggagctgatgcagaggccatggaggatgctgcttactggcttggctttccctggcttgctcagcctgttttcttatagaacccagaaccccctgcccggggatgacccacccatcatgggctgggccctccccacttgttcactaattgagaaaaatgccatatggctgaatctcatggagacatttcctcacgggaggctccttcctctctgatgactctagcctgtgtcaagttaactcacaaaaccagccagcacagtggcttattgagtcagggtcattgggaacttgtcttccagaacttggagtcatccataaatggctagtgagtaccaagatggatgcctagcataaaatggagggattgatttatttatatttatttatttatcatcacaccagcacttgggaggcaaaggcagcttgagctctgtgagttccaggccagccagggctatatagtgagactctgtattgaaaaaccataacaactacaaaaaaaaaaaaaattaaaaaagacttaaaagtcttaaaagtgctatcctactgtataatcagcctatttgtggagcctacccttaagagaacaaaatacaaattacaaaatacaaaaaaacaacctg

SEQ ID NO: 1505 - DNA, 3031 bp, Mus musculus
agcccgcggcccggccgccgccgccaggttgtgcctgagactgtcagataaagcggcgggccggcgggaggggcggcggcgatcacggcccgggccggacatggcggcgctgtacgcctgcaccaagtgccaccagcgcttccccttcgaggcgctgtctcaggggcagcagctgtgcaaggaatgccggattgctcaccctgttgtgaagtgtacctactgtaggaccgagtaccagcaggagagtaaaaccaatacaatttgcaagaagtgtgctcagaatgtacagttgtatggaacgcctaagccttgtcagtattgcaacataattgctgcatttattgggaataaatgccagcgctgcacgaattcagagaagaagtatggacccccatattcctgtgaacagtgcaagcagcagtgtgcatttgacaggaaggatgatcgaaagaaggtggatgggaagttgctatgctggctgtgcacgctgtcgtacaagcgtgtccttcagaagaccaaagagcagaggaagcacctgagcagctcttctcgaggcagccatcaggagaaggagcagtacagccgcctgagtggaggcagccattacaacagccagaaaacactttctacatcttcaattcaaaatgaaatcccaaagaaaaaatccaagtttgagtcaatcacaactaacggagacagcttttctccagacctggctctggattccccaggcactgaccactttgtcatcattgctcagctgaaggaagaggtggccactctgaagaagatgctgcaccagaaggatcaaatgatcctagagaaagagaagaagatcacggagctgaaggctgattttcagtaccaggagtctcagactcgggccaaaatgaaccaaatggagaaaacccacaaggaggtcacagagcaactgcaggccaaaaaccgagagcttctgaaacaggcagctgccttgtccaagagcaagaagtctgagaagtcaggcaccataacgtctccgtgaagacgtgaggaggctcccagcaccaagcccgtgctcccgggtcagggctgctgagctggctggtctctgggaagtgtgcttcctacaaaatctctatattttcttaccttaccctctttgttcggatgcagtgggctgaaaggaactcctggtctgtgccctgttatggctgcatgctgagcggttagggtcccagacctcctcctttcctcctcccgctccccgcccccgtggccccccctctctctgttttagtactctgttttccatagtggtcactgctcagtgtcacgtgcagagtgtctgtccaccatcacacctgccatccccgtgagcaagcagtctgtcgtcagctgtacatcactgccgctcccaacctcgaaaactgccacctggagactctgtgcagtgagggaggctttttctcaccaataaaccttttgcttcagggtatactcttgggttttttccaggtatattatgtatgacctttgtactatgtatagacagagttttatttattttttaaaaaggaaaccttttcttgataaaggaatgatggtagcctagctagttcttgtaaaagtgatgcctctttgaaaaaagaaaaaaaaaacaaaaaacaaacccagtcccgtttgctagcttttagtagaagaacgcaaccttttctttctcattgccttagagtcttgatgctgaggtaatgttggaggcgtacgtgtggagctaagtgccttttggaggaccccatggaagagcgtgtgaggagaggcttaaggacggttgctgagtatggccagtctgtctttaagtagggcagaaagacgcttgtccaggttgtactggacacttcctcctctacccacccctcctcctccttctacataattttaaattcccacactgccacttcttttttaaaagtattcctgtttcttgctacatcagctgtcgtaccacgttgttatcacaacctggatctttggttttgttttttaacttgagcagattcaagcgggataagatgtgaactactgagcatttccgagggttggcatgggttgcttgggtgtgggctgcacggtggggaggacctcactgttccttcctttctctccctcatcccgcgtgctccctgttcttaatggaaagtcagaaagcacgcgcttctgggagccgaagggtgtgcccttatccctgtctgattcagtagttgtgggaaggagctgtgcccctccatctttgggaaaggaactagagatggggagtatgtgctgggacacagagcaaaccctgcagtgagtgccagcggtgctggagctagagcggatcctgaaggcagtgacattgggacagtcagggtcactgttcacctgctctgtagtctgggattacgttctccaaagagtcacgtgcacacaggtgagcagcggtccgcactcgagtggctcttcccgacaggagattcgaaggactgtgtttttgtaacactggtcgggagtgcaattttcccttctaagcagggaaagctgctgtgctaaatcattttgtaactttccgaatgagagacttcggtaaagataaactcgttcagtatttttcaaatgcatttgcattggctgtggggaaaagatggtaggaaaagaataacagtcatggtttcgtcaatgaaaagtaagactgagaaattgttggtgtggtgtgacaatatacaaaggcttacttagttttatactaaaccttttttaaggtcttagcatttaatattcagcaaatccacacattttctaaactaccacaagctcctgaaagatagaggaacctcagtcctgaaatggtgattttttttttaaatcatgacagcattttaccatgtaattgagtaacttttggtaacaccttctgcttctttgtatgtttgtaataatggacattttaaaacataggaatgtttgctttgtacagactttgacaaatgtgtgttaataaaacttcatactgact

SEQ ID NO: 1506 - protein, 305 aa, Mus musculus
MAALYACTKCHQRFPFEALSQGQQLCKECRIAHPVVKCTYCRTEYQQESKTNTICKKCAQNVQLYGTPKPCQYCNIIAAFIGNKCQRCTNSEKKYGPPYSCEQCKQQCAFDRKDDRKKVDGKLLCWLCTLSYKRVLQKTKEQRKHLSSSSRGSHQEKEQYSRLSGGSHYNSQKTLSTSSIQNEIPKKKSKFESITTNGDSFSPDLALDSPGTDHFVIIAQLKEEVATLKKMLHQKDQMIKEKKITELKADFQYQESQTRAKMNQMEKTHKEVTEQLQAKNRELLKQAAALSKSKKSEKSGTITSP

SEQ ID NO: 1507 - DNA, 55631 bp, Homo sapiens
tctttctgccaagtcagtgaaaccactcttatcaaggtcagcaaacacatctattctaccaaagctctaagcaacctttaacacagccaattatttatttccttcacctggcttctcagacgcaaaactcccctagttttcttcctacctcactgattataccttctatctcatttgtcagattaccagccctccttctgccaccccatccttggttcccaatctcctaatgtttggagtttcaagtctctcttaggaacttactcaaacttactctggtttgaatgtcccctccaaaactcgggttgaaatttaacaacaattgtgatgatattaaggtgtgggtcatttaagaggtgattaggtcatcatggtttcaccctcattaattgcttactgccattgtcacagcagtttggccccgtttttctctctctcttgtcctctcttactatatcatggcatcttctgccatgggatgaccctcaccagaggctagtgtcatgctcttggacttcccagcctctataaccatgagccaaataagcctctattgtttataaattactcagtctgtgttattctgtaatagcagcagaaaacagactaagaaaaactcttctctcccttcactcactctccaggtgatctcatggcttgtaaaacaatctaaaatattcatgacttccaaattacacctccagctttgactgctgctctgcaccccaggcttgtatctctaactgcctactcatctcacagtcatttcaaaagtttcatggccaaaacagaagccttgcttttcccttccaaatctgtccctctactgctcttcccatctcagtaaattctattagtttacccagttgcttatgccaaaaacctaggatgcatccatgattcctcttcactgctcataccagatccaatccctcaccagccatgtaagttctagtcttaaaatgatcccatcttcataatcttggatttggcaatgggtttttttctgtttgtttttttttttgatggtgtctctgtcacccaggctggaagtacagtggcatgatctctgctcactgcaacctccacctcctgggttcaagcaattcgcctgtctcagcctcctgagtagctgggtttacaggcttccgccaccataattagctaatttttgtaattttaataaagacggggtttcaccacgttggctaggctggtcttgaactcctgacctcaggtgatctgcctgcctcagcttcccaaagtgctgggattacaggcatgagccactgcgcccagccatggtttcttaattataacacgaaagtacaagcaaaaaaaaaattaaattagactaaattaaaatttaaaatgtttatgcatcaaaggacattatcaagagcatgaaaagacaactcacaaaatgggggaatatatttgcaaatcatttatctgacaaaggattaatattcagaatatataaagaacttctataactcaacaacaaaaaacaaacaatttaattcaaaaatcaacaaggcacacacttgtagtcctagctactcaggaggctgaggcaggaagatagatcatttgagcccaggagtttgaggcttcagtgagctatgattgaaccactgcactgcagcgcaggtgacagaatgagacccagtctaaaaaaaaaaaaaaaattaaagttgccctgaaccctgattgccaatattttctagccccttccctgctttgcagccctcaccagacaatccaacctgctggcaccatgatcttggacttctcagcctccagaactttgagaaataaatgtctgttctttataatttagccagtctcaagtatttaaccagtctcaagtattttgttatagcaacacaaaacagactaagacaggtgggaccaatccaaatgtccatcagcagattaaaagataaacaaactgtttatatatacaatggaatattatccagctgtaaaaaggaatgaagttctgatacatgcttcaacatggataaagcttgaaaacatgccgagtgaagtaacccagacacaaagagacaaacattatgatttcagtcacctaggaaggcaaattcatagagaaagtagaataaaggttaccaggggctggaggctggacatagaggggaaaggagagttattgctaaatgggtacagagttttttgggtttttttgagacagggtcttgctctatcacccacaggctggtcttgctctgtcacccacaaggcagtggtgtgatcttggttcactgcagttttgacctcctgtgctcaagccgtccttccgcctcagcctcctgagtagctgggactacaggcaaacatgccaccatgcccagctaattttctgtattattggttgagatggggtttcgtcatgttgcccaggctggtctcaaactcctgagctcaagcaagttgcctgcctcagcctcccaaagtgctgggattacaggggaatgacggctaaaaatcttcctattgggtactgtgttcactacatgggtgacaggacaatagaagcccatacctcagcatcatgcaatatacccttgtaacaaactgcacatgtaccctgtgaatctaaaaaaataaacaaataaaacagagccactcccatcatcccatgttccttttccctgctttattttttcagaacttagcatcacctgaaattgcattattcaatttcaaataaacatatttatttatatgtaaatatttatatttatttaaataaataaatatatgtatttgctcatatataatctgtctccttcatccaggaatggaagctctaggaggacaaggtcttggtcatttcatcgttgtgcttccaggacctagcactgtgcctgatacttagtagatgttcagtgcatgtttattgaataaataaattagaaattaaatctagttttttaaaaagttttatttcggctgggtgcggtggctcatgcctgtaatcccagcactttgggaggtcgaggcgggaggatcatggtcaggagttcgagaccagcctgaccaatgtgatgaatccctgtctactaaaaatacaacaaaattggccgggcgtggtggtgcacgcctgtagtcccagctacttgagaggttgaggcaggagaatcgcttgaacccaggaggcggaggttgcagtgagccgagatcatgccattgcattccatcctggccaataaagtgagactccgtctcaaaaaaaaaaaaaaaaagaaagaaagaaaagaagaagaagaggcattgtctcttctctctctaggcttccaagatactattatccggtcccagggatttaaataccacatacctgctgacattccccacaaaactgtatcttcatcctagaactcacctctaagagatacacagaatagagcctgctgcctacatgatgtctcccccagatgccccacaggcatctagaaattaacatgtcagaacaaaattcttggttttgtctctgaaacctgtccttctagtcttcccttttgctggaaatactaccaccacacacatagctgagcacattgaccataatttcttcctttccctcaccacctcccaaattcaatccatccctaagtcctattgattttacctccaaaatatatgttgaatctgtccacttctttccactgcaaacttttaaccatcacctctcatctagatgcctgcaataatcctcctaaatgatctctctgcctttactctggccccctgctgtcttttctcctcctagcagccaaagaaatcttaaaaatataaatccagactgggcatggtagctcacacctgtacatctcagcactttgggaggctgaggtgggaggatcacttgagcccagaagttcaagagcagcctggacaacagggagaaaccccatctctaaaacaaaaaaaaagcttaaaaaaaacccataaaccaatcatgttatttgcctgcttaaaaactgtcactggcttctttcccattgtactttgagcaaactccatatccatggcagggtttaccagctctgcacatttggccctggtgtccctggcggcatcttcactcaccctcagctatactggcctcttctccatttcttgaacatgcgacgttctatttcatctcaaagtcttccccttctcttctgcccagaacattcttggttaagtcacatggctaagtccttcttgaccttcaggtcttggcatcttctccgagagttttttccctgaccggctctatctaaatgagtccccctgccttctcctcattgtctgtccctgtggtgtatcttttaattcacagtccttgcttcttagctatctttgccattacattgttggcttcacaagggctgggatcatgccttttcttttctttctttctttcttttttttaaagaggcagggtctcattctgttgctgaggctggagtgcagtggtgcaatcatagcccactgcagcctctaactcctgggctcaagtgattctcccgcctcagcctcttcagtagctaagactacaggtgcgcaccaagttgtagagacaaggtctcactatgttgcccaggcaggtctcaaactcctggcctcagcaatccttcaacttcggcctcccaaagcactggattacaggtgagccaccatgcctggccatatcatgcctttttttttttttttagaccgggtctgtctctgtagttcaagctggagtacagtggcgtgatctcagctcactgtaaccacctccctggttcaagccattctcccatctcagctttctgagtagctgggactacagtcccacgccaacacaaccacctaattttttttttctttgtagagacagggttttcccgtgttgtccaggctgctctcaaactcctgggctcaagcgatccttctgcctcagcctcccaaagtgtcagtattacaggcttgagccactgtgcccagccctcatgtcttttttatacaccagtgtatccccagtgcctaagccagagcctggcacaaatgctctataaagatttgttgattgaacggactgggcacactccagcctgaacgatagagccagaccctgtctttttgggaaaaaaaaaaaaaaaaaggaggcatgatatggccaggcatattggctcacctgtaatcccagtgctttgggaggccaaggctggaggatgcttgaggcctgtaatcccagcactttgggaagctgacaggggcagatcacttgagctcaggagttcgagaccagcctggccaacatggccaagccatgtttctactaaaaatacaaaaattagccaggtgtggtggtgcaggtctataatcccagttacttgggagactgaggcatgagaatcgcttgaacccaggaggtgaaggttgcagtgagccagagattgcaccactgcactccagcctggggaacagagggagattctgtctcaaaaaaataaataggctgagcacaatggctcatgcctgtaatcccagcactttgggaggctgaggtaggcggatcacctgaggtcaggagttcgagaccagcccggccaacatagtgaaaccccagtctctacaaaaatccaaaccatatttctatgaaaaatacaaaaattagctgggcgtggtggcacaggtctgtaatcccagctacttgggaggctgaggcaggagaatcccttgaacccaggaggcagaggttgcagtgagctgagattgcaccattgcacttcagcctggacaacaagagcaaaactccctctcaaaaaaatgaattaattaattaattaaataaaaaataaatatttatcgaatgaatggttcaattagctttgtgaaggggttatagagatggccttgatatgatggcccacagtctgatgaaaaccaataggtaattgtaaaactggtaatagagtggaactcaaaactgaagacagtgggaacaaagagaggctcttaccccactgtagggtttgtgtgtgaaaagggaggctgtgtttacacgattcagtgcaccagcatctctctagaagaaatgcagttttttcttccaatactaacatatattagtgtgccaagttacatgtactgtttcttgtttgttttgtttttaatgtgctcagaattatacagcttctaagtagtagagctgggattcagtcacacagtctggctctgagcttgcatttttcttttttcttttctttttgtttgagacggagtctggctctgtcgcccaggctggagtgcagtgtggcgcaatatcagctcactgcaacttctgcctcccgggttcaagcaattctcctgcctcagtctactgagtagctgggataacgagcactcaccagatgcccagctattttctgtatttttagtagagatagggtttcaccatgttggccaggctggtctcgaactcctgacctcaagtgatctgtccccctcggcctctcaaagtgttgggattacaggcgtgagccaccacgcccagccacttacattcttttttttaaaaaaaaaacataatttgaggccagatgcagtggttcacaactgtaatcctagcactttgggaggctgaggtggaaggatcacttgagcctaggagttggagagcagcctggacaatacagtgaaactccgcctctataaaaaatacaaaaattggccaggcgcagtggctcacgcctgtaatcccagcacttcgggaggccgaggcaggcagatcacgaggtcaggagttcaagaccagcctggtcaatatggtgaagccccatctctactaaaaatacaaaaattagctgggcatggtcacgcatgcctgtaatcccagctactcgggaggctgaggcaggtgaattgcttgaacctgcgaggcggaggttgcagtgagccgagatcacgccactgtactccagcctgggcaacagagtgagactacgtctcaaacaaacaaacaaaaaaattagcctgccgtgaagaacttggtagtgtgtgcctgtagtctcagcttctcaggaagctgaggttggagtatcacctgagcccagggatgttgaggctgcagggagccaagattgagcctttgcactccatcctgggggagagtgagaccctctctcaaaaagtaataataataataatttgaaatgaaattcacataacataaaattaagcattttaaagtgaacaattcagtggtatttagtatattcaccatgttgaggctgggcgtggtggctcacacctgtaatcccagattttgggaggctgaggcgggcagattacttgaggtcgggagctcgagaccagcctggccaacatggcaaaaaccatctctactaagaatacaaaaattagccggccacggtggtgcatgcctgtaattccagctactcaggaggctgaggcaggagaatcgcttgaacccgggaggtggaggttgcagtgagctgagatcgcaccactgcactccagcctgggtgacagagtaagactccgtcacaagaaaaaaaaaaaaaaagccgggcacagtggctcacgcctgtagtcccagcactttaggaggccgaggcaggcggatcaactgatccaggaactcctgaggtcaggagttcaagaccagcctggtcaacatggtgaactccatctctactaaaaatacaaaagttatccaggggtggtggcacgcgcctgtaatcccagctactcaggaggctgaggcaggagaatcacctgaacccctgggaggtggaggttgcagtgagccaagattgcgccactgcactccagtctgggagacagagccagactctgtctcaaaaaaaaaaaaaaaaaaaaagtatattcaccatgttgaacaaccgttacctctatctagttccaaaacattttcatcactccaaaagccccttacccattaaacaatttccccacattttcctccacgtactgtttttatttgtatttgcatatatattttgagacagggtctcactctgtcacctaggctggagtgcagtggcataatcatggctcagggcagcctcgactgtccaggctcaagggatcctcccgcctcagccgcctgagtagctggaaccacaggctcgtgccaccacacccggctaatttttaaaaaagtttttttgtagaaatggggtcccactgtgttgcacaggctggtctttttttttttttttttgagacggagtcttgccccgtagtccaggctggaattcagtggcatgatcttggctcactgcaacctctgcctcccaggttcaagcaattctcttgtctcagcctcccgagtagctgggactacaggcgcctgccaccacgcccgggtaatttttgtattttagtagagacagggtttgaccttgttggtcaggctggtctggaactcctgacctcaggtgatcctcgggtgattcacccgcctcggcctcccaaagtgctgggattacaggcgtgagccaccgcgtccggccgacccaggctggtcttaaatcccaaggctcaagtgatcctctggcctcagcctcccaaagtgctgggattacagttgtgagccatcccgccccgactcatgtactggttttgattctcacaatgacctcattgtacaattgagaaaaacgaggccgtgagaagttcagtgatagatccaaggtcatgtagttagttgtggaacagtgatttggaaactttgctttctgatcctaatgattaatgcacatctttgggggatcctacaaggaagcagccagatttgggttcagagagagtaaattttttttgttgaggcagggaaatagaagccattaagtcagtttttaattgtaaaaagcgcacgttgaggtaaaactgcaattagtcctgtacgggtggttggcagagccaagagtaacctatgcccaagagcagctacaaggcaggacttggataggtcagcagtgcaggaagctttgccaacacctcaagaacaagaagtctgtcattccttgggcagctcctatacatgccaagctggagccaaagagaggcaggggagcccggagggcgtggcttgccttccggaagtcaggcctcgtcaggaatcaccaggtggttgcttgcgagagaagctgggggtgaaaccggagaaaacaaagtaggaagcaggtctgggccaattgcagcccactctgatgggggcctgcaggccaccggacgcctgaatatctgtccaatccctcctggaaggactgccatctctttagtccctcttccgcagcataggggtgctctctctggggctctccttttctctcctaaggcccacagccccacagttccctatttaggtgtcttaaattgaggacacacttctaaattgtccctcagagtctcgtctcctcctttgagcgaggctgggcgggctcctcctgctccgattatgaggaacttctttcccaagctccccaccttctttgggcttggacggctgcagagttccagttaactgtgcgccgccttcgttccaattgtacccctcgtgctcccagagggcagctccatggaaaccaaaacatcacaaatccccgaaggtatcgcgagaagcgcagatgcgcctgaggccgtggagaggcggagcgagggcgggaacgctgagcaagtagggcggagcctaagctcttccgaggtcccggccgggagcctgtcccctccaggtggcgcccccgcgtgactgcgctttacataatcgcggcctggagcgtcacagtggcgtactccaggccagaccgaatcagagtgggcgaaagctccgtgttccgccccttcccacttgatcgacgtcaaagcccaccagtgagcgggcgtctagagtcgccgtgcccgccccagcccgcccgggtccgccccgacccgcctgcgcccgcccgcctgccgcagccagcagcctgcagccgccgccgggttgtgcctcagactgtcagataaatcggcgggccgggccggcgggtcggtgagcgcggcccgggccggacatggcggcgctctacgcctgcaccaagtgccaccagcgcttccccttcgaggcgctgtctcaggggcagcagctgtgcaaggtgcgcgggctggggcggcggccgggaactggggacgcaggaggcgcggcccggagctccagattctgtggggacgcccggcggggtccccggagcagggtgtggcaggcccgccaggctgaggagccgcacccaccccgctgggggccggcggggcacgtgcgggagccgggacccggtccaggctcccgcggccggcgtgtccgggtgcttagcaaccgtggggattgttctcggaccccgtgaggtcgggggagggacagcgggtcccctgcttgccctgactggtcgccttcgggatccctttgcgctgcctcccccgccgccgcggtctccctggtggggacctcctgcccctcctgggactgaactccaaagttgggtgctgccttggaggaatgtgtcgaactcgggctcctcacgggcacttttcgaccagtttcagaatcggaggtagcaaggcttgattttttttttttttttaagcatctcacttttcggccagtctcagaatcggaggcagcaaggctttatgttttaaaaaagccccacagtcaggctcacagatccgagggatcacttctcagcatccagttggtggtcttcggtcttccctgactagctgctgatcagtttttgctcctgaaggtccaacttctctttttcttttaagttgctttatcccacttttactttttaagtgactagaggtgctgtgaggcaacagttaaaaagtcaccaaactggctgaagaataatgttgaggttatccaataatccagtttgtgtctctgatttggataactcataattgtcacttttgcctcagatggtcatgactttccatttgccagtttttatataccaggtctgggggaatgcaagtgcttgagtgccctttttggcctcaaaatatgtatatatgattttaaggaagttatgtatatataaataataattttaatccagcactttcatttcacaagtaaaccgcaaaatcacacagtggcagaagaaccaggcctggaattcagggcttctgattcccagtctgggacttgttcatatatatgtttgttttacaatttatggctagttccatataatccatataagttcttacttaactcccacatcaacagtagggaagtgatgccagtattacagaggagaaaaataaggcccagaaagtttaagtgactcactcaagcatagtagctatgctagaaatagtacccaggtcggcttcctactgaaggctgtttccatttgtgactgccttttaaaattatatcctcatttcatttcaggaatgtcggattgcacaccctgttgtgaagtgcacctactgcaggactgagtaccagcaggagaggtagagttttgttgaccatgaaagatattaataggcttttttcctcttaaaatctgtaattgattgcatttcatgtacagatgctataatcagttgcattgtaaaatacagatctgtaatcaatcacattatatacagactataattgctaaatatttaggtctatgatccatcttgagttaattcatgtgtggggtgagatatacaatgaagggtatataatacatgtattgtttcctagttattatccattgattgcttaaattttttttttttttttttttttttgagatggagtctcactctgtcacccaggctggaatgaagtggtatgatctcagctcactgcaacccttccctcccaggttcaagcgattcttatgcctcagcctcccaagtagctgagattacaggtgcctgccaccatgtccggctagtttttttgtatttttagtagacggggtttcaccatcttggccaggttggtcttgaactcctgacctcgtgatccacccgcctcagcctcacaaagtgctgggattacaggcgtgagccaccacgcccagcctgcttaaatttttaaagttctttttaagacccttgatcattttatattgtgattataatctttttgtcaagaagaaaccaatcccacaacagtaaaacatgagcctcatgtttcaatatgtacatacacagagattgaagaatttataagcccaaagaagatacttttggaaatgtgacaatcctgataagagtttgctagctctagtcacatttgaaactcacttgccattacactttccttgggcaaatctctttttttgtttgaaacagagtctctctctcccagtcaggttggggtgcagtggagccgtcatggctcactgcagcctggacctcccgggcccaagtgatcctcccacctcagcctaccaagtaactgggaccacaggtgtgtgccaccacgcccagctaatttttttatttttgtagagataagattttgccatgttacccaggctggtctcttactcatgggcccaagtgattccttcctcgttagcctctcaagatgttggaattacaggcgtgagccaccacgcctgggcaaatctcatttttaaaagtgtgaaatgggctgggtacggtggctcatgcctgtaaacccaacactttgggaggctgaggcaggtgtatcacctgaggtcagaagttcgagaccagcctggctaacatgacgaaacccagtctctactaaaaatacaaaaaaattacctgggtgtggtggcacacacctgtagtcccagctacttggggggctgaggcaggagaattgcttgaacccaggaggtggaggttgcggtgagctgagattgcgccactgcactccagcctgggtgacggggggaaactctgtctcaaaaaaaaaaaaaagtgtgaaatgcaggtatgagtggtcagacatctttagggggcatttccatagcaacaaagtgatttttttttggtaccaagtttgattcttgtggaacttctgtgagtgtaggtgatcctgccttgaggagagtgggatctatttgttaattcatccattagacctagaagcctatttttaattattcatttcaattcttagaatatcttctccaagattttatcatggatttttttttttcttttatgagacagggtctctctctgtcacccaagctggagtgcagtgagatgatctcagctcactgcaacctcccctctccgggctcaaatgatcctcccacctcagcctcccatatagctgggaccaggggtgcacaccaccacacccagctttttttttgtatctttagtagagacaggggtcttgccatgttgcccaggctggtctagaactcttgagctcaaccagtctgcctgcctcggcctcccaaagtgctggaattacaggcgtgaccgaccacacccagcctatcatggatgttttcaaacaaaaaaaaaaggttaaaagaattagtgaacacccatatgccctctacttaaattctatcatatacactttactatatattcacctatccatctgttcatctctctctccatcactatatcaattcattttatttctgatgtatttaaagttgcagacatcagtatacatgacccttaaacacttcagcatgcacagcattatttagagttaaatatttgtttgcagctctttttgtgtgtgtgtggcaaaattggcttacactaacatgcttgaatcttaaatgcatcaagttttacaaacatagacatctgtgtagccccaaaccctatcaaaatacagaatgttactgtcaccccatagagtcctctcatgccccatcctagacaatccccacacccttgcttcctccaggcaacccctgttctacttttcatttccaccataaattagttttgcctattctgggacttcatgttagtggaatcatactctagaagctttatatgttagctcttaaatttaggtctatggtccatcttgagttaattcatatgtggggtgagataggaactatgaccctttatttacactatacatacaaattaattcaagatggatcatagagttagtttttcttttctttttcttttcttttttttttgttgttgttgttgagacagagtttcgctcttgttgcccaggctagagtgcaatggcacgatctcggctcactgcaacctccacctcccaggttcaagcgattctcctgcctcatcctcccgagtagctgggattacaggcatgtaccaccgcgcccaactaattttgtatttttagtagagatggggtttctccttgttaatcaggctggtctcaaactccggacctccggtggtctgcctgcctcggcctcccaaagtgctgggattacaggcatgagccaccgcgcccagcctagagttagtttttctttgcatgttttttaacatgttaggaacatatgtatatattgacatctaccccattccttcagtagtaaatctaggcgtaaatcaaaatgctattctacatcacagaatcattgatggtaatcctctttctagagatttctttgaatgtccttcacttattttactgtcttttaaaagtaacagaaaattgccctgaaaaataatttataatttaaatattttctactctgaggtttttcttttgtctattttaactttatagtcactttcacaggaattatatgggaaaatgatcacaaagcagagaatagactagttttttgtgtgtgtgtgtgacagggtctcactctgtcactcaggctggagtgcggtggcacaattgtagcccactgaaaccttgaactcccaggctgagcctcctaaagtgctgggattacaggcatgagccactgtgcctggccttaagatttttatgtgatttattagtttttagccccaaagtactgtttaaattgttcttacacataagacattcatttttacctcctcatgtgaagagttagacttttatttgaagatgatttttcccccgggcagctttattaattcacacatttaggtaataggacctctggatcttcacaaggcaaaggatgtttttatttttgtcagtgcttaactcttagagaaatcagaattttttttttttttttttttttttcgagacacagttttgctgttgcccaggctggagtgcaatggcgcaatcttggctcactgcaacttccatctcccaggttcaagcgattcttctgcctcagccccctgagtagctgggattacaggcacacaccaccacgcctggctaatttttttgaatttttagtaaagacatggtttcaccatgttggccaggctggtctcaaactcctgacctcaggtgatctgcctgccttggcctcccaaagtgctgggattacaggcatgagctaccgtgcccggcctaaatattgacaaaatatttgatcatagtgtctttttccccacctctggtgttttcatatgcctttacttatgaaggagagcacagagtaaggttagcaaagatagaatctctgagtttatattccagacacacatactttatttgtcacctcaaatttcccaactattcatccgaattaaggagaatttatttttttttcctgctagtccattttagtataatattttgagggtgttttctgtatctgataattttatttagtgatacttggggatgtcataatcagaaataactcactctccattttagccaaagcctcacttgtttttttgagacggagttttgcttttgttgcccaggctggagtgcagtggtgaggtctcggcttactgcaacctccgcctcccgggttcaagtgattctcttgtctcagcctcccaagtagctgagattacaggcacgcgccaccacgcctggctaatttttgtatttttagtagagatggagtttcaccatgttggctgggctggtctcggactcctgacctcaggtgatccacctccctcagcctcccaaagtgctgggattataggcgtgagccaccacgcccagccacataataattaaaagagttattagaggctaggtgtagtgtctcacatctgtaatcccatcagtttgggaggccaaggcagatggatcgcttgaggtcaggagtttgagaccagcctggccaacatggcgaaaccttgtctctatcaaaaatataaaaattagttgggtgtggtggtgcgcgcctatgattccagctacttgggaggctgaggcatgagaatcgcttgaacttgggaggcagaggttatagtgagcagattgcaccactgcactccagcctggggaacagagtgagactctgtctcaaaaatattgaataaaaataaaagagttattagaaaggtactcaagctagtgttaaccaagcatccagaccatatctcactttggcccttagcaatgagcaaattccttgggcttaaggaggtatcagttttcagatattctaagaaaagcctgtgtctctttcttccttaacagtaaaaccaatacaatatgcaagaaatgtgctcagaacgtgcagttgtatggaacggtaagtaggatattttcaaacctaacagtgagtactagggtcttgtggaaccttaccttctgtggcctactaatgccattacaatatttttattagaataaatggttatgtgtaatatatctgatactgatttcagctttcacatttagctaatgcttattgttaaggaactctgtgtttatggtcacactgccaggattatgattataattttcattgagaggcttcagtgaccagtatggaaagagaaagggaaagatgaaattttttgtttttgtttttgtttttttttttttgtgactgagtcttggtctgtcacccaggctggagtggaatggcagtcaagttcactgcaacctccacctcctgggttcaagtgattctcctgcctcagcctcccgagtagctgggactacaggcacatgccaccacacctggctgatttttgtattttagtagagatggggtttcaccatgttggtcaggctggtctcggactcctgaactcaagtgatctgcccacctcagcctcccaaagtgctgggatcacaggcgtgagccactgcacccggcaagatgaatttttataactttgacccctttgtttggtaacagttgactagtcattttgatgaatgattctctttttctcttagtgttacagttcaggatgttatgtgcttgtaagcattctcccaacatgtttatgtactgataatagcaaagaggccttttcagaaatttggaagcccttgctggtttctccaaagagctggttctgttgcatgtctcatagaagtctctgcatacatactaatgggtttttgttatttgtttatttatttatttaaaaatcaatagtcctgtgcagaaaaacacttcacatagtattaagaattgggcttcatggccgggcgtggtggctcacacctataatcccagcacattgggaggctgaggcaggcggatcacctgaggtcaggagttctagaccagcctggccaacatggtgaaaccccatctctaggaaataatacaaaaattagctgggcatagtggcaggcacctgtaatcccagctactccggaggctgaggcaggaagaattgctttaacccgggaggtggaggttgcattgagctgagattgcgccactgcactccagcctgggcaacagagcgagactcaaaaaacaaaaacaacaacaataaaaaagaattgggcttcatttggtcaatataaaagcagatttatgaagtcggcaatacatttgtaccatgactaatgaactacaaagtaggaattattgcttttttaaatgcagtggtattttatgaaagtaatacttacttgactcttttttccccttttaagcccaaaccttgtcagtattgcaacataattgcagcatttattgggaataaatgccagcgctgcacaaattcagaaaagaagtatggaccaccctattcttgtgaacagtgcaagcagcagtgtgcatttgacaggaaagatgatagaaagaaggtaaatctctgtttttcttgatttctttttttcctttcagagaaattaaggtggactaactgtgttaaaaacacatttaataggccgggcgtggtggctcatgcctgtaatcccagcactttgggaggccgaggctagtggatcatgaggtcaggagatcaagactatcgtggctaacatggtgaaaccgcgtctctactaaaaatacaaaaaattagccaggcgtggtggcatgcgcctgtagtcccagctactcaggaggctggggcagaagaatcacttgaacccgggaggcagaggttgcagtgagctgagatcatgccactgcactccagcctgagtgacagagcaagactctatctcaaaacaaaaaaacaaaaaaacacacatttaacaaagaaagatttctcagtttctttcctggttctattattgaccttaaagaagatattcatattttgttttcttcattcataaaatgtggaccattatattctaacatttcacgagaattgaattacagtgatcacgtaagtgaaatggtgattggcagaattctatggaattctgtaaaggagagattgtaacttaagcaagatggagtggcattaccagttttactatctggctctttaaatgtttctatctgttggctctttaaatgtttttatctgttgaaattcaagattacaagattacattagagggaagctctatgtggaagggtgtaccttgagagaatcaaaatgatttagagtttggtcatattactctcttgcttaaaatcctccacgggtttccagttgtgcttagaataaaactcaaatcccttctatggcctgcaaggcccatgcgcagctctcagtctcatcttgcatcatactttctacctctcaccttgctccagccatcctggccaccctgtagtctgtctgacatgcggatctcactccgacctttgcactgtctgtccttgtgcctaatgcatccttctctagagtctcataactggctcctcatgtcaggtttcagctcaggtaccacctgctcacagtgaccttttactgactcccttagtcattatttatcataccattttattgtcttcatagcatctcacatatcgaaaactagtcttgcttatttggttgcatgtttgtccaccccgactagaatgtgagctctttgtccatctcgttctctgctttatttccagtggcctggcacatagtagctgctcaataagtatttgttgaataaaagatggcagttgagaaactctttttcagtggccagaggtgcttttaagaggtgcttgggctcaagggctgactcttgcttaccaaattcattaacttacaatggaaggatataactttctattgaccaggatactcctgcctgccaaccaggacatctcttccctgtatcaagatcctgaagaatctgaattagtaatcaggaggtagcacaagcagcagtcccccaaacctgggtcccatccgactcctggggctagctgaatgaccctggctacttacccgcattatgcatcactttcttcatctttctccatgggaataacagtagttacttcacaaacacatggggaaatgtaattcagataggtatataaaacaatattgaacctggcacataatataactgagtaaatggctcctgtattattactgataggaatagttcatttttactaatctggttatactagaattcattacctttctgctttataaattacaatcctgtctcaagtatttagatatttttagacatctacatgttcataaactttaggagagagctaaatttagggattaagagtaggggatctgggccaaccctggtggcttgtgcctgtaatcccaacactttgggaggctgaagtggatggatcacgaggtcaggagtttgagaccagcctggctaacatgatgaaaccccgtctctaccaaaaatataaaaaaattaaccgggcgtggtggcgcacacctgtaatcccagctacttgggaggctgaagcaggagaatcacttgaacctgagaggcagaggttgcagtgagccaagattacaccactgcactctagcctgggcaacagagcaagacttcatctcaaaaaaaaggaaagcggggagggtatctggactcagaatgtgtggattgaaatcttagttctgtcacttattaactgtgtgactttgggcatgttaatctatcaatgcctcagtttccacatctgtaaaaggggatgatcagatcttagtgctgttacaaaggtcaagatactagtaaaactcttagaacggaatctggtacatgaaaaatactcagtgttatctatgatgatttgtttttgatagtttaaatctcagaggatgctattttattttatttttttgagatggagtctcagtctatcacccaggctggagtgcagtggcacgacctcagctcaccacaacctctgcctcccaggttcaagtgattctcctacctcagcctccagagcagctgggattacaggtgcacgccaccacgcctggctaatttttttatttttttattttttaaatttttgtatttttagtagagatggggtttcaccatgttggccaggctggtctcgaactcctgacctcaaactactgacctcaagtgatcagcccacctcggcctcccaaaatgctgggagtacagatgtgagccaccacgtctggccagtgctcttttatttctttttgttgttgttgttgtttgagacggagtttcgctgttgttgttgcccaggctagagtgcaatggcacgatctcggctcaccacaacctccacctcctaggttcaagcaattctcctgcctcagcctcccgagtagctgggattacaggcatgcgccaccatgcccagctaattttgtatttttagtagaggcagggtttctccatgttagtcaggctgctctcgaattgctgatctcaggtgatctacccgcctcagcctcccaaagtgctaggattacaagcatgagccaccgtgcccggcctgctcttttatttctaaagtttatttttaagagacagatctgaaaaaaatgtcttgtggatctatgtgcaatttttatattcattgtttgttctcttttagtagagttgtattgttttaaaccctttaatgaaagctcttacctggggaaggtcttacagggtgttttaaaattatgccttaaatgccaggtgcagtagctcatgcctgtattcccagcactttgggaggctgaagtgggcggatcgcttgaggccaggagttcaagaccagcctgggcaacatggcaaaaccctgtcactattaaaaatacaaaaatctcggccgggcacgttggctcacggctgtaatcccagcactttgggaggccaaggcaggcagatcacttgaggtcaggagattaagaccagcctggccaacatggtgaaacactgtttctacaaaaaatacaaaaattagccgggcatggtgacatgtgcctataatcccagctactcagcaggctgaggtgggagaatcgcttgaacctgggaggcagaggttgcagtgagctgagatcgtgcctctgcactccaggctgggtaacagagtgagactccatctcaaaacaacaacaacaacaaaaaaaaaaaaaaaaaaaaaaaacagaaaaaaaaaattagccaggcgtggtggtgcatgtgtggttccagctacctgggaggctgaggtgggaagatctcttgagcctaggagtacgaggctccagtgagctgtaattataccactgcactgcaatgtgggtgagagaatgagaccctatctataaaataaataaaattaggtcttcaagccaggcctgatggcatcctgtggtagttccagctaccctagaggctgaggtgggaggatcacttgagcccaggagttcgagtccagcctgagtaacatagtgagactttgtctctaaaaaaataataataggccaggcgtagtggctcacgcctgtaatcccagcactttagaaggctgaggagggtggatcacgaggtcaggagttcgagatcagcctggccaacatggtgaaaccccgtctctactaaaaatacaaaaataagccgggcatggtggcatatgcctgtaatcccagctactcaggagactgaggcaggagaatagcttgaatcctgcagtgagccaagatcacgcccctgcactccagcctgggtggcagagcaagactctgtctcaaaaaaaaaataataataataatattaataataataaacagactttcaggtcgtatcccataaccgtgaaatgaaccagattgaagtttggtttcaaagttcattgttacgtttcttaacaaaaaattaaatgcctatcatgtaccagacactgttccaggtattagaaataaactaatgaactgaacagacaagaccttactctcacagagcttacatttatgtgtgtgaaagagaaaagggtgaggagaaaaataaattaacataaattttagatattagtgctataaagaaataaagtacatgacagagagtgactgggaagtcagcctatattgggcaatcaggagaacctctgaggaagtaacatttgagtggaaactaggatgatgaaaaggtggtagccatgggaagctctggaggacaaaaattccaggaagaaggaccagctgtggaaaatccttaaggcaggaatgagcttggcacatgattagaacagaaagaagatggagtgaacctggggaaaaggaaggaaacaaggttatagaggcaggtaaggggctatatttaagtcaacataggccatgaggcacactgcagatagcccactacactacaaggaggtgtgtgtgaagctttgaggagttcacctgggctgtggaacgccacaatgacaagaccattttcacctactttatcagttctaaggatgctggaggaaaagctggtgcccctattgtatgcatgctgaaccaggggctgaagcatgttagtgaaggatgtgtgttcgcctactgccaagtagaagaaaagccttattggaaagatccaaataatgacttcagaaaaaacttggaagtaaccacagtgcctacactacttaaatatggaacacctcaaaaactggtagaatcttagtgtcttcaggccaacctcgtggaaatgtttttctctaaggattaagatttgatgatggcaattatgtctcgattttctgatttgttctagtataaaaaaaaactgcatatggcagggtgtggtggctcacacctgtaatcgtagcactttgggaggccgaggcaggtggatcacttgagcccaggagttggagaccagcctggacaacatggcaaaagcccgtctctataaaaaatacaaaaaattagcaggatgtggtggtgcacgcctgtagtctcggctacttgggaggctgaggtaggaggctcacctgagcctgggaagtcgaggctgcagtgagccaagattgcaccagtgcactccagcctgggcgagattgtgagaccctgtcacaaaaatgcatacttgctttgaattcatgttagcaataaataaatgataatgttaaaaaaaataggctatggtacagagtttgaattttaagctatgatgagaaaccattgggttttaaggagagaagatggactcatagggtaacttacccttgggagccagtgctatggctttaggctgcaagattggctcgcccatcctcaacagcaacctggccagtttaggggtcaagtgcctccgtattctagactctgggtccacctggatgtcatggatgggcactttgttcccaacgtcacctttggttatcctgtggtagaaagctttcaaaagcagctagtccaggaccttttctttgacatacatgtgatggtgtccaagctggaacagtgggtaaaatcaatagctatagcagaagccagtcagtacacctttcatcttgaggctactaagtactcagaggctttgattgaagacatttgggagaatgggatgaaggttggccttaccatcaaaccaggaactacagttgagtatttggcaccatggactaatcaaatagatacggccttggttatcacagtggaacctgggtttggaaggcagaaattcatggatgatatggtgccaaacattcactggttgaggacccagttcccatctttggataagaggtcgatggtggagtaggtcctgacactgtccacaagtgtgcagaggcaggagctaacatgattatgtctggaagcgttgttatgaggagtgaggaccccagatctgtgattgacttgttaagaaatatatgttcagaagccactcaaaaacattctcttgatcagtgagaccacaaggagcccaatgttgctgctcgtgagatctcctttttaccagaaaacaggaatattgactaccaaatcatattgcagctgaggcaatactgcttttctgagcaattattcattctaatgattaaaattgattgtgcagaatattctaagaggttacaaattggcatgtctaactacatttttagtgaagcaatttaacaattcatgtggggcccgggtgtggtggctcacacctgtaatcccagcactttgggaggccgaggagggaggatcacctgaggtcaggagctcgagaccagcctcaacatggagaaaccccatctctactaaaatacaaaattagccgggcgtggtggtgcatgcctataatcctataatcccagctactcgtgaggctgaggcaggagaattgcttgaacctgggaggcggaggttgcagtgagccgagatcacgccattgcactccagcctgggcaacaagagcgaaactccgtctcaaaaaaaaaaaacaacaacaattcatgtggtgaaatacccagtttttattgggagatttgattttttttttttttttttttttgaggcagagtctcactctgtcatccaggctggagtacaagtagtacaatctagactcactacagccgcagcctcccaggctcaggcgatccttccaagtagctaggactacaggcatgtgccaccacgcccagctaatctttgtactttttgtcgagacaaggtttcaccatggtctcaagcaatctgcctacctcagccttccaaagtgctgggattacaggtgtgagccactgcgcccacttgatttttcataaagagtaaaaatatggctgcattaaggttacaaacagaaatgtgtcttaatgcctaaggagggcatattagctacactataaaaaaaattttttttccattttacagtagagagaaatagaaaaacaggccaggcaacggtggcttacacctgtaatcccagcactttgaaaggccaaggtgggtggatcacctgaggtcaggagtttgagaccagcctggccaacgtggtgaaaccccatctctactaaaaatataaaaaaattagccaggcgtggtggtgggcgcctgtaatcccagctacttgggaggctgaggcaggagaattgcttgaacccaggagacgaaggttgcagtgagtcaacacagtgtctctgtgctccagcctgggtgacaaagtgagactctatctcaaaaaaaaaaaaaagagagaggatgtaatcatttacatttaagaaaccctttggcggctatggggaaatagcttattggaggtagggtgatcatttgggcagctctcacagcagtgagagatgagtatgtctttagtaaaatggaagcagtggagttagaaagaagtgagtagattcagactgatggacttactgatgggttgggggatggggagcaaagaggcttttgccaatgaaataaaacacttcaggtaaatgatgacgtggcctacccatgttcaagatgaggcacaagatctaatttcagaaataagaaatgaaaactgtaaaattccataatgtatcagcatactccctgtctaacctgagaaattccaaccagccctgctgccctgtcacctgtcctagtgtgtcctccagtggtttttcagtctgaatgctgcacagagacaccacagcttcagagggtggcagaagccatgttatgctttcctagctttgggccctgctccatggtgcagagttacttttgctcaaaggagtcaactttttctaattcaaacagtgccatggcaggccaccacgagggactgggccctggaagctgttcactcattgttctttctctggggaccatctttccatctgagagatggtatccagcataccactttgtgaaccatttataaagtattaaaactgaggtataggagggtgggtttggggagatgttggccaaaggatttcagttacataggaggaataagttgaagagatccattgtacaacatggtgattatagttaataaaattatagttgaaattatagttgaaaattgttaagagagtagattttaaatgttctcaccacaaaaaaacaaacaaaaacacaactgggcgaggtgcagtggctcacgcctgtaatcccagcgctttgggaggccgaggcgggcagatcacgaggtcaggagttcgagaccagcctggccatcgtggtgaaactccgtctctactaaaaatacaaaaaaaaattagctgggtgtgatggcaggcgcttgtaatcccagctacttgggaggctgaggtaggagaattgcttgaacccaggagatggaggttgcagtgagctgagactgtgccactgcaactccagcctgggcaacacagcaagactctgtctcaaaaacaaacaaacaaaaattatatgaggtaatgcgtgttaattagcttgatttagccattccacaatgtatacatttttaaaaaatatctatttattcatttttgagaaagggtctcgctctgtcaccaagactgtagtacagtggcatgcttacagctcatggcagccttgacctcccaggctcaagtgattctcccacctcagcctccctagtagctgggactacaggcatgcaccaccacacctggctaatttttgttgtgtttctttttgtaggtgggttttgccacattgccccgagtagtttcgaactcttgggctcacgcagtccacctgcctcagcttcctgaagtgtacatatctcaaaacatgttttacacaataaatatatacaaattttgtcattttttaaaaaatggccaggtgcagtggctcacgcctgtaagttcagcactttgggaggccaagacaggagatcacttgagctcaggagttcaagaccagcctgggcaacatggtgaaaccctgtctctacaaaaaaatacaaaaattagccacacatggtggtgcacacctgtagttccagctattcagtaggctgaggtgggaggattgcctgagtccaggaggtggaggttgcagtgagctgagatcataccactgctctccagtctgggcaacagagcaagaccctgtttggggaaaaaaaaaaaaacgaacacctgattaggtgagcatggtggcatgtacctgtagtcctggctactcaggatgctgaggcaggaggattgcttgagcccagaagtttaaggttgtagtgtactacaatcacaccactgcattctagtctgggtgagtgagatcctatcactaaaaaaaaaaaaatccaaaaaactgtaaatgtgaattttataattcatcttctgtcttctcttctccctgctgagttttccttaatgagaaccgtggtcttgtgagaattttactcgtctgtgtttgctaacttgaagagaaacaaaacaaaaatacataaaattagcagctgaaatttatttatttaatttaatttatttatttattttgagatggagtcacgctctgttgccaggctagagtgccatggcgcgatctcggctcaccacaacctccgcctcctgggttcaagcgattcttctgcctcagcctcctgagtagctgggactacaggtgcacgacactatgcctggctaatttttgtatttttagtagagacggggtttcaccacgttggccaggatggtctcaatctcctgacctcgtgatctacccaccttggcctcccaaagtgctgggattacaggtatgagccaccgcgcccggcccggcagctgaaatttattaagcaacttttatgtgcctggcactatgttaagtgctttacctacattatgtcactagatccttgtagcagccccctgtgacatgcccaaagtcacagcacataagtttcagaactgggactgaacccaaagattctagctcccaataccacgtttgcagccactgcgctaaattccctcttctttatctttgtctccttgtctttcaggtagatgggaaattgctgtgctggctgtgcacactttcatacaaacgggtccttcagaagaccaaagagcagaggaaacacctgagtagctcttctcgtgctggccaccaggagaaggagcagtatagtcgcctgagtggtggtggccattataacaggtaacctcaagacacatgagatgggactagaagtgctggtaggtcagatgtaatgctcacataaccatcatggtacatactaccatctcatatacattttctatattctctgtaggtactagtctgtaggaggaagctcatttgtcatattttatagttcatatatcttccaaggaccagagagatttccataaagtgtcaggatttcctgactttgtattgtgtctgaaatgtttgtggaacttcgtttgtagtgttctcacccttagagtggattctctctccagaaaattggacatttcactttctgagagatacagctttttcaatgcatatttagccaggaggctgatagatgtcctaggtttgtcctggtggcacctagtcaaaaagatgtcttttcattgttgttttaagcgtcctttcagagtatctagtattgttaacggttctggctctggatggaatgctggctctgccaggttctctgcggggatcttgggcaagttttctcatctgtaaaatgagggaagtgatagtattacctcaaggggttgttgtgaagataaattagatagtacatgcacagtgattgtttttataactggcatatagaaaatattcaatacatttcaggtttttttgtttgtttgttttgttattaccattatgactttgtttaatcagcaagcattaagtattctcacgggtcagggatgctggtgggaatgaagagctgaatacaagtcatgctgctctccaagagtatgcagtctggtaggaaagacagacttataaacagatgatcttagtataatgtaacgggtaccacagtggaaacgtgtcaagaatgcagacatgagggtagtaattaactgccttgagaagtcaggcaagcaggcttggagaagagctggcattagagctagatcttaggacgagttggaatcctcagggaaggaatgggcagaggcattctaggctgagagaatagcatttgcaaaggcatggagggcatgagaccaaatggaaccctggaaaattgtaagtccttttatattgctggagcttttggctgggagctggggaatggaaggaaaaaggggtcctgcatcctggtaaggaatggaaacttgatcctgaggtcagggtgttagtgggaagctattgaagggatctatgcagaggagagaccaaatcttcatttaaaaaattaaccctgactactagtgtggaaaatgcattggaggaaaaagggactgggggctaattaaaggcttttttctaagagtttgggtaagagatgttaaaacaagaacctcacctgaggcagtggcagtggaagattgaaaaggttgattcaggaagatgttttggatggagaattatgagaaacagataatctgatgaacagacacatgggcaagagctgagtaagtaaaggataattcccgggtttcttatttgggtgaatagatagagccttaactgagagagaatgtaggaaggggagaaatgggtctagttttggaaagttgagtttgaagcatgaagaattacttttaggagcttagcctagaacttagaagagaggtttggacatgggccataggtagcacataagaatctagctgggcgcggtggctcacacccgtaatcccagcactttgggaggccaaggcgggcgcatcacaaggtcaggagttcgagaccagcctgaccaacatggtgaaaccctgtttctactaaaacaaaaaatacaaaaagtggccaggtgtggtgttgcatgcctgtaatcccagctactcaggaggctgaggcaggagaatcgcttgaacccaggaggcggaggttgcagtaagttgagattgtgccaccgcactccatgctcggtgacagagcgagactctatctcaaaaagaaacagcaacaataaaaagaatcactgggggtagggattatttgaaaatgcagattccggccagatacattggctggcttacacccgtaaacccaacgctctgggaggccgaggtgggagggttgcttgatgccaggagtttgaaactagcaggaacaacataatgagaccccatctctacaaaaaacaatattagccaggtgtagtggcacacacctgtagtcccagctacttgggtggctgagataggaggatcgctttaagccttggagtttgaggcttgctgtgagccatgattatgccattgctctccagcctgggcaacagagcaaggcactctctctaaaattaaaaaaaattaaaaagcagattcctgcagcagtcccaccccagaatttaattcagtaggacctaggatagaggccaggaatctacattattttataaacatcccagatgattctaatgcaggtgatatagttaacaccatttccaaccacttatgataggtagttgttaaaatcatgctcttaaatgatgtaattcagattcagggctgagaatggaactctacaagcattcagtatttaagttttaggaactaagaagcagctgtcacaaaagtgggatgaccaaacgaggagaacatttgaagaaggatgcagtatcagtggtatcaaatgctgaagagaggtcaagtaagaaaaggtctgaggaatcctttgaacttggctgttgaacacccatcaaagtgaaaggattgcatagcagagacagagttccagcttttgtttcaagaccagttttgagtgaacttattggggctaaaactgatttttagtcttgtagtttgactgagataccagtaggttaacacaaatatagtgaagaagaactagactggccgggtgtggtggctcacacctgtaatcccagcactttgggaggccgaggcaggtggatcacttgaggtcaggagttcgagactagcttggctcacatggtgaaacccgtctctaccaaaaaatacaaaattaactgggtgtggtggctggcgcgcacctgtagtcccagctattcgggaggctgaggtggaaggatcacttgaagccaggaggcggaggttgcagtgaaccaggatcgtgccactgcactccagcttgggtgacagagtgagactccatctcaaaaaaataaaaataaaaataaaactagactaggagttcaaatatattgacctggtttctagtcccagctttacttctaactagctatatgtgtcttggtagataagttgatcttgagctatttctgtacagtagaaataataacttatctatacctcacagaattataagatgcatgtgagacagtaaatgtaaaagaagtttttttttttttttttttttttgagacggagtcttgctctgtcgcccaggctggagtgcagtggcacaatctcggctcactgcaagctctgcctcccgggttcacgccattctcctgcctcagcctcccaagtagctgggactacaggtgcccgctaccacacccggctgatttttatatttttagtagagacggggttttacagtgttagccaggatggtgtcgatctcctgacctcgtgatccatccacctcggcctcccaaagtgctgggattacaggcgtgagccaccgcgcccagccaaaagaactttttaaactagaagacagattatacttcttattgaagttttttttttttttttttttgaggcggagtctcgccaggctggagtgcagtggattgctgggagtgcagtggattgatctcggctcactgcaggctccgccccccggggttcaagccattctgctgcctcagcctcctgcgtagctgggactacaggcgcccgccacctcgcctggctaattttttgtatttttagtggagatggggtttcaccgtgttagccaggatggtctcaatctcctgacctcgtgatccgcctgcctcagcctcccaaagtgccgggattacaggcgtgagccaccgcacccggcctcttattgaagttttattgatatttgttctcatggttattaataaagcaggtaatatttaattaattaaggccaagaatttttttttttgatcctgtggaaactagctacccatccatccaggcctacaaaatcatcaccttggtagattctttattaatcaagaattattagctcttgcatagaagagctgctgtcttaacattggtctatttgacagactttcattgtgatgttttgttaatctttgatttctaatgtgtgtctctctatttttgccattaaaagccagaaaacactttctacatcttcaattcaaaatgaaatcccaaagaaaaagtccaagtttgagtcaatcacaactaatggagacaggtgagccagttggagtatgtgtgcgcacacatttgaaatgcatacacagttcctgaaacaggaatacatttagggtctgccttggaattagtctgtggctgtcagtgaatcttataagtaagcagtactgatatttgtttataaatctaatcttgtcattaaaagataagaactcataacttgatttaatagcaattgaattctgcagtccactaaattataattttttttaagagacagtctcactctgtcactcaggctggagtgcagtggcgcgattttggctcactgcaacttctgtctcctgggttcgagcaattctcatgcctcagtctcccaagtagttggaattacaggggcaccaccatgtccagctaatttttgtacatttagtagagacagggtttcaccatgttgacttgaactcctggcctcaagtgacctgcccacctcggcctcccaaagtgcggggattacaggcatgagccaccttgcccagcttcccctacactaattctaagaagtccagagctggatgcttttctttgtgatctctgcccatatcttcctgcaggcaggagaggagttgatcttgagaggtaaagacaggttgggattaaggcaatgttgccaaatttgtgaggatccacacttccttaacattcagaaagccagcccagtgcagattctggatcaggagagaatgagatgcatttgcatgtttttgtttcatttcaagccagtctaaatgcatacttttagtcctcactttcctctcccctcctcagtggtacttcctcttgtgagctgcttgggtcctaatatccagagtgtcccatctgtgttggtacagtgggctgcttctcaacaaagtgttgggaccaaccatttttctgttcctccaggcctgggcatcctgaagtgaaaccacctgacacacttcctgcgatctttgaaatcatctccatcctgaaaactcctcccattcacagttctccttcccagccagtagtggatataggagcagaccagcatataggcttaccaggactgattttgtttatttagagggatacaaaacattctttcccattgccttttttgttaacttgctttcagactctacaaggtttttagaactagtttcactgatttttaaacttcttgaattgaaccttctggaatgcttaatttaggtagtcagattacatggggggaggaaccataaagatcatctttctggccagctttactgttctctcataagctagtctggccattgtgaagaaagggatgtggcacaggttgtccatcacctctgccagggcatgtgaccctgcaaaaactacttcaaggaatgaactttttgaacaccctgctttataaaggcctaagccaagacctatggctttagattcatttctgttttgtgctcatttatgatccaggctgtgtttgaatgacctggaaaaagctcgttcgtatcttccagtttaaccaaccagtccttaatgttcactttctattagcttattttgttcttgagatactgccactattcttgctgtccattgctatggatacaccaagctaaaaactcaagttttctgttcagtgttttattgcatccagtcatcagcaatgctgttttcctcaagtagaaagctgatccttgacataggtacatggtctttcatggtgtcctccagaaaagatattaaatgatcattttgaccaggcacagtcgttcacacatgtaatcccagcactttgggaggccaaggctggtgaatcacccaggagtttgagaccagcctgggcaatatgatgaaacaccatctctaaagattagctgggcatggtggcgtgtgcctgtaattccagctactcaggaggctgtggtgggaggatcacctgagcctggggaagttgaggctgcagtgagccatgattgcgccactgcagttgagcctaggcagtgagactctgtctcaaaaaaaaaggtaggggagataactttttccttaaaatgacatgctaatttatttttctaagtaatttataatttgaaaatttggaaatgttttctgctgtcacaaaaactattttcatacccatttaaaatgttcctgcattagcatttttaacattctattctacttgtttgcatttcttttttttaaatgttcatagcacaagataaattccactttgctgtcctctttacttgttgtgggttttttttccctgcatttactttgctttgaaaaaagcattctgacattttttttgacagtccttttttaatgtcatccaaaccaaaatttcactggctacccatttctttttttttttttttcttttttttgagacagggtctcaccctgttgcccaggctggaatgcagtgtcacgatcttggctcactgcagcctcgacctcctgggctcaggtgatccttccacctaagcctcccaagtagctgggactatagacatgcaccaccatgcctgcctaatttttgtatttgtagaaatagggtttcactatgttactcaggccagtcctgaactcctgggttcaagtgatcctcctatgttggcctcccaaagtgctgggattacaggaatgagccactatgcctggctttttttgttttttttcttttgagacaaggtctcactgtgtcacccaggctggagtgcagtggcgcaattatggctcactgcagcctcgacctcctggactcaaacgatcctcccaccccagcctcccaagtagctgggactacaggcacatgcctccacactcggctaatttttttgtgtagatggggtctcgaactcctggcctcaagtgatcctcctgctttggcctcccaacatgctgggattataggcatgagccaccagacccagcccctaaaatattcatatacttttaaatttatgctcttattcttttatttttattccccatgttttctgcaagttgctgcctaatggtttttcactgacctttctatactactacattctcttctcttatttaatattgagttatgtttgattatttttcctcctttttgtttatccattagccttctattttttttagacagaacacattttagctttcaaaaatggctttataagatgctttagtcttttttttctaagtatcctacaacatccacagtctctgtctcaatatgtcctaatttgtttgttgaaattataacaaaaacttttcaattttaggaaaatataagttaatttctagttttccttcctctagaaaatacactggctactttttaatcatgtgtgtttatttttccataggcaatcaaaaaagcagccacaacagctggtggcactcaggcacagcttgtggtttattgtttctaaaggacattcttttttttaactcgtagtttcattttattctccgtctgaaatgtgcctgaaagattaatctgtatagcctttgaggactgactcaggaccaatatgtagggttatagagaggcaggttttggctcaacccaagaaaattgttcttacagtacgagcttttgtaaaagacaatttttctggagaagtagtagttccctgtcattggagccattaggaaagagactggtttttctgccttgttaccctagccatcttttttcatttctagtagttcttactgaaccaggaattagagagttagtgagggctgggcacggtggctcacgcctgtaatcccagcactttgggaggccaaggtgggtggatcacctgaggtcgggagttcgagaccagcctgaccaacatggagaaaccccgtctctactaaaaacacaaaaattagccaggcatggtggcgcacgcctgtaatcccagctacttgagaggctaaggcgggagaatcacttgaacccaggaggcagaggttgtggtgagctggaggttgtggtgagccgagatcatgccattgcactccagcctaggcaacaagagtgaaactctgtctcaaaaagaaaaaaagagaaaagagagagttagtgaggtcagtccctaacacaggatagaaaggatgggtgttgtcaactatttattggtatggggggaatcctctcacaagaagcaggaagggtagggcattaagaggtttggggacaacaaaaagttacttacattagctcattactctagttatgggtttaaatagactctattcagttgaagaaagacaggtccttagcaggtattgaaacagatgtgagactgcagctctaagggtgcttccagatctgaaactagtggagactgtaataggtcctttcagtactttctcctgcacaccttgttttatgattttgcatttatttttgttatgcagtaattccatccattcattagttatgagagcattgattcattcttcctctgacagtcttctcatatgcttcatgtaaactgagaggagggtaggaatattcttgtcgattatttatgtcttccagtcctagccatagaaatgtttgacttggtaactgtgaggtagtttgtccactggttaggcttgctatttggagtttcttcctgtgtagagaaatgttggctattagatgtggtttaggatataagaacagtgagtcgttactatatatagggagttgagaatgagtattccagtgtctgcttaggaaaaacaggtttgtgttttactttaaagattgtcctgggaaaagtaaagagcgttctttgagaactctctagagaacaggatttgaccctcttggcagtgattccttaacttgctttgagtctgaggcacttctgactggccattgaaagctatggatcctcactctaaaaaccacccattatatgtgtagacaagattgtacatataattttggggttttgcagatttcctgaaactatcccttcttttttttttttttttttttttttgagacggagtttcgctcttgttgcccaggctggagtgcaatggcgcaatcttggctcactgcaacctccgcctcccaggttcaagcaattgtcctgtctcagcctcccaagtagctgggattacaggcatgcaccaccacggccagctaattttttatttttagtagagatgaggtttctccatgttggtcaggctggtcttgaactcctgacctcaggtgatccgcctgccttggcctcccaaagtgctgggattataggcgtgagccaccgcgcccggcctaaaactgccccttcttaagaggctctgctaaaaggacatggagtccatctggcactttgacaaaatagagtgctctaatgctgttattgggaggaatctgttaaaagcccaagttgttgtgtgactctggagtttgccacctctttgttccgttactaaagcaatgttacagaattcctgatattggaaatgacaatctgcaggccatttgtagtgtaggggaagctggcttcattcctgtttcatcttttttgaaaaagaactgactgctcctgggtgggaatccagcagcttctcggcagatacactgactgcattgcggtgctttgggacagaagacaaggacctgaaagatgagctctgagggaagcattaaagaaaaatgcatgagctcacagtttataatttatctggaattctaaggaatttatctaatcacaaaaattaggatggtttttctagtacatcactggggatctttaaggaacctgaaacagtatccttagctcttgggatgtggcatttatttccgtcctaaatgtgagagaagatgctgcagggatgctgccaggttgtggctttggttcgtagagttatctgatggccaccttacctctgcagttcagctcagcaagtgccgttgagcccagcatgtgtggtgcaatgtgcttgatgctaggattcctgccctttaggagcttgcagacaagtggtctaggatgcatcctcaggtagagaaaagtttatccatccaagttaaaatattttcccctgatttttaaatttagcttctccccagacctggctctggactcaccaggcactgaccactttgtcatcattgcccaactgaaggaagaagtggctaccctgaagaagatgttgcatcaaaaggatcaaatgattttagagaaagagaagaaggtatggtttagttaattcctctctgaccagaatgatgcgagggtgagatatgtggtatgggacatgataataaccctttttaactgatgtttgttgagagcctatgtcaaggttgggatatcctggggagaggctggctgtctgccaagatgacttttgggatggcattactccagtcagttgggctcaaaaaactgatttttctcagcacttgcagcttccacttctcaaagaggacattttgttttttgttttgtttttgagacagggtctcagctgtgtcaccctggctggagtgcagtggcacaatcatggctactgcagcctctaacttccagtctcaggcaatcctcccatctcagcccacttagtagcttggactacaggcatgtgccactgtacccggccaatttttaaaattttttgtagagacatggtcttattatgttgcccagactggtcttgaactcctggtcttaagtgatccttccattttagcctcccaaagtgctaggattacaaatgtgagccattgcccctggcctcagagaggacatttgttaactgagcttacagagacaatgtataaaaaaaccagtgttcacatctcagttcacagcggagcatgtaacaaacagtacacagttcttggcatgagctacctggagaggctgtaatcagaaggtgctgaataagcatagagttgggacacgaggaggtagttatgtaactggaatgttcagtgctgtccggctaaaagaacctaatgtctctttctcttctcatggggatggccatgtctgtgggacaataatactcaaagttcatgggacatttcttcctcttccctgaacagcgttcatgtgggccttctgccatgactcttatgtcactgtgcttccactgctgacaactcttactaagtgacccatctttaatatgttaatattttaatatcttagtttatcttcagtattaatactcttttttttctttttttgttttttgagacagagtctctgtcgcccaggctcactgcaacctctgcctcctgagttcaagcgattctcctacctcaacctctcaagtagctgggattacaggtgcctgccaccatgcctggctaatttttctattttcagtagagatggggtttcgccatgttggacaggctggtctcgaactcctcatctgaagtgatctgcctgcctcatcttcccaaagtgttgggattacaggtgtgagccactgtgcccggcctcagtgttaatattttattttcacatcagaatatcttctatcttatatttctaatatcttcacattaatatcttcagaataagaccagtcttattatggtctgaagttgtcttccatttttacattcttactctgattcatgtctgttatcttgttttcaggttttctaaatagtatctcatttttaggctgggcacactggctcacacctgtaatcccaacactttgggaggctgaagcaggcagattgcttgagcccaggaattcaagaccagcctgggccattggtgaaacctcatctctgcaaaaaatacaaaaattagcagggcttgatggtgtgcacctatggtcccagctacttgggaggctaaggtgggaggatcaccttagcctgggaggtcaaggctgtggtgagcagtgatcataccactgcactccagcctgtgggtgacagagccagaccctgtctccaaaaacaaacaaaaaagaatatctcattttgccttaatattataataataatagctaacttttattggatgctaacttcgtgcctagctctgttttaagtgctttatatgtattaactcatttattctttttttttttttttttttttttttgagacagagtcttgctctgtcacccaggctggagtgcagtggtgcaatagttcactgcaacctctgactcctgggtttaagtgattcttgtgcctcagcctcctgaatagctagctgggactacaggcgtgcaccaccacacctggctgatttttgtttttgtttttgattgagacagggtcttgctctgtcacccaagctggagtgcagtggtgcaatctctgctcactgcaacctctgcctccctgggttcaagtgattctcctgcctcagcctcccgagtagctcggattacaggcatgtggcaccacagccagctaatttttgtatttttcatagagatgggggtctcaccatgttggccgggctggtcttgaactcctgacctcaagtgacccgcccacctcggcctcccaaagtgctgggattacaggcatgagctaccatgcctggcccatttattcttataaaaagcctttgaggccgggcttggtggctcatgcctgtaatcccaccattttgggaggccaaggcgggtggatcacgagggcaggagatcaagaccatcctggctaacacggtgaaaccctgtctctactaaaaatacaaaaaaattagctgggcgtggtggtgggcgcctgtagtcccagctactcgggaggctgaggcaggagaatggcgtgaaccggtgaggcggagcttgctgtgagccaagatcgtgccactgcactccagcctgggctacagagcaagactccatctcaaaaaaaaaaaaaagcctttgaggtgggaattgttacaatcatttcatagatgaagaatgcctccagtatttttcttcttaggggtttctgatctcccctggctctttatgttgttttctgccaagttcagaatgctgtgattcattctgaatagctaagacattgatgtaaattccttacttgcattcatctaatttctacctcattttacagatgaggaaacagacccgaagaggttaatatgtccaaaccacacagctagtaaatggcggaacaagggactggaagtctttctgactctactgttctttctactgtgctatgctttctcctgctaggaaggtggaaattcatgggaagagatctgtgttctatccacataactacatgactgtcaagtgaaaatggcccaagtatattctctccatggactagatcagaatggcacataaaaggatttttgtaaaacagggacaagatgaacacttgtttctactgctttgcagagatagtttttatttatttattatttttatttttttgagacagggtcttgctctgttgcccaggctgttgggcagtggtgcagtctcagctcactgtaaactcaacctccctggctcaagcgatcctcccacctccgtcctctaaatagctgggactgcaggcgcacaccaccacacccagctattttaattttcgttttttttttttttttttttgtagacatggggtttcaccatgttgcccatgttggtctcaaactcctgagctcaagtattccgcccttttggcctcccaaagtgctgggattacaggcatgagccaccactcctggcccagagttagggtttttaaaggagcaaaagcagattgtttcccaaagctttcaggaagcttggaatacaggctctttagcataatgcctgcccatctctccaacctcatcagccattcaaataatctctgttatctcacatttatctgcctgtgcctatactgttctctgcttggttgccctcctgctcaccttatgtgcctattgttaatacatctcaaagctcagctcacacatcacctctgatttagaatttccttgaagagcagtcaacagaagggggtctggggtttgaaatctagctctgccccttgctaactctgtatatgatcttggccacattccttaaccctttctaaagatcagttttctcctctataaaatgggactactactctcacaatgttatcataaagatctactgaagtaatataatcatataatcagtttttctgcaacatagtaaaagttcagtaattggtagcaactattattctcaaatattcagaaatgttagttcaggactttgtgtaattttcaggaaagctttagagaaaaagagggtgtggaattccctggttttgatttagatacggatctgcaggagagccctggatttcattaatttgggtgaccatttagctctctgaaagcaatttttttttattgcacagaaatttcttctggttattctgccttgtttccctcagattacagagttgaaggctgattttcagtaccaggaatcgcagatgagagccaaaatgaaccagatggagaaaacccacaaagaagtcacagaacaactgcaggtgactgactctgcttattttatgtgctaaaattgtgtacctacctggtatacctagctgattgtattttaagtgatcatctcttagatttcttttttttctcaaagtattaacaaatcatgttaatcccccttttaggttttttttttttgttttttttttgagacaggttctctgtcgcctaggctggagggcagtggcacgatcatggcttactgcagcctcaacctcccaggctcaggtgatcctcccacctcacccttccaagtagcgaagaccacagccatataccaccataccccactaatttattttttaatttttttgtagagatgggctctcgctatattgcctgggctagtcttgaactcctggcttcaagcaatcctcccacctcaacctcacaaagtgctaggattacaggcgtgagccaccatgcccagcctgtagatactttgtattgtttcactcttggatgtgttctgatcttttcccctcaaaaacagtagaattattaagtatgttctttgatttttgaataaaccagatgtgattccagatgtctgaattatagattctgtttatccagctcatgaagtcacttcacagtttgtattgcataaagcatccctttgtaacagtgggtcccaagagattgaggtacactgattaacctctggcaaatacttttttctcctgaaccaagtttcaagccctagagcttcctgttgttttccacctctagaattgttcatctctttctgaccctccacattgtctgccttagcatctgcacttactctgcatgaaaaatagcttatatcctgtttgaaacatccttcttgcactgattttttttttctttaggccaaaaaccgagagctcctgaagcaggcagctgctttgtccaagagcaagaagtcagagaagtcaggagctataacctctccatgacagacctcaaggaggctccctagcaacagcaaatggagttgtccagggttagggttggagacctggctgttctgtgggaattgcaagctttcttaagaaatctctattttattacagttatccttctttgtgcgattgcagtgggctgaatggaaacacctggtttgtgctgtgttagactgcatgcttgagtgtttgggatttcaagctcgctctctttctctcactattaggacttttctttttcttcttcctcttctctctattttggttctattctttttttttcttttttctttttttttttttttttttttttgtggtggtcactgctcagtgtaatgtgcagaatgatttgttttttgtttttttttttttttttggtccttcattgcatcctgccatacccatgagcaaacagtttggcattaattatatatcactgccaccctctgaactttgaaaactgccatcttcagacttggtataatggaagaggctttctctctccaataaaccttttgcttcagggtatactcttcggtttttttccagatgtattatgtatgaactttgtactatgtatagccagagttttatttattttttaaaaaagaaactttttcttgataaaggaataatggtggtctagctagttcttgtaaaagtgatgcctcttgaaaaaaaacagtcctattcactagcttttagtaaaagaatcagatcttttctttcttgttaccttggagtcttaaaaactgattgctaaggtgaaacaattcaatgcataagtatggagctaagtgccttttggaggatttcttggaagagcatttatggagatacttaagggaggtagcaaagatttgaaccgtctgtctttttaagtaagggcagaaagcaaggttgtccaggttgtactggacacttctctccccacccctttcctgattgttttatgtgattgattttaaattctcacactgccacttctttaaaaaataaaatcctttatttgcttatatcagttgtcatactgggctgctgtcagagaatgtttttttacatgaatgaacagattaaaaatggaataatatggtcgggtgcggtggctcacgcctgtaataccagcaatttgggaggccaaggcgggtggatcatttgaggttaggagtttgagaccatcctggccaacatggtaaaaccccatctgtactaaaaaaatacaaaaattagccgggcctggtggcatgcacctgtaatcccagctacccaggaggctgaggcaggagaactgctcgaatcccgggaggcagaggttgcaatgagctgaaatcgcaacactgcactgcagcctgggcaatggagtgagactccgtctcaaaaaaaaaaaaaaaaggaataatatttgaactacagagcatttttggggtcagcatgagctgctctagtaaggactcttgagtctgggaaaagtggtatcactataccttctccccactcctcacccacccgagcccatacactccctgcttttcatggatatgtattgaaaacaggtgcttctcagaagcactttgcctcaaccagagttatgtatgccctgcctatcttcccttcttaaccctgtaggaatatggatttacttttccaggaaaggggatagatttacatttctaggcatactctcaggtcctctatgtgatgtttgtgaaaggaattagggtgtgtcatgtgtgccatgaaacaacaaaaccaactaccctagaatcatttatgcagggggtactagagttagaaataataatgagggcagataacatttgtacctcagtctaccaaaaaattatagtactaaatttaacttctaggcgtttcctggaagcagatgctctataatttgtgatagcattctcataaatggagtcctacacataattggacagagatgtggaaatggtggtttccttctgataagggatacagtggaccatgtcgcttatatatcaccctactaggggatataattttcccttctaagcaagggaaatggcagtgctaaatagttttgtaaagtttttgaatgagaagcttttaggtaaagataaactgtcataatatttttcagatgcatttgcattgactatgggagaaaaattagggggaaatgacagtcatggtgtttttttttaattttaaggactgaaattctgttacatgatgtatgacaatataaaaacatacttagttttatactaaatctttttttaaggtcttggcatttaatataaagcaaattcacacgttttctaactttccataagttccaaaaagggaaagaagaaacctcagtcttgaaattttgatttttaaaaatcatgacactgttttaccatgaaattgagtagctaacttttggtaacaccttttgtttctttgtatgtttgtaataatggacattttaaaacacaggaatgttttggtttgtacagactttgacaaatgtgtgttaataaaaattcatattgactcaagtgtaattgttggattttgtttttatttcttgctgtttaccagtagacataccccgttatccccttcagcccttcagcctagaaaagtttgtcttgcttatagacttaaaaaattaaaagcctaactgctaattgggaatttcctgtccattagagaataaactctttctttctctcttctatgactgttttgagacagagtctcactcagtcatccaggctggagtacagtggcaagtagatcactgcagccccgacttcctggggattctcccacctcagcctcccaagtagctgggactacagatgcacgccaccatacccagctaatttttgtattttttgtgaagatagggttttgccatccaggctggtctccaactcctggactcaagccatccacccacctcatcagcctcccaaagtgctaggattacaggcatgagctaccacacccagcctcttggtgattctgtttacccagtgtaagtgctcatgttgtgataggcactgtgctaggcagcgcggttacagcagtgacaaaaccaagttattgtacttatggggcttccatttagtggaatattggacaccaccacaccaccattgttccttgatttaaaaaaaactttttttttttttaatggagtcatgctctgtcacccaggctggagtgcagtggcatgatctcggctcactgcaacctctgccttctgggatcaagtgattctccagcctcagcctcccaagtagctggaactacaggtggcgcaccaacacattcagctaatttttttgtatttttagtagagacgggatttcaccatggtggccaggctggtgtcgaactcctgacctcaggtaatacgcccgcctcagcctcccaaagtgctgggattacaggtgtgagccactgtgcctggccaaaaaaaattttttgagacagtctctgtcacttaggccagagtacagtggtgcgatctcagctcactgcccctttgacctcccaggctcaattgatccttccacctcagccttccaagtagtttggactacaggcatgtaccaccattcctggctaattttgtttattttttgtagagatgaggtttcagtatgttgcccagactggtcttgaactcctggactcaagtgatcctctcgccttggcctcccaaagagctgggattacccaagtgtgagccacctcactcagccaaatgttccttgatttttattattattattcaaaatataatacagaatgaatctgcatgaagtatgagtgaaagctttttgaaatgtcatctcagaaggggaggaatgcatccctttgaaaccctagagccagcaggttttaaaatgagaagtgcctttcagacactcactgttacatcctggtcattctataaactcaaagctaattttctcagaataagttgaagatacttttattttgtaggctatggttgtttttgttttgttttttttctttgttttttttttttttttttttgagacagactctcactctgtcacccaggctcaagtgcagtggtgcgatctcggctcactgcaacctctgcctgctgggttcaagggattatcgtgcctcaccctcctgagtagctgggattataggcatgcgccgccatgctcagctaatttttgtatttttagtagagacagggttatgccatgttggccaggctggtcttgaacttctgacctcaggtgatccacctgccttggcctcccaaagtgctaggatttcagccatgagccactgtgccaggcctgtttttgtttttttgttttttgtttttttggttttttgagatggagtctcgctctgtcacccaggctggagggcagtggtgcaatctcagctcactgcaacttccgcctcccagattcaagtgattctcctgccttagcttctcgagtagctgggactacaggcacccgccaccacagctggctaatttttctatttttagtagagacagggtttcaccatgttggccaggctggtctcgaactcctggcctcaagcaatccacctacctcggcctcccaaagtactgggattacaggcgtgagccaccgtgccccgcctattttgtaggctatatttatgactacaattattgtgtgaattatcttaattgactcatttactcagcctttaaaaccactgtagggtaagaaaatagtataaacaggccaggagcggtggctcatgcctgtaatcccagtactttgggaggccgaggtgggcagatcacgaggtcaggagttcaagaccagcctggccaacacggcgaaaccccatctctactaaaaatacaaaaattagctggttgctattttatttactgtccctggtgtaagaacatgtcagccttgatgttaattgcacaaattatagtctatgatgcacatggcacttttgcctgtcctggaggattgcctttaattaactggcttcctagaacatgtatacctattcactatggtatataagctttgggtctggggagtaacagcacagaaatctacctgtcttgtggctgcccaagactatgcttctgtgtgtaagttccctcagtcaatcaaccaatactgacaaattggatttgtctgcctcctcctttggctcctcagctccttcggcatttggagttcactttgcatatacagccgtttcactggacagaggacaacaaagtagaagagcatatgaggtggaggctattgtgctgaccatcttataaaatacaacctgccacagagggaatgggttttggaactaaaccagatcggagagagcaagctgtaatgtcctttatgtcctaccttcagacatcacactccatcatttctgcaatatcctattggttacaggggtcaagttactgacacttcaatgtgggaagagactgtccaggtgcattaataccagaagatgatattgagggtccaccttggaggctagctaccacattgacttttggccaataggatcaagtaacgactgtgtgaacctctggattttgaagatagcaataaaaattaccttttgggggaaagtagttcatacttcttagctattactggaatccatgacttctccaactaccagggcttgccaggctgtacttccagcaaattatcaaccctatttgaaaagtgagactgtgtggtgctatgatgtcaggctgcctgaagtagagacttcctgtctctacttaccttagagttgttgtgaggattaaataacacatatagaagtcttttttttttttttttttttcagaatcagatctcagccaggcacggcgtttcacgcctgtaatcccagcactttaggaggctgaggcaggcggatcacgaggtcaggagattgagaccatcctggccaacatggtgaaaccccatctctactaaaaatacaaaaattagctggacgtggtggcatgtgcctgtgatcccagctactcaggaacctgaggcaggagaatcgcttgaaccagagagtcggaggttgcagtgagcccagatcgcaccactgcactccagcctggtgacagagggagactctgtctcaaaaaaaaaaaaaaaaaaagactcagatctcaccctgttgctcaaactagagagcagtggcgtgatcacagttcactgcagcctcgaactcttagactcaagcaatcttcctacctcagcttctcgagaagctgggactacaggctcaagccactatgcccagctacatgtagaagtctttagaacagtgcttggtacatagtatgcactcaattttgtaagctattatcatctatgacttctacagaatcaacattttatgtttcctaagaaggaaggtgatagaggcataaattagaatgaacatgtatgtttacttgtttttttgcttccgaagtcactttagtcctatgtcacttctaggccgtcagaccattattgcaacccacaacttttatacctctttttcaactccacattacccacctcatatatgccactttattgcgttgatttctagagtgtcatttaagtatgtgtgtctctgtgtgtgtgtataaaattggcatacacaaaaataaccctcagtgcacaatgagttttgacaagtatatgcagctgtgtaatcaccaccataatcaagacatggaacatattcatcaaccccaaaagttcccttgagtcctttggtgcccttccctccacaccagcctttatgcaaccactaatctgatttatattcctatagctttgccttttcaagaatgtcatgtagccaggtgcggtggctcacgcctataatcccagcactttgggaggccaaggtgggcggatcacgtgaggccaggagttgaagaccagcctgaccaacatggcgaaaccccatctctactaaaaatacaaaatgagccaggcatggtggcacatgcctgtaatcccagctactcgggaggctgaggcaggagaatcgcttgagcttgggaggcagaggttgccgtgagccgagattatgccattgcactccagcctgggcgacaagagtgaaactccatctcaaaaaaaaaagagaatgtcatataaataaaatcatataggatatggccttttacgtctgacttttttcacttagcgtatgtgtttgagattcatccgtgtttttgcatgtctcagtaatttattccatgtctcagtagtttctttttatagctgaatagttttccactgtatggatgtaccacagtttatctcttcagcagttgatggacacttgagctgcttccagtttttggttattacgaataaagctgccgtaaacatttgcatacaggtcttttaatagaaatgtgtttttattattcttgggtaaatatatagcagtggagctgctgaattgctgggttgtatggtaaatttattcttaactgtatacgagactgtaaaactattttccaaagtgactgtaccattttgcatccccaccagcaatatatgatgagtgctaattttaatacagtattatttgcaacctaagtgaatttccccattaactcctccctaccagtccccaggaagctcaccatactgatagtaatagtgatacttcatgatcttggcttattgcaacctctgcctcccgggtgcaagccatcctcccacctcagcctcccgagtagctgggattacaggcctgtgccaccatgcccagctaatttttgtattttttgtagagacagggtttcaccatgttgtccagggtagtcttgatctcctgagctcaagtgatccatccttttggcctcccaaagtgctgggattgcagacatgagccactgcacttggccctattctgacttttaataacatagatttaatttggccagttttgaacttaataaagatgaaatgatacagattgtactcattttatgtctagcttcctcttctcctttttttttttttttttttttttttttttaagagacagggtctcgctgtgtcgcccaggctggagtgcagtggtgcaatcatagctcactgcagccttgacctcctggcctcaaggatcctctcaccttgatctctcaggtagctaggactacaggtgtgcaccactgtgcctagctaatttgtgtctggcttctttagctatgcattgttgggaagaggtcacctatgttgttcacacagcagtaggccatttatttttgtgctttataatatctgtttatacaaacctctgttgatggatattcgagttgtttacagtttggaactagtaaaaataaatactgctatgaacttcataataacaccaaattggaaacaatgcaaacatccatcaataagagaatggataatcaaactgtaagtatatttatatgaggaaatactaatgagtaataaaaaaagaccaaactactgatatatgtgacatcatggataaatctcaaaaacattgtgttaattgaaaaaagccaaacactaaagaatatataaagtatgaagtccaagagcagacaaagctaatctgtagtgacaaaaatcagaaagtaaagtccaggtgcagtgtggctcatgcctgtaatcccagcactttgagaggctgagccaggcggatcatttgagaggccgaggcgggtggatcattcgagaccagcctgactaacatggtgaaaccctgtctccactaaaaatacaaaacaaattagctggacatggtggcgcatgcccatattcacagctacttgggaggatgaggcaggagaattgcttgaatcacgaggtggaggttgcagtgagccaagatcgtgccactgcactccagcctgggcgacagagtgagactccatctcaaaaaaaaaaaaaaatcagtaagtaacttccagtgatgagggaaatggattaaaaaggagcataagtcaaggaaactttctggggtgatgataaaaatgttttatctcttgatttgggtgtggcagttacatggatgtgtacaagtgtcaaaatccattgagctgaacacttactatctgtgcattcgattgtatatcaattataactcaataaaaattaaatgtaagggctgggtgtcatagctcactcctgtaatcccagcactttgggaggccgaggtgggtgaattgcttgagcccaggagtttgagaccagcctgggcaacatggcaagaccacatctcaacaaaaaaatacaaaaattagccaggtgtggtggtgcgtgcctgtagtcccagctacttggaggcctgaggtaggaagatggcttgagccagggagattgaggctgcagtgagtcgagatcacgccactgcactccagcctgtctccgaaaaaaaaaaacaaaaagtaaataagtatagaaaaatgctgcttggtcctaaaaatgctcctatgaactatacctgatttttggaacacgcatagttgggtatatagttaggagtagaattgctgggtcagaaggtgcatgggaatcctggctctgtcacttaacagctgtatgacattaggcaagtacccagaatctctagtttctttatccgtaccaaggagctaatatcgccttgatgggtgcaaacccatgaagactactttcgttaattaacaaaagtatgtagagctgagagacattttctctaaagccatagatttttagaaaatttgttgctcaaattatcagtaagaatggaatatatcactcttacctggaggatcagttactttgatgcagaagagcagcctcaatttctaacgcaggtgcagagcttcagataaggggtttccagacacaacattccacatttatcttggcatcatggtttccaaggaaacaggatcttgttagctggggcctgatgataatccctttacacatagcctggtgtgtttgggggctatcaaaacactgcttctttaaaaatttatctacatttctttcccccaaatcctggaataactcactgtcttcctgtgttttgtgacatgctccatgattcttttggtgtgcagtttcccttgcagcagcaagttaataaacttaactttgtctgactacaggtggtctttatcagatgggctttatcttggagattactgataacgtacacaaaatgtgttcatactgcctggcacctaacaggcatttaagcaatgataaaattattatttttattattcatgtgttaattcaataaatgtttgtttgacatccagtatttgcaaggcacagatttactgctatgagagatgctcactgcaacctctgcctccctggcttaagctacactcctgcctcagcctcccgagtagctgggactacaggctcaggccactatgcccagctaatttttgtatttttggtagagatagggttttgccattttgcccaggctggtctcgaactcctgagctcaagcaatgatcagcctgcctcagcctcccaaagtgctggaattccagttgtgagccaccgcgcccagcctaaaaaccacttttattttacatggagaaagaaaacaatatttttaattcctaaaagaaaaatatctttactgaacttcactttaaatagtgtcaaatgtaaatgaaaaaaatcatcagtactattatataggtaaaaaagtgcaatttacatgacttgcttaagatttgacataaaactacagattctaagaaacggtaaggttttataataataaccaaaacaggctgggtgcggtggctcacgcctgtaatcccaacactttgggaagccgaggcgggtggatcacctgaggtcaggagttcgagaccagcctggccaacatggtcaaaccccatctctactaaaaatacaaaaagtacccgggcgtggtggtacacgcctgtaatcccagctactcgggaggctgaggcaggagaatcgcttgaacccaggaggcggaggttg

SEQ ID NO: 1508 - DNA, 2156 bp, Homo sapiens
tgccgcagccagcagcctgcagccgccgccgggttgtgcctcagactgtcagataaatcggcgggccgggccggcgggtcggtgagcgcggcccgggccggacatggcggcgctctacgcctgcaccaagtgccaccagcgcttccccttcgaggcgctgtctcaggggcagcagctgtgcaaggaatgtcggattgcacaccctgttgtgaagtgcacctactgcaggactgagtaccagcaggagaggctagagtgcaatggcacgatctcggctcactgcaacctccacctcccaggttcaagcgattctcctgcctcatcctcccgagtagctgggattacaggcattaaaaccaatacaatatgcaagaaatgtgctcagaacgtgcagttgtatggaacgcccaaaccttgtcagtattgcaacataattgcagcatttattgggaataaatgccagcgctgcacaaattcagaaaagaagtatggaccaccctattcttgtgaacagtgcaagcagcagtgtgcatttgacaggaaagatgatagaaagaaggtagatgggaaattgctgtgctggctgtgcacactttcatacaaacgggtccttcagaagaccaaagagcagaggaaacacctgagtagctcttctcgtgctggccaccaggagaaggagcagtatagtcgcctgagtggtggtggccattataacagccagaaaacactttctacatcttcaattcaaaatgaaatcccaaagaaaaagtccaagtttgagtcaatcacaactaatggagacagcttctccccagacctggctctggactcaccaggcactgaccactttgtcatcattgcccaactgaaggaagaagtggctaccctgaagaagatgttgcatcaaaaggatcaaatgattttagagaaagagaagaagattacagagttgaaggctgattttcagtaccaggaatcgcagatgagagccaaaatgaaccagatggagaaaacccacaaagaagtcacagaacaactgcaggccaaaaaccgagagctcctgaagcaggcagctgctttgtccaagagcaagaagtcagagaagtcaggagctataacctctccatgacagacctcaaggaggctccctagcaacagcaaatggagttgtccagggttagggttggagacctggctgttctgtgggaattgcaagctttcttaagaaatctctattttattacagttatccttctttgtgcgattgcagtgggctgaatggaaacacctggtttgtgctgtgttagactgcatgcttgagtgtttgggatttcaagctcgctctctttctctcactattaggacttttctttttcttcttcctcttctctctattttggttctattctttttttttcttttttctttttttttttttttttttttttgtggtggtcactgctcagtgtaatgtgcagaatgatttgttttttgtttttttttttttttttggtccttcattgcatcctgccatacccatgagcaaacagtttggcattaattatatatcactgccaccctctgaactttgaaaactgccatcttcagacttggtataatggaagaggctttctctctccaataaaccttttgcttcagggtatactcttcggtttttttccagatgtattatgtatgaactttgtactatgtatagccagagttttatttattttttaaaaaagaaactttttcttgataaaggaataatggtggtctagctagttcttgtaaaagtgatgcctcttgaaaaaaaacagtcctattcactagcttttagtaaaagaatcagatcttttctttcttgttaccttggagtcttaaaaactgattgctaaggtgaaacaattcaatgcataagtatggagctaagtgccttttggaggatttcttggaagagcatttatggagatacttaagggaggtagcaaagatttgaaccgtctgtctttttaagtaagggcagaaagcaaggttgtccaggttgtactggacacttctctccccacccctttcctgattgttttatgtgattgattttaaattctcacactgccacttctttaaaaaataaaatcctttatttgcttatatca

SEQ ID NO: 1509 - protein, 339 aa, Homo sapiens
MAALYACTKCHQRFPFEALSQGQQLCKECRIAHPVVKCTYCRTEYQQERLECNGTISAHCNLHLPGSSDSPASSSRVAGITGIKTNTICKKCAQNVQLYGTPKPCQYCNIIAAFIGNKCQRCTNSEKKYGPPYSCEQCKQQCAFDRKDDRKKVDGKLLCWLCTLSYKRVLQKTKEQRKHLSSSSRAGHQEKEQYSRLSGGGHYNSQKTLSTSSIQNEIPKKKSKFESITTNGDSFSPDLALDSPGTDHFVIIAQLKEEVATLKKMLHQKDQMIKEKKITELKADFQYQESQMRAKMNQMEKTHKEVTEQLQAKNRELLKQAAALSKSKKSEKSGAITSP

SEQ ID NO: 1510 - DNA, 2054 bp, Homo sapiens
tgccgcagccagcagcctgcagccgccgccgggttgtgcctcagactgtcagataaatcggcgggccgggccggcgggtcggtgagcgcggcccgggccggacatggcggcgctctacgcctgcaccaagtgccaccagcgcttccccttcgaggcgctgtctcaggggcagcagctgtgcaaggaatgtcggattgcacaccctgttgtgaagtgcacctactgcaggactgagtaccagcaggagagtaaaaccaatacaatatgcaagaaatgtgctcagaacgtgcagttgtatggaacgcccaaaccttgtcagtattgcaacataattgcagcatttattgggaataaatgccagcgctgcacaaattcagaaaagaagtatggaccaccctattcttgtgaacagtgcaagcagcagtgtgcatttgacaggaaagatgatagaaagaaggtagatgggaaattgctgtgctggctgtgcacactttcatacaaacgggtccttcagaagaccaaagagcagaggaaacacctgagtagctcttctcgtgctggccaccaggagaaggagcagtatagtcgcctgagtggtggtggccattataacagccagaaaacactttctacatcttcaattcaaaatgaaatcccaaagaaaaagtccaagtttgagtcaatcacaactaatggagacagcttctccccagacctggctctggactcaccaggcactgaccactttgtcatcattgcccaactgaaggaagaagtggctaccctgaagaagatgttgcatcaaaaggatcaaatgattttagagaaagagaagaagattacagagttgaaggctgattttcagtaccaggaatcgcagatgagagccaaaatgaaccagatggagaaaacccacaaagaagtcacagaacaactgcaggccaaaaaccgagagctcctgaagcaggcagctgctttgtccaagagcaagaagtcagagaagtcaggagctataacctctccatgacagacctcaaggaggctccctagcaacagcaaatggagttgtccagggttagggttggagacctggctgttctgtgggaattgcaagctttcttaagaaatctctattttattacagttatccttctttgtgcgattgcagtgggctgaatggaaacacctggtttgtgctgtgttagactgcatgcttgagtgtttgggatttcaagctcgctctctttctctcactattaggacttttctttttcttcttcctcttctctctattttggttctattctttttttttcttttttctttttttttttttttttttttttgtggtggtcactgctcagtgtaatgtgcagaatgatttgttttttgtttttttttttttttttggtccttcattgcatcctgccatacccatgagcaaacagtttggcattaattatatatcactgccaccctctgaactttgaaaactgccatcttcagacttggtataatggaagaggctttctctctccaataaaccttttgcttcagggtatactcttcggtttttttccagatgtattatgtatgaactttgtactatgtatagccagagttttatttattttttaaaaaagaaactttttcttgataaaggaataatggtggtctagctagttcttgtaaaagtgatgcctcttgaaaaaaaacagtcctattcactagcttttagtaaaagaatcagatcttttctttcttgttaccttggagtcttaaaaactgattgctaaggtgaaacaattcaatgcataagtatggagctaagtgccttttggaggatttcttggaagagcatttatggagatacttaagggaggtagcaaagatttgaaccgtctgtctttttaagtaagggcagaaagcaaggttgtccaggttgtactggacacttctctccccacccctttcctgattgttttatgtgattgattttaaattctcacactgccacttctttaaaaaataaaatcctttatttgcttatatca

SEQ ID NO: 1511 - protein, 305 aa, Homo sapiens
MAALYACTKCHQRFPFEALSQGQQLCKECRIAHPVVKCTYCRTEYQQESKTNTICKKCAQNVQLYGTPKPCQYCNIIAAFIGNKCQRCTNSEKKYGPPYSCEQCKQQCAFDRKDDRKKVDGKLLCWLCTLSYKRVLQKTKEQRKHLSSSSRAGHQEKEQYSRLSGGGHYNSQKTLSTSSIQNEIPKKKSKFESITTNGDSFSPDLALDSPGTDHFVIIAQLKEEVATLKKMLHQKDQMIKEKKITELKADFQYQESQMRAKMNQMEKTHKEVTEQLQAKNRELLKQAAALSKSKKSEKSGAITSP

SEQ ID NO: 1512 - DNA, 95443 bp, Mus musculus
  misc_feature (1)...(95443): n = A, C, G or T/U
tcctctcctctcctctcctctcctctcctctcctctcctctccttttctctctctcttccttcctttctttcttctttccttctttccttctttccttctttccttctttctttctttctttctttctttctttctttctttctttctttctttctttctttctttctgtatctgtttgaaaccagggactctgcaagttataaatgagcataaccatttggaaacctttgaatggaaggctagggtctggattcttgcctaggacctgggtttagttctcagcaccacatggaaattcacaactgtccatagttccaggggacccagtatcctttggcctctgaggttaacaggcacacaggtacaaatgtgcaagtaaaatactcctacacataaaataaatatcctccctcccctcgacccccagagttcaggctgtccgatgtctcaataggtaaagagcttgctctgtgagcacgaaggcatgtgtatggatcaccaatatgcatgtccaaagtcagaacagagtaacctttctcctgttgtttgttacatgtttgccttttgccatcaagcatcaacataccacatcagcagtttgtatttgtgcacctcggtatggtagaggtgatggacagggaggctctctcagagagcctactgacgggaatggtaaagaaatccctaaattattcgctcttcatttagcagacccttgagatcagaactgcttataggtggtcaggctggtcatccttgaaccctgtggctcagttccatgtctgctgctgcctttgatcctccactgttgtactacaggcttctccggggcggttctttctttcctttccaaaggtttatttttattatttttatttgtgtgtctatgtctgtgtgtatgtgccagaaggaggagctattggagctggggtcacaggtggttttgagtcattccctgccccttcctccacaacgtgatctgagctcagttctgttcttaactgctgactcttccctcaagcccctctctagtcattttcactgtagaactttggaaatttccacaactaacaagtagcaataaatgcaattcctatagcatttatgttaaagccaagccaagaacagggcacttagtgaagtttccaggtatagccttgggatgatcttactatcaacaagtacattactcatattcttttgttttgtttttgtttttcgagacagggtttctctgtgtagccctggctgtcctggaactcactctgtagacattcaggctggcctcagctgcccagctcagtattcacattcatatctatttgaaataataccaaaggaattctgatctcagtgacagcctgagggtcagaacagtgcatgtggctcgagagctgggggtgagcaggtgcctgggctaaagctgcgtcctgtggatgagcatcttcacggtggagactgcatgtcatggtctgcagcagtcctgcagtattacagtatccctccacgagtgaccaaagcacttgctgccgcgtctaacagactcagttcagtccctgcaacccagctatacagtagatggactccacactcacctcacacatactctctctctccctctctctctccctttctctctctacacacacacatacacacacacacacacacacacacacacaactccacagtgttgtctctaacctccacatgtcccatccacatagcacacaccaaccactccaccacctccaccagcaccaatcaagaagattacttttttttttttttttttttttttggttttctgagacagggtttctctgtagccctggctgtcctggaactcattttgtagaccatgctggcctcgaactcagaaattcacctgcctctgcctcccaagcactgggattaaaggcatgtgccaccacgcctggcttgttttgttttttttgaaacagtgtctcaccttgtagctctgcctatctgtcctgtaactcactgtgtagaccaaactagccttgagctaacagaaatcaacctgcttctgcctcctgagtgctggccttaaaggtgtgcgacaccgagttcaggaataagtttactttgtttgtttgtttgtttttgttttttcgagacagtgtttctctgtgtagccctagctgtcctggagctcactttgtagaccaggctggcctctaactcagaaatccgcctgcctctgcctcccgagtgctgggattaaaggcgtgtgccaccacgcctggctaggaataagattacttaaaaaaaaaaaaaaaaaaaaaaaaaaggaaaaaagtgtacgtgttattttgggctgaggctacagcacaattcctaagttgactagccatgctgggatctatattttaaaagtggaataatatattttaacatatatttgaaaattgtaaaaagtgttatatagtagcaggtcagtggtagagagcttgcctcgtatgttgctaaaccattggctcactctccagcccatcatgtgtactctagatttctatttgtttgggacacacagtgtctaacgttagcattgtgtattcttgttgcagatgggctctagtcatgaacatacaatgtgctggtgtgtgggtgtctgagtgtgtgagtgtaaatgtgtattagtgtctgtgacagtgtctgtgtttgagtgtatgtgtgtgtgtgagtgtgtataagtatccctacagatgagtgtgtacatgtatgaatgtcactacgtacgagtgtgttatgggcacgagcatctgtgtgcttgagttgagtgtgtatgagagtgtaagtgtgtgtatgagtgtgagtttgtgtgcatgcgcgcacatggttcctgaaggatccactgcacagggcagctgaaaatattcacctgcttccatcctctagcagggcggcaagtgtcacagcacacttcttcacgggtggtgaggtggtgacacagtagctgctttcatacctcaacccctctgggggcttctggaaattttagggacacaagggatgatgtggggaggtgccaaagcctgaagctatatccgacagggttctgtggtgtccctgttaagttcctcattccctggagcggggtgccactcccatcacaaccaccacagaggtcagactcgtgatagctttgtggctgggtccactccatctttcttttttttttttttttagtagttatagatgggttcatacccagtccaagctagtcagaatgcttgtcccccagggccattcacttcctgtcttatgcttaataggtccctttagattgtctttgattctaccattaaaagcctatgagcatcatgtgggggaatctcttgaagtggttgtgttgtggagaacaagggaagcatctgtgtatacagccgcccctcctggttcagagtacatgccctcttccctccattttgtctacaacccttctgcggttttgcttctaagtattttctacagaatgtgtggtggaacagaagactccttctagccccattccagaattgctgtgaggaactgccccactctgtcccacctcagtaagatggccatgtgaggaaactctgcaaacaagggcctgagagaagaccccctgggatgcttgagttttttccccctctattctgatttccttctccaccctcagccttaatgttttctctcctcagattacactatatgcagtgaagtttttcctaactaggctttactgcacaaaagaaaatcagtttacattggtttaatatgggacaagtgtgttatgggcaggagcccattttgagacagggcctctctggttagcactggcagttttggaactcaactctgtagaccaggctggcctccagtttatagatcaacctgggactaaaggattatgctaccacactgggctccagtcctatttcaaacaaacaaaagaaaccatatatatggtagttttattatcttatccaaaaaaaaaaaaaaagtcattcagcagtgggatgagccgatgagccagaagggttagctgtagtattaagagcctgggttggggatttagctcagtgctagaggtccctcagctctggaaaaaaaaaaaaaaaaagacaaaaattttctgctggtcatggtggtgcaggcctttaattccagcacttgagaggcagaggcaggtagattggatttctgagtttgaggccagcctggtctacagagtgagttccaggacagccagagctatacatagaaactctgtcttgaaaaacaaaaacaaaaaacaaacaaaaagagcgtgaaagatggagttgctttgtttctgtaggttgaccttgggagttgttttatttgaaatattccacagaccagaatcagcatggacctgtattttacttatgttatcttatgattatatttgtagcattgctgggaatcaaaccctagagtcttatccatgagggtcctaccacagaactgcatttattttatgtttatttcattttggtagggagctgatggtgagggtaattctttttttttttttttttccttgagacagagacagggnnnnnnnnnnnnnnnnnnnnattaaaggcttgtgccaccactgccaagcaggtaattcttatgttaacacaaacacccgaaggatttatgcccaaggctattttgccttagctcagaggaaaaaaaaaagtctcattgagaaatgaacatttctttaaatgggtcttttatttatttattttgtaaaattagaatctcccaaattgttttaagactttgaggtgagtggaaaagtgaaccagaaaagcagtgtgcgagcttttgaagctggaagccacccggttcggttcgctcttagggcttcttgggcacgatttttaccgcgaagtgatgtggagcgccattcggactccgttccatattcccccgcgacaatccagttcgtgtcttagcgctcctgcctgcgagccgggagcataatgaattgccttgactctagcttcaatccactttcctcgcttaatatgcagcccaaagttttgcagctcactgtcagatggttgtgctagactttcacactgatcccaaagcctccgctggggctgtttcttcacacggagttacaaactttaagaaacacagctccagacggaaatccacgccaggctttgaactctgcttctggcttccgtcaactgacacagttgcccttttgctcaaactcgcagctccagctcgcacttgagagcgctcggctgggtgtctgctgtggcgccgcggcgggaatgtgcgggggccacggcccggctccgcacgtctcagcccggagcaggcagaaccctccctctgcctctgctagcaagcgtcctgccccgagtccagtaagggagagaggtctgcggggcaggcgaggccgaccttttgtttgtttgaggagtttcgtgtttcagacatttagagtgagcaaactgcgagggaggaagaagggcttgtcctccctgcaagcgtttctttctcctagcaaagcctccaggcccagcttccacattttgcagttgactgtgtgggatcttcataggttcatccctcattctcaggcccaatccatgcacgctgtgcagccagagagaatgagagcacatcctctgccattttcagccggttgctgccggcagcccagccccctttccttggctgtggctgccgccggagttccggcgcccagaagcggcccccggtccgcccggccccggatccagtccacttttgccgaatgccgtcctgcccggcttggtgataagaactctcctgtgagagcgagcgaacgagactttagtccggtttccatgtcaacgattcagtccatatttgccatcaggctgccggtggcagaggcgctttcgagaggagagcgctgtcctaaccctataatctgcgccgggattcctgagctgcctgggtgtggggtgaaaaggcaggggctgtgggggaaaaatacccaccgaggggaggacccacggccccgagtcggggtctcgctgctcgggccagccacgtgcccgctcctcccctcccccttctccttcccagtgcccctggggaaagcggatggaccagtttctaagaaagttcctcagcccagcagtcttaggttaatgttgtagatcttagagaggaagggactctaaggatttgagattttttttttttaaagaaaagtagagaagaagaaaaacactacctctcctgacccaggtggatatatttttatgcactttgcctcattgctagattaaaatggtgactgttttcaaaacagcgtgaccacgtgtagggaaagggattttggcgctttccatatgcacggccatggaagaaggccatgtggactttccttgaagacaaatccattctcgcttccagattttcactgggctccaggtttcccattacaccccagttccgaggaaaatggcagggtaattgcatgtaaaaaattcctcatttgtgtgcgggactcaggactgtttggcagctccgaggcagttgattaaatagcaaagctccatttatgaggcagcctataatttggtttctaggacctaatgcaccactagagttgtgcttctgagggccgtgaatgaaaactggtccataccagccagttccatcgccttggcaggttggtttggttcttggttgggggatgggagagcagaggggctctggccatggctccattctcagtttactacggaaggtttgtaatgtggggtgttcttgatttttcttgggggtagaagaaatgacttagcctttcagaattatttctgttgacccatgacatgatcagaactccaggggcctgcagagcccacaagttctaaaataatggtctgtggtccaaagtctccatttataaaatctgggaggaaaagaggcctttgtcattgatgctttcccaaggcagtcttggtcctggtgagacgctggaattccctctggtttctcctggcttgccctgtcagagcattccaggcctgcctgagaagaaaaggctgctgtggaactggtgaggcctgtaggtctggacaactctgagcttttccgcgaatgccttgatcttcacagataaacctggccttagggtctctggtaaacttcaaggagtcttacaccttaggatagacagcagatctgaggggcatccgttttctgtgtgacctgttaggctctttttctctctttatagagaaaatggtttccattttctgcatccctcttctgcagtggtttttgaacagaggttctttcagtccctggagcctcttctgtgggctgtttacagtctttcaaggtacttgcctttggagattgggctactggccattgtgagctaggttcccttaggaagtgctaatggagcttggtttgcctggaggactgtcttaagcccccaacgcatcagtagccaccattttaagagaagtggtgggatgaccacgtttgattttcaaacctcctgacactgatctgatccggtggttggatttgttcacaacgtaagtgcctttcttttctcttttcctccttttctctggctaagtagacaagatgcggcttcggccactcactccactttttatagccacacacttctgccctctgactttaagtgacctgggcagtcccctcccttcagtctgttggtaaaatgggggggggggagataatccagacctcatgcccccagggccttgtcagagagggctaatgagggcagggcacgggagaaccgatagtttgaacaatggtcagtcctcctttggggctagccaaagggggggaaaagcagggctcgctcagctgggtctctagagcaggtctgcaaaaggctttgaagaagaaaagtgctgcggaggtgctaagtcgcagccaagagcccaggcccggtgccagggggtcaggtcccggccgcggcggccgcggtttcgggctcaggccaattttgcaggcgcgggtaaagttcacgcggcccgctccctttggagcggccgggaggggacaggctaggctgggaacgcggcgagcgaggcggcgcaggctccggaggcgcgggctccgggccgggttttccccgaagccttcggcggcggcgctgccgagcgaaagaggctgagggcttgccgccgccgccgcggctccttctctcccctcctcctttgtgaggggaagggagcgagtccattccacggcctgcgcccgctccgcgctccagtcctggtttttcaggcggccgcgacggcgctgggtaaaatggcagtgctgagcctcgtgtcggagtgagggggactcggaggagagtggggcgctctagctgctcagtcccgccgcccgcccgcccgctctctcgttcgctctctcgcccgcccgcccgccgccaagcagcagcctcggcccgagccgcggccggggaggcgaggcagggcgcccgccagagcagcgctcctactctgcctcccggcgccccgnnnnnnnnnnnnnnnnnnnnnnnnnnnnnnnnnnnnnnnnnnnnnnnnnnnnnnnnnnnnnnnnnnnnnnnnnnnnnnnnnnnnnnnnnnnnnnnnnnnnnnnnnnnnnnnnnnnnnnnnnnnnnnnnnnnnnnnnnnnnnnnnnnnnnnnnnnnnnnnnnnnnnnnnnnnnnnnnnnnnnnnnnnnnnnnnnnnnnnnnnnnnnnnnnnnnnnnnnnnnnnnnnnnnnnnnnnnnnnnnnnnnnnnnnnnnnnnnnnnnnnnnnnnnnnnnnnnnnnnnnnnnnnnnnnnnnnnnnnnnnnnnnnnnnnnnnnnnnnnnnnnnnnnnnnnnnnnnnnnnnnnnnnnnnnnnnnnnnnnnnnnnnnnnnnccggagcctgagccggcggggcgggggggagaggagcgagcgcagcgcagcagcggagccccgcgaggcccgcccgggcgggtggggagggcagcccgggggactcggccccggggcggggtgggaggggggagaagacgaagacagggccgggtctctccgcggacgagacagcggggatcatggccgcgcaggtcgcccccgccgccgccagcagcctgggcaacccgccgccgccgccctcggagctgaagaaagccgagcagcaacagcgggaggaggcggggggcgaggcggcggcggcagnnnnnnnnnnnnnnnnnnnnnnnnnnnnnnnnnnnnnnnnnnnnnnnnnnnnnnnnnnnnnnnnnnnnnnnnnnnnnnnnnnnnnnnnnnnnnnnnnnnnnnnnnnnnnnnnnnnnnnnnnnnnnnnnnnnnnnnnnnnnnnnnnnnnnnnnnnnnnnnnnnnnnnnnnnnnnnnnnnnnnnnnnnnnnnnnnnnnnnnnnnnnnnnnnnnnnnnnnnnnnnnnnnnnnnnnnnnnnnnnnnnnnnnnnnnnnnnnnnnnnnnnnnnnnnnnnnnnnnnnnnnnnnnnnnnnnnnnnnnnnnnnnnnnnnnnnnnnnnnnnnnnnnnnnnnnnnnnnnnnnnnnnnnnnnnnnnnnnnnnnnnnnnnnnnnnnnnnnnnnnnnnnnnnnnnnnnnnnnnnnnnnnnnnnnnnnnnnnnnnnnnnnnnnnnnnnnnnnnnnnnnnnnnnnnnnnnnnnnnnnnnnnnnnnnnnnnnnnnnnnnnnnnnnnnnnnnnnnnnnnnnnnnnnnnnnnnnnnnnnnnnnnnnnnnnnnnnnnnnnnnnnnnnnnnnnnnnnnnnnnnnnnnnnnnnnnnnnnnnnnnnnnnnnnnnnnnnnnnnnnnnnnnnnnnnnnnnnnnnnnnnnnnnnnnnnnnnnnnnnnnnnnnnnnnnnnnnnnnnnnnnnnnnnnnnnnnnnnnnnnnnnnnnnnnnnnnnnnnnnnnnnnnnnnnnnnnnnnnnnnnnnnnnnnnnnnnnnnnnnnnnnnnnnnnnnnnnnnnnnnnnnncacccccaccctcaaccaactgctcacgtcgcccagctcggcccgtggctaccagggctaccccgggggcgactacggcggcgggccccaggacgggggcgcgggcaaaggcccggcggacatggcctcgcagtgctggggggctgcggcggcggcggcggcggcggcagcggccgtctcgggaggggcccaacaaaggagccaccacgcgcccatgagccccgggagcagcggcggcggggggcagccgctcgcccggacccctcaggtacacagccgagcggggagggggctggggccagcggggccggggggtgggctgggtggcggctgcggggaagcaggccccggccgtgggctcccctcgggcttgggcccccactgccggggagctgccattgtctggctcttctctcttaaaatggctgcctgtctgccttcctctccttccctcgatcagcctttgtgtggggcttttccaggggtgtctgtccggtttctcctcctccgctggtcctttcgaactctgggggtctccaggggggtgcagagcaaagtgtgcctggaagggccaggcccggtcgcgggggggtggtgctgggggttcaggttaggggtgtaggcagtgtcatgaacccgggagaaagaagcaacgttttcttgctcacctgccgctcctctgtccccccttgccttcctctaggccgttccccaatatacgcttttaaagagtggcccctagggctcgggggacctcgggggagagctggggcctgcttgggggcagctcgaggccgactgtggttcgctctgggccgcccgggccacctcttgcctcagtctccggcggcccagtggcctgggcttctctctgaagtgctggtaaacacagagtgattggagtagtaagtgcagattgctttggtttgggatttgaattatggaggtaaaatccttctgtcaaagccaggagacagttggtcttaggttgacatcctatctgtgatctgattggctccccatcttctgctcttggccatttataattgcctctgatgtaatggtacaacaatcctgatgagctcataaacttttacactctgcttttctgccagtgataacccaaaccttcgctgccactatccgccttttattccagagctgaaattggctgtgaccttgaggagggaggtttaagcagcaatactgtatcagcaggagcagagtcccagacaggctgcccttgttacattgtgcctgaaacaaaagaggaggcgatggcattttgcttgcaccttggatttattttgcttgttatgttttatgcagtctgaaatagattctgtgttgttggaacagtagctgagtttttctctacaatgggtttgctgtttgttttcgtttttgttactttcctgatggtataaatgagttctttgatggcgctgaagataaatttgtcttgagtagtttttgacactgttcacttatactgttgagttacagaactgaaattattttactggctatttttttatgaaaagcaaatgtaggatctgtaggggaagacgatttttgttaatattttgctgagagctgggagcggcctgataatttgatattaggttcaagagttctgcaaggcttgtctctttgtttactcgttgaatcttgttaacacttccttttgttaattgaactttgggggggaacagctcagttgaaggaggggatgcagatggccttcttggtccagggagagagtttttcctcctgaaggcttggtttaggatttttctgaattgtttctggaatatctctgttttgtcatcagttacttgagagctttaaaatagagacttgccaatatttttctttgtatcttaagttgtgtgactcccccccccccccttctatggtgtaaagatgatgaacagtggcagtcagggctacgactttgccacctttccgtgccttttttgtacattttgtctccttttctttgcttgcttctctctgggttatcagatcccctctggagtcatcttttcaaagagggcagcagcccctccccacccccaggttcccatccctagcagttgtgctgttgctggatcttgttcatgaggaactgtggttcctgtgtcctctccctgtcccccaccgacttttgtgctcttgtgttgagctgggaactttgagaatagtcctgtaaagcagctctgctgtggtgctccagccttccctcatgttcttcacctgtgagaatgggcagataggcaggtttcccctgctgtctgggggatgagttctgacttaaagactgtgcacacatgccaagtcatcttgttatgcgtatttttctcacttttgttttgactaagaaatttacgtttcttgagaactatttattagaggaagtaatcgggagtgtgtgtgttccttttgagtcagggtctcatgtacccgaggatattctggatattctgggactcaacaatgtatccatagccgtctctgcctcctaaatgctaggattacaggcaggagtcatgttttgtttattttttaacttttgtggtacagtaatttctaggtttggtcattaaatagttgtgcattccatatgtgtctaggaaatacacatatgttttgtccaggggacatgagaatgggtgaagtgcttgcttagagtcctcagtgtgctggctgctgtcggatgacttgggcaggggcgggtgtgtgtgtgtgtgtgtgtgtgtgtgtgtgtgtgtgtttctctctattgtcaccagcctccagcactgaccaaatagatttctattcaatttcatttcagttctgagctggagagcagtaacttctggaagagatagtacagctttagttttgtaagcttcgggtgtgtaagcagcctagatgtcttaatagtagtagtctctagacgtatagggaattaggctttgctctgcgattcttttggtacttgatgatacacctgtcataccttttgaagtttgaggctggttttgaactcaaggataactttgaactcttgttcctcctgcctctacccctgaaattctggagtctgtgtgtgcatgcattaccaggcctgtttgttttggttttgtagatttttaaaatttatatgaatgtttttgtgcacctacatgagtttatgtgcactagatgtgtgcaggtgacagaagtggccagaaggtgtctgatttcctgaaacagtttcagactgttgtgagctgcctaccctgggtgctgggaaccaaacgaacccaagtcctccgcaggagcagtacagccctaggccaggggctttatgtagtgctgggagttgaacctgacatttctcagatgctagctagcttaggtaagcactctgccaatggggctctattcctaatcaccaggtattaaggaaggttacccctctcctcaacccaggcatagatggaagaggttttctgagtgtgtgtgcgtgtgcgtgcgtgtgtttaatggctgggtgtggtaactcttgggaggcagaggcaggtggatctcttgagttctatgccagcatgatctacagagtgagttctaggccagccagagctgcataatgaaacccagtcacgaaacaaaacaaaggtatttttcatctaatggatgattaggtaagatgatgctgatatttgactttgtttttatgaaataaagttgagtgtgtgtttttcataggaattggtacaatcacaatgaaagttttccttcatccctttaatcaccagtagcttgtttcaagggctcgggtagtatgatgacacagttttaggacacctgtatgcatgtaaaacttatcccgtgggtcacttttaacaggaacaccttgagagtaatactaatttgtcatagtgaaaatgcaaaatacaacagcctggtgaggtcatgtgtgtgtgtgtggggtggagagagaaggggcagacgtttgagggcagcttgagccacagagagcccgatatgaagcaaagcagaactgtagtgagtagttctggatttgcctgcagacgcacggagttctgattctactgtgcactattagctgagattccagacctctgggaaacagacgcaggactcctgacttattgtcaggatgcctgcctactggcagatactgtggtctagctggactacagaacaattggagttctctccacttaggaggggccaggaaccctgacagtacagctgtggatgcttgatcatagccggctactgtccatggtggtgtgtgatgagattgggtcgtgattcgagaaaagaggcaacaggaagttcttcaggattgagctctatctaaaaggactttttatggttgcagcacccactctccatgttataatatctgatagcagaacctactatagccttggtttgttggatcaatttgtataggtgtgtgtcagctacaataggtgtttcacatagcagttggtgaactttttaaaatgtgggagtaggctaacgaagtaatggtctgggtcctttcctgatctcacctcctgaagactgtattgatttgcttaaaatcttttaagctttagaagcaatggcagcatgaagatgtttacagtatggtatttaagagccagcaatgaggattggcacctggattcctatattcacgaggaagaccatacatttaaggctatgttaaccttaacctaggttacatagcgaatcccaggccagcctggactacctagagaaacccagtatccaggagggaaagagatggtggcacatacttgtaatcccagttcaggaggcaaaggaagcacaaagatgtcctgacttttgaggtagccagagctaagcgtagcaagaccttgtatcaaaccaaaccagtgaagtatatagaatacattgataagtgaatgatattcttccagtgaactgtgtttctttgggctttgaaaaagatccttaaccccccctcttttatttatttatttatattttattttattttattttttcgacacagggtttctctgtgtagccctggctgtcctggaactcattctgtagacaaggttggcctcaaactcagaaatttgcctgcctctgccttccaagtgctgtgattaaaggcgtgtgccaccactgcccgtctattttttattggtcttcaattgcacactgagttttgtgttgcctagtggtgatggcccagagcttccacctcagccagggaggcttggattacatagaaaaccaacccagggcaagccaactgcatttttggttaaatgaagcgaatgaaccaataatctttattttttatttatttatttatttttttcgagacagggtttctctgtgtagccctggctgtcctggaactcactctgtagaccagaaatccacctgtctctgcctcccaagtgctgggattaaaccaccacgcctggccattaatctttattcttaagtagccccctacccacctgcctgcctggtgtgtgtgtgtgtgtgtgtgtgtgagagtgtgacagagagagagagagagagagagtcagtcctgatgtgtgtagctcaggttggcttttcaactcttaatcttcctgggtgtgggcagggatttcaatggcagtgtagaggtatctttcctcctctaggcttaaggagctcagagttattccctggcatttgcagggacaagcttggagaagttgaatgttacagagaaaactgtctgtctctaaaaactgttaatctgttcattagttatttcacctggttggaggtttcaaaacagtgaaggtattgaaatccttaagtaagacttgaaaatagttgctttagcatccccaggaggcttgcggctgggctgggataggaaggaggtattgatacaatttaacgtgagcacactgctttgaggtcgggcgggtggttagggagtcaggagaggtagcacttagctctcaagacgctgtgtttgggcaggtctaggtctgggtcgggcggttgcttgtaatctgaatgcctggacttgcccagtaagttttgctgagagaaacaaaagttctgagcctggaacaggaaaaaccaagtgttagatgggaaattctttaggttgccttcctcctaccctggtttaaagaactacatgtagcttgctgtattcctggaagtgggtgtctccccccagcacacctgaatttctcatttttttcctttagtagtttaaaagtgtaatttctgcatattggagctgtgctggagggaagcttgcctctgtagaggaggagcacagggaaggaacagtgtttgatagctctctgcttgacacagcagcttcttcctctgaaggaacccagtgtctgagagctttgtgtaaatacttgctgagttgtcaatatgtacccaggaggtttctgttccaagatgtaaacggctctatagagtgtttgacaggcaaattaatacacatttttcaggcaaagataatgctaggcacctcacaaggtagaggaagggatagagaagaaggtagcatgcagcatgtgtgcagggtgtgaaggacccagaggttagcagagggtctgaaagagctacaaggcaagccctgatgagttgaagacaggaaactttgttaaaattcagttgcagttacatagagaagcctagagaagcttgggaagagggccttgagcttcagcagtgaaggaagctaagtgtgcgcagaagcttggcttggaatactttgagttaaagccttgttctttggagaaggatttgtagtttggcatgaggtcttggattggatttacatttctggaataccagaaagatactgaaggttcactgttggctttcctctcttgttcagctgtgtattataaacctcctcgctcaaaggcaggcgtgtttatgtaggtttattttatttatttattttttgttttgttttttcgagacagggtttctctatgtagccctggctgtcctggaactcactttgtagaccagattggccttgaactcagaaatcctcctgcctctgcctcccgagtgctgatgttaaaggcatgcgccaccacgccgggctgtttatacagtttttgtaggactgctctgtaatacacatgctaaaggtcttctcatctccccagttctgggttagtcatctgacctgggtaaagtttagacatttccattttatattaatatttctcgattcgatccttcagtgataactttcttttttctttctttctttaaagatctagtatactatagctgtcttcagatgcactagcagagggcgtcagatctcattacagatggttgtgagccaccatgtggttgctgggatttgaactcaggaccttgagtcagtgctcttactcgctgagctatctcaccagccggnnnnnnnnnnnnnnnnnnnnnnnnnnnnnnnnnnnnnnnnnnnnnnnnnnnnnnnnnnnnnnnnnnnnnnnnnnnnnnnnnnnnnnnnnnnnnnnnnnnnnnnnnnnnnnnnnnnnnnnnnnnnnnnnnnnnnnnnnnnnnnnnnnnnnnnnnnnnnnnnnnnnnnnnnngtaaaataaccagaataatcttgtcactgtcttttttgtttgttttttcaagacagggtttctctgtatagccctggctgtcctggagctcactttgtagagcaggctggcctctgcctcccgagtgctgggattaaaggcgtgcgccaccacacccggctgtcactgtcttttaagggacactgtcactgtcttttccagggagctggctgtggtgccccacatctataattccagatttggaaggcagaggcaggtggatctctgcctttaaggccagccagggctacacagtgaggccctcttttactactaccaccactcacgcccctgcccccaaaataaggaactaaatccactgactgtcagctacaacacaaaaaggcgtttctgttggtttttagtttagttttgttttaaaggcagtgttctgtgagagactatttgatttagtttatataatggcaggaactatgaatgtaattatgtccgtgacagtcatttttaggttcagctctgttaaagaggctatcagcttttaaagcaaaagtaagaaaaaagagacttgggatgccattgactttgattgcccaggattgttaaggtctttcccattacaaagggtaaagttattagatcttcaggcttgttgctgtgagcatcatttccagattataagatctggagattccagtgggggtgaggactgactaggtactagaaaaggatttagatttaaaaggtagtagacaaactgggaggcagaggcaggtggatttctgagttcaaggccagcctggtctacaaagtgagttccaggacagccagggctacacagagaaaccctgtctcgaaaaaccaaaaagggaaaaaaaggcagaagccaggtgtgaaggtaaggtgtatacgcccgtaatctcagaagttgggggttgggatttggaaggcttgagacaagagaaccacttcaagttcaagccagcctgctgtggcacatagaaatctgtttcaaccccactcactccctagaaaaaagatcgagctgtaaagggattgatttctcttaaactgtgtgcacagatccagaaaacttggccaagtggtttgctgtggatgtatacccaggtcaggactgtagtaggttagagccagggggtggcacacaactagcacttgggaggcagaggcaggtggatctgtgtgccttcaagagactagcttggtttgtttacagagctagttctaggatggccaaggctgccagaaactttttcttgagaaaagtatccaggctgaagggagtcaggagttgaggggtagtcagaactgagcaggcttagagagggagcgcagtttagatgggtagcatttatcaagctaaataatttaaaagaagttaaaatattaacttgccctttatccatgatgattgctaatttcatgcctttgttgagtccaagctgtatagttcttttggacgtctcatttactttagtatactaaccataacactcctgaaaagagatggctgcatgggcttggtgggttttctggctgtgttggaatctgctaagttctagaccagtttgtggataatagtaatttctgcatttggaaggtcttgtcaccttcagagtttgtatattctggatagccctgcaattgtggtagttcagctttggttggtaagtctggacaatgttcttagagttggctgagttttctttgcaagttattagtgagagagtgaatgtcacctgtgttcaggtgcccgagaggaagcatgagtccttggagttagagttataggtgcttgtaagccatcaagtgtgtgtgctgggaacggaactcagaacaggaagccttctaaagccctgagccagttctgtaatactggtccactgacagtagtgctaggacacagtgcttgcttgcaccattcttctgtttctgaagggctgcagttgtgctcagctgagttgctgtagatgttccttggggtgaataagactgcatatgtgcagtttgcaggagttcctttagagaaatggctttaatactgtttattagagctacaaacactcttgctccttatggagcctctgaaatgcaatggttgtgatttttctcacctactggtctttgtgtttgagcctggcacttgtgaaggaccatcaatacccaagtgtgaattgtgtggccaatgtcaagccacttacaacagaaaaatgcttcttcctggaagtggataggttataccaccaatatggaagtgtggattctcctttaaatcgtataattgccatgaagtgtagagatgagaggatagcatacctggtggagttgacccacttctttgcacctaccttctgcagggttaggaggtgttgaatgcaggtcaggcttgttagtaacaaacagttttacccactaagccatcttgtcatccttgccagtatggaaccttgatacagattctaatttagaaatctctttcttggagcagtggtggtgcacgattttaatcctagtacttgggaggtagggggaggtgaatttcaggtcagcttggttttcagacttccaggacatccagggctacacagagaaaccctgtctccaaaaccaactaaccaaagaaatcttccaactcctatctctttaaattttcttgccttgggggttttgcattttgggaaagtgaacgtaccatagtgcatttgtcctgggtagtatgagtgcaggacctgaagatgaactccttaatcccacatcgtacctgatctttagatctttatggatctgagtgtgtgcatgtgcatccatatgcatctatgagcccactgagttcagaggagggcattggatctcctggcactgcagttctgggtagttgtgagctgctatgtaggttttgggaactcagcttagcctccttgctttctgtaagagcagaaagcactcatcactgagccctaggcccacactttagaggaatcaagtcagggtaaacattaacttaataactttattccgtgaatttgtccatcacccattgagatggaggaaagggtgctttgtttttatatggcatgtgaagaaagaggtgtctgagggaggttttgtaggatactcgtacctatcaggagagtgtctttgggggcaggttgagtgtttcccagtggcttctgcatgttgtaagaatggactggagggggaagaagcctggtgccaagaatgcactccagccagctgcagagggaattccatccccaaatgttgacttgagtgttggttatggtgcatattagagatcacccagtaatccaggacagatttttgtcatcctccaggaagttatgttgatagtaaatactaatgggctttggttctggacttgtatgtactctgcagagagcattgctggaatcatctcccccatgtagaggagatgggccatgtgctgcccccactgccttcctgcatttgggtggccttatggctttgatgcttctatattcccaagtctgcagtgttagatattagttttctttttcccttggcattggccgattcatgattttctgtggctcgtcaccagcagccaagatttttaaatgctttttactcttaaacttgttagttttcaccttgcttgtttaatctctgttggaaggatccccttgcccacccccaagatacatcaccagtatgatggcgggatggggtggcagtgtgaagggttggtgtgatagtcatttaaatggttatttttaaaaaaccatttgctgggtgccttgttttgttttgcctcctgtttttctttccttgcttacagcctgcttactgcgcctgcctgttacctttcaactgactgaagactggtgtactttgactttaaaaacagaatgaatttggctatgtggtagaggactagtgactgtgttgttttagtccagagccttgaaactccttatcatccagttcagataacttgtgtttttggtttccaagttcaacctgtttaggaatctaggctgtcaaaactaaacacccccccgcccccaacacaacaaaacaaaacaaaaaaaccagaacaaacctatttcataatggacttagggaacaatttctccaaaacattattcagggacaggcatctttactgagaccttgaccttgaagtagcatcctagtgaaggtgtatatttgtgacagctccccacctgcactgtggcactggtttgtgccgagcaagcattatgtttgaatcttgtatgaatttcctcaatttactcttcaaaatacggagagaggagtattccgttcttcctcttggcttccagtcatgaatgtagaattataaaacatcctttagggtagttgttagtttaaggtcaagttgggagtgaataaagttttgttagagctataggtattttattcatgtaaggtctaaggaattaaatctaggctttcttgatgccaggcaagaactctttttttttttttttgttttgtttttgtttttttcaagacagggttactctggtgtagcccggctatcttggaactcactctgtagaccaggctggnnnnnnnnnnnnnnnnnnnnnnnnnnnnnnnnnnnnnnnnnnnnnnnnnnnnnnnnnnnnnnnnnnnnnnnnnnnnnnnnnnnnnnnnnnnnnnnnnnnncgcctttaatcccagcacttgggaggcagaagcaggcggatttctgagttcgaggccagcctggtctacaaagtgagttccaggacagccagggctgcacagagaaaccctgtctcggaaaacaaagagccaggatgacctagtacattatttctgtaattgcctagaactttaaagacaagatgttgctttacttacttgtatatgattgcgttgggtctgccacgtgtatgggtacctgtagaggccaaaagagggtttgggattccctggacctggagttacaggcatttgtgagctgcctgatgtggggcttgggaaccaaccatcagggaatgctcttaactgctaagcagtgtctctccagccctgctgtgaactcttaggtgaaaagggctgggtagctcttggttactgcgacacccatgcttagagagggccctgtacatttcttccatttaaggttttattattctgagtttctcataaagagtgatgacacttggttcattgctgtcttgtaattcctgcgaagagacctgacggaatctggtcctttgagccccgttaaccaagagagacctttgagagctaggggtctaggctctcactaagacagaattactcttatccgagggacttgcattatgagagtatttacagaataattagttttcagaaactgagtccaattggagagcaaggcgttactgtattaatttgctgcctgggtaaagtgagcatagaaggttaagtgtcagagtttcacaggagagtcagatctaaaatagctttacatttcctttaggccatgtgacctaagatcaactctttctcttatcctgtattctaaactacatgatgaaaaaaataaaacctgttttaaaggttgtaatacatactaaagataaatgaaaataccaataggttatggacattctttttaaaaagttgtctttttattatgtgtgtttgggtgtggaagtgtgatgttgcacatggaggtcagagaccagccttgtggtcctgctcctcctttctacctggacttgagggttagaacttgtcaggcctgcatggccaacacttccctcactgaacttctcgctggctgcccttgaattttcagtggcccccgcatcagcttcctgagggccatgtcaacaagtctgccagaaaaacccaaattttggcctagtttgagagactacctgggtggccttgtttagaacttggtggtcttctgtacttcagactgtcctgagggacactcagatttgagaagtactgaaccgtacatttacactcaacagggctgcagggcatatctaaactgcctgaggtgcttctaattttactgtagatggatgtttcagatacatctgtcttctgtgatgaaagtgttactggatagagaaaaggctgtaagagtacttgaagttgttggtttctaggtgacatctgttgcttctggttttagcatcttctcactagggccttaaatgccattaaatagtgctaatcctggtatgggggcctactgttgttatccagtctaaacccaatactgcctaggaccccacttcctaaaaccattcccttaggggctaggccttcagcgtgggcatttcagggatttccaaacatttcacctatgtgcacaatggatgggttgtctactgtgcagtgaggacatgctctaaggatcatctgctgtgcagtgagggtaggttcttgtggggtgtctcctacactctgttatttaagagtggcctcttggtgtttttccttctcgtaggtgtgcagtgaggtgacacaatagtggtctgtatctgtggtcctgggagttggagggaggtaaaaaagactttctggatatgtctgagagtctccaaatatgatcagtgcacacctcgtcctagtccttgggaggtggaggcactaggattaagagttcaaattcagcctcagctgcatggactgtctcagaaaaagataccagtttcgtcgcgctaaatgccatgtttcttctgcttgtaacctgatctcagattctgccacctgatctgagaaacaggaatgtgatcatctctcaacctctccctctttatactcaaactcttcagtgaccagcctaagttttttccctgtgttccttttgaagttacagcaaagtagacccctggcaggttgtcccctcaccgaagtcatgggtcctggctgcaagaatgtgcgcttgaggcaagacctgtgtccattgtgtgagtgcttggcagtgtaatgagagttgcagaaatggtcaggtataccctgtggggaacagtgtgctttctgtcttttccaatcagacccctattttctgctgcctgagaaatggatcattaaaacccaactggggcaggtcagtggtttccaggaggccgacacgttgacctccaatggacatttcggggtatctggagggatacttttttaagagggagttctggttttgcctatatgtttcaaactcattttatcatcttcctgcttttggctttatatctttacccccccccccttcattccttcattcttattagactataaaacacatgggtaccccagtcagtttaccatactggagtcagtgcaaggctcaatgatgttgcacttccagtacaacattcagcaaaagacttgtagtattttacctggtgtcttttaactcggttgtaacgacctggctagtcaggcaggaggtactcttctctaactaataaacagacgttcctagatggtctagctcacgcaccaccttagccttcatccctctttggggttcagttggtgcaggacagttctgtgacactcctgtttttctttccactttgtgattccagtccatcttggaactgactgacttctctaaaactcccttcagaaagcctcaggtgactggtggtggtttcatgatggcatttaaaataaaagttgattgaagtagttggcctcatctcccagatacaaacactaaagggacattttttgtgccttgaaataagataatctctgaagagtgtgtgagccaaggcacacaggcaaggcagaggagagatggaagagggttagatactgtcttgattttcatggttgtttagtatgccaagtatccatttcagcatgaccaactggccagagagctaaggagaaggagacaggcagtgcgcctctaaaacaacagctgggaacttagtctcgtgtctttctggtagaaatcctctcttctcttctcttctcttctcttctcttctcttctcttctcttctcttctcttctctcttctctcttctctcttctctcttctctcttcttttctccctgttttctccctctctcctctctcctctctcctctctcctctctcctctctcctctctcctctctcctctctcttctcttctctctcctctctcttctcttcgacatagtgtttttctgtgtggccctggctgtcctggaacttgctttgtagactaggctggcctcgaattcaaagatctgcctgcctctgcctcttaagagttgggattaaattgaacatcttgaagcagagccctatgaacatgttgctttggacagtgcctaaaggagttttttgtttttgtttttacagtatacagctttgaatggaggtaaggaatttgctaggctatatgatataccagtctgcaaattgctgaccttaaatcctaggatttggacacatctggaataaggctgacttacaaagattgaactattctttaaccaaactctttttttgtttgtttgtttgtttgtttgtttgtttttcaagacaggatttctctgtgcagccctggctgtcttggaactcactttgtttgaccaggctggcctcgaactcagagatcggcctgcctctgcctcccaagtgctgggattaaaggcgtgtgccaccacgcccggcttaaccaaactcttaattgtgcattttgtattgtcagtagatgtgggtgagtcctttgaagaattggtattttagggtagcaacccaaggtacttttaggaatcagtgaggtcagcacagagtggcattgctgctactctgctctcagagtatggtacacttgatttatttatgagtctgtatatgaattaagttcctctctgggagatgctgcagataagataccctttttatcacaggaggaaaactttgacaagagagaaaactgtacacttagatttggtatctttaattttgttacatttatttatttacttatttgtatgtatatcccttccatgcctctttttaaaagagaaaggggtagggttttttgttttgtttgttttgtttttgcctttacttgtttagtttgttttgaatgctgtgtacaaaccagatactgaaactgaaggaacattttaaatctcatctgaataactggataatgttttgtgctctcccaggtgaacctgtatgcaggttccatgaccttcctctgttccttttgtgccatatcacacaatgagagataggatgcataagaacataagatacaaagcttgcggggttcatccacaccagcgtcttttccctagcagaagcacccaagaatggctgcaggagggagaacctttcctctgacatcacgccctctcacctgtgcaagtgccttgtttggtactgagtcatgtcactttaggagtaacaaaggctgtgctttaagcatatgtaattggggttttgtcagcataacaactcacaggatctccatgtgccagtctgctttcattagtcagcaggtatttagctgtggacacagcaaacatattctctgcctcttggatactttgtagtgaggaagacattgcagagtgaagaatagcaggcaatagtatgactgcactcactgcacatgcacatgaggtcagaataatttttggtagattatcttccaacagtgtgtgtgtgtgtgtgtgtgtgtgtgtgtttgggattggatcttacactataagccaggctagcctggaactcagtaagtagtctagtagtcctcatgccttacccgtgagccaccaggcaggcctgactccagctattacttaaagtaaaatgctgtgctctccctggctagcaggtgtctctgtgctgtttaactcttagagttaatatgggtcagttctgacttccttgccttagttgctccaaggattgagttctggtaagttagagctgtggtgggtgaggaccaactctctctgtggagctgcactgtagggcatttggcactttgctccctagacaacaaatgtcagtggttaaagagtctgtgaccgccccccccccaaaaaaagaagcttttcatacttttaattgcagatacctagatacctggagtgggtcatgtggaaggtactgtctgtgttgtcagaatccttccttggaaggagctattgggcaaattcctcggggaaaacagactgaaaataggtgctttggacacagcatctgatttgtgtgttggtgtttttaaaagttatttcaaagctgtattttgccttcttgcttttgagggtcagaggttgtggctattatacatacggcactcttaaggattatttcatcttgtgtacttaacatttgagctgtcagatatctttgttaaacatgaaaatttaaaatttttacttagttgtgggggacagagtgtatggcatgcgtggagatcagaggacaacagaaattggttccttcccatcatttggctcctgagtgtggaactcatgtcaccagtcaccaggtttggtggcgagtatcttacttatcctatagccaatagtgtctgtccaaagtttgttgtttgaggtagtgtcaggctgtgttgttgcccaggctagccttgactttccagtctcctgcctcagtcttctgggtagctagaatcacaagggatggactatccacacagctaaacaaaaggattaatccctgttgtatgaatggacgctcgctagcacttgccgaagtgctacaccctatcctttgtttttgttttcttaattacaaccttaatttgatcactagttagcctctcgttgatcatgtgaaacttctgttctttggggtaaatgttaattgctctggtttttaatgctttgtttgctgctggaaatttgggactcaaacaggaagatggctaaggatgttagatgataggcccagcattaaatcacccaacccatagcttcctcctgcacttaactgtctaggctgtcgaggcacgcgttaagcaggtgtaagcatctacggctttgtgtgataacggtatgacggaactaaaaaatgaagagactgtttgtacaaaggttcagggtctgtgttttaaatggttcacagaaaaggacacactgaagcttgtctgctcaggagctgcatttgtttgtgtatgttgagatgggggtcttgtgtgcgccactctggcctcagctctgttgctgaggacgactggaacttcagagcctctccctgttttcaccagagtcgtgggatttcaggcatggtcacctgtctcccatctgttcctctgttccctgtcactttgcaccttcttagaaagtgaaccaacccagtgtttttgtttagccttggagagttcacataaaaggtccctgtctagaagaaatgagtgttccagcatcaaggaataatcttcaagactggagcatgtctagttggattgaggcccacttttcactggttctcttgctctgacccctgggatgctactgcagcgctgtggtagtcttccttcttatctatggttctgctttctgaggttttaggtaccaacactctactcctatctgaaaagtctatggaaaactccatgtctttgggagacacaggagctgggggtctgaacttagtctttctgcttgtgcacttataatttgttgttgcaaatgatttattactgttaacctcttggtacatgttatatataaattaaatttcttcagccatgtatgtattgaaaagtgtgtgtgagagtgagtgagtgaacatgtatattatgtgcagttttagatagggagggactgttatatgattattttattctctatctcagttatttcaggctggctcatatagctaagaaatacatgagttttttgctttgttttgtttttgtttgtttcttgcttgttttccctgtactgggaatcaagtccaggtcttcatactagacaaacaccgagagccatgagtcttagctcacgctgcgcatgcgtgcattcctgctctccgtcctaggttttgagatagtattcttccctgaacctggagcttgctatttctgctaccccagcatcgaggttatagacacccattctgtgcttggcatctacacaggagctgggggtctgaacttagtctttctgcttgtgcagcaagtactctaaccactgggcaagctccttaatcctttccgtgtgtctgtgtgtctgtcttgtctttctatctatcttccttccattctttttagatagtttctcaccttgtttctcaaagctgtcatcaaactgcaattctcctttggtcttttgagtagtggaatgattattgtgaatgaaatacaacatacctggctattctttctctcccccttcccccatgtggatgtatgttttgagatagactttgactatgtagacctggctggcctctgattcagtggaaatctccaattgatctgcctgtttctccctctgtgctcagttacctttctattttgatgaagaaactgagggatatagagttagaaataccatgggcaaagctctcagtccttttgctcagcaaggccgtacatgttttctgtttctttgtaacagaatcctggctgtcctcagactcagcaagatcatccacctttgcctcccaagggctgggtttaaaggtgtgcccgaccttcactggcctctggggcctttttagtctctcagtccggtattttgcaatctgaagaccttctccttaaaatatgagatcttgcatacagttctagcttcctagagtttatgaagttaagggtgcacacagtacgtggacgcctgaccctgtctcctcaccaccgactcagaccccggatggtaggattgggacccataacctgagtgagttaaagttgattcacttttttttctttgtaatttttttattagatattttcttcatttacatttcaaatgctatcccccaaatcccctatggcctccccctgattcaatcttctgtctgtccttccttcccatggagctgctgtaagaaactgggatcgcagcttctgcctcagcgtgctctccccgacctgctgtggctgtcttatcctggagaattgtaaaccagatctatcagatagataacctttcagtttttacttgttctcttggggccttaccctgtttttatggccctgtgttccttttttagatctgtgggccgttgttgctgctgttgttgagataggttttctctattatgtagctctggctgtcctagaatttactttgtagatcagactggccttgaacgatgaaagatcagcctgcctctgctagggttaaatacattgactacagcacacagcaagaggaatatttttttgaaaaagttgcttgtttgccttagagactatagttggaagtacggaaactggaaagtctgtcacaaggcagtcttcctctgtaaagggtggctgctgaaagtgccctggacagacagacagttttctcatttgttgggaagttcattagttttcctagctgctttatatgaagcactctttctggtgccagtgaagaagtgaagaaataacaggcgcctggttgtggcttttctggcatgattgtttgggtgggtagccgtgaggggttattaaaattggctctcatctgtaagtttcattaggtggtttagtgactttttctttagtcttcttttctcaacactaacaagctttctatggccctttggtctggataggactccatagttaactctttctgatgttgagttagaatctagctctgggagggtgtctgggtgcctaatccaggccatcctttgaattttctgtgtcctgagtgctgggactatagctatgcatggggcatgcccagcttgttcagtatcattatgaggtagtgtggatttggaaggactggaaggatctcagttctggtggctgcctttatctgataaattggaagtgtgctcttattctccttttaaacgtagggaaatttgaaagaatttaatacaacaaaacgtactttgggggatggtggttgcaaattagcagccacataggcagatgaccagaatttgaatgaagtgtttttatcttctgtaaagaagtaaattggcacgtggtctccagattatatataacgcggctcccaggacgtgtgggtttgactctggataaaatgttagcgtacttccatttctccatggatgagatggctttgatgaggctcaataggagggtagggtagggggggtaggttattgtcctggcatgtagtcatgtttcccctgtttaaaagtacaacacagggctggtatggtataactgcctgtagtctcagcactactgatgatcatttgagccaaagagttagaaaccagcctggacaagatagcaaaacactatcaaatgaacaaaacaacaccccatcctatagtcccttattcagggtctcaggacagagctgatgtcagctgatttcatagtacttcctcttggattggttcagatcataccagtcctcagccccatggtgaatgggaggaagtggaggtaggcagagatggcctgtagctatagagaaaagggacagtggaatgatttatgctgctcaatttatgtactagggagcaaggctgctcttgcagaagtccctttagtcctaagatctaagtgatttctgtggagctggcagggaaagtaaaaagcctgttggttgggagaggccttaacttttgtacttatctctgcctggagtgcccttaacagaggagggtcccctccgggaactgatcaacagctgctgccagtccctagaatcacaggaagtggaggcctggtgcctttgtatagaagctctgcagccagacaatagtttgtgctggcggggccatgtggcgagtcacgtgacccgaggctgtattctgctggggtccttacccatctgttctctcggctctttctgggttatcaggcgccagtccaagtcttcccaggcagccagcttcatggccagagattacgagcactaaccttcctggcagggtcggtgtggcttcgagtttatgcagattagccatgtgtttctcacttcaaggcggtccacaggaaaagccttttcctgtgtttggctctcagtgggcggttcccagcttactgtactgggactcaagctgcaggcacgcacgagagggatcacagtacactgcccccccctccacctccaatgctacgtcaccacaacacaaccactcacgctctcatactgttggtgtcattcattccgtgccaagattgctttaaaaaattcccttggccccagttcaaacaggagtacagctgggatgtgttagattttaggcagtctgccctcaatttgagatgagttataaatagcagtgccgacttccttaactaccgctctctgaggtaaaatgcaggttaattactgtgggaatcaattaggggcttctttcggttaaagagccagggatgcatttttattgttattattaaaactcataaacaaatctggccaggaataaattgaaagcacgagaagtacaaaataatatttggaggcccaaaatccaagggtatggctctaggtttatcctggcaccgactagttggcatctagagcggaaaacacaagtgtgtgctggtcaggacttctcctttccaaagatggaggctcttggcagtccctggcccaacctttcattttgttctttcgagtctttggcacagctaggcataaaagttggcccttacctccgcttctggtcacctcttctctgtatctttggcttctgactgtccattctctcgcagacttatttcaggatcagagtttgtttttcctggtgccactaccacatggtgtggggagtaatatctcttggtactcagaagttttagtgcgtgcctggttttgtctcctctttcagtggcttatggtcagatagagaatttgcaactatgtttaatattttgagtgtcccaaaagtggttacttttgactatctgacacctagccttgatgaaccttaaagctcaacttgttactttcagcagttcacaaggccactgtggccttttcctgtacattaagaacttgtgagtgattccagagccaggtggtccggaggtgccatttgctggaagcagggaactctgcaagttgttagtgtgcaagctgtttgcactgaatatactcggaaggataggcctgcacccgcacctttgatgccccaaaccacattcatttcatttgtcaggcactttatagcttggccagtgatctgcaaggagctaagtggtggactacccccccacccttatttttatttttttatgaatgcaggagagtatatagcagggggcctggcttgcctgatgaagggccagcattttcctctcaattacgtgtctgtgaggcagagcctttgcctttgaagcgtaatcacagtaatctgctcccgcggtttcctgttgaaagggtttcctctccatctttcccagagtggcatctctggctcttttgcagctacgatttggtgtttctcctcctttgtggctgctgactactgatgctggccgtttctattttacaggaggtagacatttttctgtttcaattgatgaatgaagatttgatgttctctactttaagagattgggagtggtgcctccccccccaactgcaaaccacatatctttcacagtatttttaaatctcataagtaagttagattctcttttaacatgaaaccagagtggtctgtttgttggaactgaacatatttttgtttggtgaatagactgcaatagtccattgatcgtgataaacctttggtgaggggaatgagtttgataaccaaaaaatgtcagtttcattttgagaagctattgtttgactgtcctttaaaggatcctactgtgaggccagagtagtcttaagactccaggtgcaggggagttttgtcttatcctgcttgccttggtaagtgttggagttttggccatgtgtttgggtttggggctgggtgtgcgttattataacccttgctgatacaggttgggttatttcgatgccattgttcttcaggactattttagcttcccctcttctaattcagtcgtcctacttgatactggggttgaggatatctgctgccttgcttgcctgttcctgtcagtaggaactgctgtagttgaacagttgtccatccttgtatttggggcatttaggaggactttgaaaaaagcctgaactcttatgtcctggaatgcagccaataactccacctattctggagtgttgggaccaggaatttaagctcaatttgggcaacatagtgagactccatgccatttcaaaacaaagtaaaactaccttggacagcagaaacaggaagctgtatacatagcttggaatatttaatatttattggaaagacatttaaatacaagcactgtgggaagcttattttttgttgttgttgttgtcgtctcattctgtagcccaggctgacagatttttgtaatcttggtttgtgtggaactcatggtgatcctcctgcttcagcttcccaagtgctgagagtataggaatgagtcaccacacctgcctatgggaagctgtgcgttatgtacattttaggtgatgagctaaagtgttccaggccaggcagtgagttaggatttaaattccaagtctatcaaatcactatacactttattctttctatatgttagtgttgtatagaatttaataggtttggagccatatgtagcaggaagtgataaattatttggaaacattgctctcaaattacattgtagcatgatagacactagccatatgtgattatgtggatttaaattaattaaaagtggactaggaatacagattagttgttagagtacttgtctaacatacattttgccctggatttgatcccacccactacagaacctagatctggtggcacgtaccttattcccggcacgtgggtggctggatggaggcaggaacatcagcagttcaaaaggattttgttgtgtagcttgtttgaagccatcctaggcttcttgagaccccgacttaaagtaaatagtcaataaataataaattaactagtgtaaataaaatgccaagcttagtagcataggcctgtaattttactaatttcaaagcttaggcaggaacatcagcatttatgtctagaggctgaagggatgtctcagctattaaagcgcacttgtatttacagagtactggaggttgattcctagcacccacagtggctcacaactgtccatagctccagttaaaggggatccagcaacttttcctgagttctttgggtaccaggcatgcacattgtacacaggcaaaatactcagacacataaaagtatacacatctttaatcccaacactttggaagttaaagcagggagattgtcaaattgaggttagcctggcccacatggagcaaaatctaaggggaaagggcaaataattgggcttcttccttacattttgcatagtttaagcatgtaatagtaacacatcacagtcaccttcttttttatttttaaattaatcagttaacttgagaagggttcctatttgtactttggctgttctggaactcactctgtagaccaggctgacctcgaactcagaaatccgcctgactctgactcccaagtgctgggattaaaggtgtgcacaaccacatccggctgaataatccctctcctggatcacactgattgccagctaatcatacacatcagagatcattcatagatctagaagtgggaggggctcaagcccttccacaccaacaaagttggaacccggaggcctgggcatttatgaagcttcatggaaattccgggtgtgcagtccttgttaaaacagccactgctatagaagttccatagtgacaccatcaccatggtaatgactaaaactgggtagacctagatcagactgacagatagcctgagcatgctgatctctgttcagaagatcctgttgtcttcacttgagggcctcaaacagccccagtagcctgggtgaagtgagctgtgatgtgtgggatccaaagacacactcatacttcccctgggcatagctccattgccagcagtattgtgtccatagtctgagagaactcggtttctgcttcattttgtttctctcaaggtaaacaaaagaaaagtctacatagttatggctgtttcaagacttgctaaatgtagatggagttgacccagcctcttaagtagctggggttacaggtgtgcaccaccacctctgtccactgcctggcttgtcctttgtggtcggagattcctttacagtagctttacttactccagtgtgatgacatgctcatgactgggtggggactgtgtaaatgcaccctgtcttggagcatgtctccaaacactcacatcatttagctttctgtccctccacaaagtgtgacctgaaccttgggtctcttatttgctagggtaggtaagtgttctactactgggctatgtttcccagacctgcagtgtttttttggtttctctgtgtaacagccatggctgtcctggaactatagaccaggctggccttgaactcacagtggttcttaaagtgtggaccctggaccttttatgtagtcaccagtaggaaacttgttacaaatatgcctggcctgggtcctgcttagaaattactgaaccacagatgggtgccagtggggtgtggtttgacaaactcttgaggtgattttgatgtgtgctactgattactgaactccgtcagttaatgctgtttatacctttaatacctattctctatcccctattccaaattcaagatcctgcttaaagttttaggccttgtgcctatcctatctccatgtagttcagagctatctagaagcattctcccttttcatattctcactgtatacagataagtgtctctggcagaggaaggtatgctgggactatcctgtagctccatcaggttggagctatataggtcagaaagtgcatgagctgattgaatctgtcatatcacaaaggactggaaagtcacatggattttaagcatttctttggagtcaggcctgaaactccttacatagctgatatcacctcaagtgcacagcagccctcggtcttcttctaagattgtgtgtatggccaccacacccaggcagaaagctgcgttgtaggccgatgcctgtgctgtgaactcctgagcttatgatgttgttggttttgtacttagtgctttttggctttttgagccaaggtcgtcccacttaacccagactggtctcaaactcattttttagtttaaaataaccttgatcctaagtgctatgcttggaggcgcccaccaccccctccccagccttcatcttgtttatttgtttatttaaagatttctttttatttgtgtttctttttggtttttttcaagacagggtttctctgtatagccctggctgttctggaactctgtagacctcgaactcagaaatccacctgcctctgcctctgaagtgctgggattaaaggcgtgtgccaccacaccctgccttttgtttgtgtttctgtgtgtgtgtgtgtgtgtgtgtgtgtgtgtgtgtgtgtgtgtgtgtgtgtacacatgggtttgctcatgctcgtgcctgctgagaccagaagaggtcattgggtccctggagctagagtttcaggtagttgtgagcagtccagtgttggggaccagactcctgaagagcagggaatgtctttacctgctgagcagttctccagctctgtatcttgttctttgaagagacaaagttctgtccttttattttcaaattcacgtttgtttgtttgtgagcagggcttctctggatagccttgcaggccttattacactcatctgcttgcttgtacctcctgagtgctgggattaaaggcatgtgccaccactacctggctgaagtctcaattttaaatgaaatggatttatttgtttatttatatatatttatttttgggttttttggtttttttcgagacagggttcttctccctggctgtcctggaaatcactctgtagaccaggctgccctcgaactcagaaatctgccttcctctgcctcccaagtactgggattaaaggtgtgcaccaccactgcctggctaaatgaaatggatttttcacttcaaatatacaaggctccaaattcactactgttctttcagcaactatttattacatagcctgttgctcatttgaagaaagtgtaaatcgaactactttgtgctaaaacactatggatgtgcaaaggaaaagtttccattagtggactgtggaaccagggccccccgccccactcctctttagttttcaagggtgcctgtgtacatcagtttttgaagcattgaaataatcagttttgatgttggtcaaggttatagcaatgtatggtaggtaaccctgtccagtcccactaaagaaaaggctctttgttctgattcctgtgctcgccatgcatatgttaattgttttatacctggcctttcccttgaataatctctagtagtaccttccttagaaagtaatgttcagcttccaaatgctttcatatgtcactatcattttatttatgaaactcttttactgtagggctatgggatctgtcccattacttttttttttttttttttaaacaataactggtttctttggtggcatgtggacttaaatgatttctgtatgtttgtgttggcaagagaccattgaagcctgaggttaatgtaaatgttctttattttatagtcatccagtccaatggatcagatgggaaagatgagacctcagccgtatggtgggactaacccatactcgcaacaacagggacctccttcaggaccgcaacaaggacatgggtacccagggcagccatatgggtcccagactccacagcggtaccccatgaccatgcagggccgggctcagagtgccatgggcagcctctcttatgcacagcaggtaggtgatggattaccttgagcttttttgctgtccacaattggtgtttgaggtataaggtcagaatggcttcttgatgcccatggatttgctggcttaactgcgtccgcaccattgtatgtatgttccatgtctgtttcaacatatcttggggtttaacccaatctatctcagcccctgtcttcccttgatcttgctggtctgcccttgggagatgaagtggtacgaaggccaatctgtgctgcctgccttgtggtgaggccgctcttcttctttctcacagacttttaagataagctgcctgggtcaaagagaatgtttaaggacttggagagaaagaggacaggcctgtgtgagcagtgcagtgaagcctcagaggggcctcctccagcgcagccatctgaccagctatcctgggctttttttaaaatttggcttgtttttcagtgcagagaatcaaacccaaggcttcaagcatactagataggactctgcctctgagctccatccacatccctgcatagtcaccttttaaaaaattacagtattatttacttggaggtgaaggcaggatgccaggtctcatagcaaaggacattgttgtttttttgtgttggcagattttctgccatttatgtctgagtaacacaccagaaaagtaaaggacagtatagcgagtctgagatgatttctaaagacaaactgtagagcaaaggacatcgttacacacacctactagatgaaacacacctacttttatcttcccctctctccctccctctctttcttcttctcttctctccatctcccccccccccccatctcttccttccgcaaggtttctttgtatagcctggctgtcctgggactcattgtatagaccaggctcacctcaaaatcagagatctacctcctctgcctcctgagtgctaggactaaaggtgtgtgtcactaccgctcagctatcttccttctatgagagaactgagaggtgacatggagttcttttcttggtttgcttgtttgcttgtttgttttttgtttgtatttatttattggttgattgattgaggaagaatcttacttacattccagggtggttctaactctaatatatcccaaaaggaccatgagcttcctgatcttcctgtgtctaggctacaagtagtggaatagaatcagaggcaagtttcatcctgcctggtggatgtggttttgaggacttcatgaatactaggcaaatacactgagctatatagcccctaaataatttttaaaaagaattatttatttaatatatatgaatatgctgtagctgtcttcagacataccagaaaagggtatcagatcctattacagatggctgtgagccaccatgtggttgctagggaattgaactcaggacctctggaagagcacttggtgctcttgactgttgagccatctctctatcccacccctgaataattttaaaataaaaattaaatgaaagagtaccagggtagcttagtgatttgtatactatccacactactaaacactgagtcttcagttgtttgaaccaagctcctagtgcctctttatggtggttaggaaaaaattcctaacataaaaccaatttaggtcatgatgaaaataatatgttcactaggggaaaataactgttcttgagctcgtatgagttgtgtgaatattaagaagcatcagttttcagtgagtggattcagtcttcaatagtttgaccattcttagagcttagtctctagatgggtggtagaaggaaggcccctgagcctaacttcatggaggtgagtcactttaaaaggatgttttctttcttacagattccaccttatggccagcaaggccccagtgcgtatggccagcagggccagactccatactataaccagcaaagtcctcatccccagcagcagccaccttacgcccagcaaccaccatcccagacccctcatgcccagccttcgtatcagcagcagccgcagactcagcaaccacagcttcagtcctctcagcctccatattcccagcagccatcccagcctccacatcagcagtccccaactccatatccctcccagcagtccaccacacaacagcatccccagagccagcccccctactcacaaccacaggcacagtctccctaccagcagcagcaacctcagcagccagcatcctcgtcgctctcccagcaggccgcatatcctcagccccagcctcagcagtcccagcaaactgcctattcccagcagcgcttccctccaccacaggtaagacggacggatggtctgcctcttgccctccatgtactccgccagaggcagcttacataagcttggtgttttgagagctttgccatatacaaaaagaaattgggtaaatgtgctatcaggttttggttgtttttaaaattaattgggtccacttattgataagatactaaattttggttagatttcagcccttaaccccaagaaatggctcctctggggtcaccataaataaaaaacaattctatcaaatgccactgttgacatgaatttgtttggaagttttgtttgtttgtgtgtgtgctttttgttttgagataatgtctcacaatgtagcccagactggccttgaatttgctatcttcctgttggagcttgcctagtgctgggatcacggtcgatcactgccatatcagactcactcttaacattctgaagagccattgcttaaggtgttgtcttttcaaatgatagatgcagttgtgcttctcacatgtgctgccctatgtgaggaacggtacagctctttcaccctctgggtgctttgtattttgtacttgtttgccttgtacctggtgtgtactgatgcgcatggagggcaggaaatgatgttagagcctctagaacacaagttagagttggttgtgagttctgagcctttgtgtggatgctggctctacaggaaaaacaggcttatttatctctccagttgcaacctggttagttggttggtcttttttttttttttttcttgttttgaggcagggtttctgtgtaatcctggctcctgtggaattcagagaccaacttgcctctgcctgccaggtgctgaatgtaaaggtgtgcaccaccattggagcagcccgccctcacagctttgttgtgtttccttgcaggagctttctcaagattcatttgggtctcaggcatcctcagccccctcaatgacctccagtaagggagggcaagaagatatgaacctgagtcttcagtcaaggccctccagcttgcctgtgagtgtctctaatccccgtacagggtgatctaatacagagcaaccaatttaaaaccaggtgtcttggtagcattgataggagatgttcaaaattctgaatgggaattcatagacttaatttagtacaatatttgttttgtctgtttatcagggataagtttgtgctctgtgtttagggttgtctgtctgttttcgaggcactctacagtttcccaggttagtctgcaatctctgggggcctcaagtttccctcaattcctgaggctttgctccttgcagagcacttaggcccatatgtgcactgccaaacccagtgcttgctctgctggcttgcttgccagggcccctctgcgtgaccctgcctggcctcagactccccttcctctgccttcactcaacagcacttgtttcgttttctaataatttggggcctcttactcgtgacgtgataataatgtataaaagggacagagaaaatggagatgtttggaggctgttctctatcacggtgccaaaaaaaaaaaaaaagttttgtgttctttgtcacttttaaatgtaaaaagatcaccttacttttatgggtgtttaggctaaatacattcctgtgaaccacatgcatgctcggtgctctcgggggccagaaaagggtgttagatccttgggactagagtttcagatgtttgttagccatgtgggtggtgctggcagtcaagcccaggtcttctgcaggagcacccagagctcttgactactgaagcagctctctagtctctgcttaacattacttttgagggcttagttttcaaatttcagcctagcattagttcaagatgggtgtattcaagcttacattgttacactgactgtgagttgagtagaaatgtattttgtggtgacatttttgtttgaacgtgtgcttttatctactagagtgtttgatacctaagtacttgctcagggactcagaggctgagaaaggcactgtttgtatctagagctcgggctgtaggtggcctgtcaagatggttcatttagtactgagcatgaagaactcatttcctaaccttacatatgtgctgtggcatacccatataacaaacactcaataaataatgcatgtttgaaaaagatgtgtttgagctctggagccagaattcctagctctgcatcctgatttctgtatcctgtagctaagccacatcacttcccttgctgtcattttctgtgaggtggccctgtgctgctttagatggtggtgatgaatattgctgcctaatggagagcacttggtgcctggtggcatagtgtccgacattgtagtcatcttgagtataggacggcttgatagcgattgtgggaatgtttgttcacatttacgcagtctaagcctctgaacatgaatttcatggacagaaataaataggtttctttcaaatctcataagttggtgggtagcaagcctgccattataaattctgtttctgttaggatttgggagttcaaccaaatatgcctaggtaagtctttaaagtcttgagggattttttggtggcttatataagcctgttaccctagtactggggaacttaggcaagagattgattgcgttcaaggccagccttggctatagtgagagtctattgaatttacttggatttttgcactctcagttattcaggctttgtgggaaatggcatctgggtcgttttgttgttgttgtcagttatttttttaagcagagtttcagtgtggttgtctttctcctgcctttcaggggctgagattttagccataagttagcgtccacagctgccatccagagctttaaggaacacctagaaagcaataactcgtcctgattcaggaagcgttttgtgcttgccctcagagccactgctagactcagtcccggctttggaagccaagaggagcttttaccaggatgagatttctgatgttgactttttcaactgaggaattaaggaaagaagtgtctgcctaaagctgttaccctttctcatgtgacaagtaattacttttaacccttctccttagtgtctatgaatcctttgccaatcctagttgaatttcattgactttcaagtttcttctttgaatttcaatttattaatgtgtgtgtgcatatgtgtagggcaggggagaattgcctgtgggattgatttttctccttctaccttacgagggttcacgggatcacattcaggtcaccaggcaccaaagctttccgctcactgagccgcctcactcccctgactgtgtggacattccctctctggtgggtgctgttgatctgagtgttgctgtagtgtcgggagctcagcttgatgggttgctgtccacattataaactgctgaccttcatagggtttcttgattctggtttctctttgttgttcaggttagccttactctgatgactttttcattgaaaaatacttgctatttctctgaaaagggtcatcggcagacatgctaatctgtcttatacagactaggaacctaaaaccttctgtttcagttactgattgaaagttgaccttccaggaattaggggggaaaattgtgtttctgggaatccaaagaatgagtactgccggatggtggtggcacacgcctttaatcacagcacttgggaggcagaggcaggggagttccaggacagccagggctacacagagaaatccacacacacaaagaaaaagaatgagtactgttccccagtttgggtttctgttctggaacttggcagaacagctgtgtagctctgtggcagaagctccatataggtgagctggtcagaaacttgttttctttgccttttttttctttttttttttcttaaagcaggtgctggtgtgggcctcaggtgattctgagatgacaatattattcttgggcattttttttttggtttggggaaagatttacctagtaaggaacagtcacatctgaagtcagaagccagagtttctacagactccttccttccttaggcacttgtgaaaggatgtgtaaatctgctagttgtcttggttcagtctctgtgtctgtggtaaacaccacaaccagaagcaatttggagaggaaagggttaatttcagatcagtttatagcccatcctgaattgcagggaaggagctcaggacaggagcctggaagcaggaaccgaggcagagggcctagggtgccacaccctcacctgtgtccactgtgagcccagacttgcctgcagctctttgatagagatatttcctcaactgaggtgcctcttcttagaggactgtttgaagttgatgaaacactagccgggacggacgctgtcacatcccttcagtaaacaagagtgtgaagagtccctgagcttggcaccagagctgggctggctgattgaacagtccctctaggttttctgtctttattcttttgaggaatttttttctcagataatatcatcaaatcatctagaagcagttacccagcatttaatgagttaatttttcttttactcttttatattttacacgtatgggtgttttgcctgcatgtatgtcttcaccatgtgtacacagtgcctgtcgatatcaaaaaaggatatttggtcccctaggactgaagttacaagtagttgtgagccttcatgtatgtgctaggaattgaaactaggacctctggaagagcagccagtgttcttagctagctgcttagccatctttgtagctcaggagttactttttaattaaaaatctaaaacctagtataccatacccaggcaacagaaggattggttgctgtgcccctcaataacacacctttctaactggaggtctaaagcgaggcatgtttatcaagtatattgtgtgactcagctctgtagacagtggacagcacttagacccttacacacaggtatgtctgtttctcacgccacttcttcagctcctgttctctggtccatgtctttaaaaaggtcatttcctcagaactacttcctgtcacgtgacaagataactcaggtaactgctgtgatgactttggtaagtgcagtttttagttgaccagagaaaacccctgtaacacttagatgtaaataagcataaagaataatttagtgtctggacagatgcctatccttagaaactgcaggtacaaagtcatatgtagctttctgggatcacttttccatcctaaacctagagaagttacttctttgctccatgctgacagggcattttgtataatgaatccatttatttaaacagcaggctcctgggaaataggcaacttgttactgaccccatttttatttcatgtatgttggtgtttttcctgtattgtatgtgttaatgggggtgtcagatccctggaataggagtaacagacagttataaactgccatgtggttgcagggaattgaacttgcatcctctagaaggatagccaatgcttacaacccctagacagaatttcttctcactacagtcctggctgtcctggaacttgctctgtttaccaggatggcctcaaactcagaaatctacctggctctgattctttttttttttttttttaaagatttatttatttatttattatatgtaagtacactgtagctgtcttcagacacgccagaagagggcgtcatatctcgtgatcagatggttgtgagccaccatgtggttgctgggatttgaactcctgaccttcggaagagcagtcgggtgctcttacccactgagccatctcaccagccccctggctctgattcttaagtgctgagattaaagggataggacacgattgccctgcccaaggctgtttttatacttttctttgtatttagaaagttctctgtagcctaaaccagcctgaaactcactgtgtagcccaaggtcccaaatgatgatgagcaatcatgcctggcttaagttaattatttaacacatgcttactttaggctgacttgatgagtcttgcttattaccatcatggtacctggcatgtgatattggttctcaacttattgataaagtgaacctgaaaactgtcaatagtaaataactcatgagaaaagaggccatgaagttgaagcagagtgtatgtgtatgtgtgttggggtgggatatttgagtaggaccatgcatggcagctatttagagaggtcttaacttgactgtgtgggtatttgattgttttaagtgctatttaacaagtgttgcgctttcccagaatagtgtgcacttttatgaacttgtgttcatacttggaaatgtgcttttgtgataggacacggaagattgcccaggaacgaaatccccatagagggagggtagatagagctaacgttggctttgttagcatgcattaaaaattatctgccagttaacgaaaataaatattactaagccctacttgaaagattgattcattgggtatggagtagcaccccaaagtttgtatctttttcagttggtatggacaattcccgtctacatgccacagttggaacatactgatctttaaaacgaagaaaaaaaaatgcactcgtctaggtcaaaccttagcagctttgagagaggtggaacttacactgctgattgtcctgggatttggagggcaggtggtcagtcgaaaataagagacagcagctgggtggttgtggcacacaccttcaatcccagcgctcagaaggcagaggcaggaggatttctgagttcaaggccaatctggtctacagagcgatttccagtacagcccaggctaaacagagaaaccctcctgcctcatcaaacagccaaaaaagtgaaagagaggagttagagaaaagggaggaagaagaaaacagaaaagggaaaagacttgggtggagagtctcagctaatattaactgcttaccttacaagcacaaggacccaggactgatctgatattcacataaaagaggcagacatgtggacagtttttataaatgctgaggctgcagcccaaggaccctgacctgatctggaagttctagccaggagagaccttatctctcataacaaggtgaatggcacttctgaagtacaacaacccaagttgttctctagcctctcttgccgccnnnnnnnnnnnnnnnnnnnnnnnnnnnnnnnnnnnnnnnnnnnnnnnnnnnnnnnnnnnnnnnnnnnnnnnnnnnnnnnnnnnnnnnnnnnnnnnnnnnnnnnnnnnnnnnnnnnnnnnnnnnnnnnnnnnnnnnnnnncttattcctcacttagggtggcccacacactgcatagccacccaggagctcttctgccatggctctcttctgttaccttttccttagtagtgccatgctgaatgggtcgctaaattgtaatttgcctaagaaaaagattattatcagcagattattgcaaagctatgacctgaactcagtccccagaaactgagtaaagtacagggagagttactacagagttgttctcttgtcttcacaacttgtgctgtggtgtatactcccccctcaacacacacacacacacacacacatttcccttccaagttaatctttagtagtttaccagagggttgggtagagaggcctggttatgtcccggcctgcttctttagattgttttgactgcctattgtgtataggtttaatgttctgaaggataagtctggacatgtgtgtgtatctagtgtgttagagacaaagtttcactccgtagtgcaggttggtcttgagctctggtctcatcagcctctcccaggctgggtctgcacgtctgtgtgctgtgtgtcccatggagttaatggttggttgtgaagtgccatgtgggtgttggcaagtgagtcagatcttgagcttcctctgtgccggttctcttgccctctatttttatgtatttttcgtaggtaagtttcctgttttggagtaaaacctggcacacattttactagagccatgatagaaaacaaacagattggatctgagtgacttctcctagaatctttggcccatgagtctgatctggttctcttcaagaaaactttgtgttttattacaacagaagaacaggagccccgactacgtgatgagcgctgttagtgtttgctgaaatcagtgattgttttatgtcttcatagatgagcctgggtggcatgggcttatgtaatcttaactatttgggaggcagaggcaggggattccaagctaaaaagtgcccaaataactcagtgagactctatctcaaaaaagccagctgggaggcagaggcaggcagatgtcttgagttgaaggccagcctggtctacatgataagttcctgaacagccagggctacacagagaaaccctgtgtccaaaaaagaaaaaagaagtgattgggggtcggggggtgcagatagagagagaatatgaatggatgagagagagagagagaataacatctttaatcccagcactgaggagaaggaggatctctgcaatcagtcctgcctggaagctgtgtttgcgctggaagtggatgtatttgagaggtcactaaggatgtgagcagagtgcactgatatttaggcttcctagagtgaggtgtactgcagagcatggccattagaccacaggctttgggtttgtgttaaattgttgctattgtctgcttgctttttaaaaagatcaccattggtgtggattatgtcttgaaaaggttcaggtctgagaacaagggaataaaagttaaactgagaaatttaattctgaagagaagtataagggtctgcctcctctagtcagttgcatagtcttgtgcaggaacaaattcataagtttgaaaataatgtactgtacttggtgtaaaatttaaaggcaatgattgtccgataagatctttttaagagagagaagagtaggaaatgatgtcaacaccagagtctgacaggggaactcactcttcagtccaaggtaaatgtcattcatttttatgttgtagaataattagctttagtaaggtacccatagacgggcctaattactagccaaagatgaaagcctaaagctcagacaagagttaactctgggttgtgctggagcggtgtcttgcatgatagttaatagttaaaccctgaaatgaagtagaccttagaggctatgattagagtatagagaacagagccagatggagccctgcacagtgcctgtagacacaggtggaggcaaccagcagagatggagcgatctgcataggaccaggattggctatttctggagccaaaggagaagagaaaatagcctgcatcatgggaaacagacaggtgggctgtcacgaagcattgcgttgagatcccttatacacgggcaatacaaacgaacaaaggaatgaatggtgaagcacagccttgtctctccctctttctccatctcacacagacctggcgggcttgaaacctactgaccatcctgcttctgcctcctgggctctgcactacagtgcacactacacatgcactgaagagaactattaataggcactgagcaggagaggtggctgggtcagcccaagtcccctgcctcacacatgtaaggcgcaagtcccctgcctcacacatgcagggcgcaagaggaaagggtaatgatgctggagttggagagaaaaagaaagatgatgcctcctggctttgtttctggaggtcattctctctcttgagtcttgttccgaatgccagccagggtgaggtgggcaggaattggagttttagtatttattaaattaaccataggtattttcttttcattcctgttttgttttgttgagacggtttttttttctctgcctgtcctggacttgctttgtagactagggtggcctgaaacttgtagatcagcttacctctacctccaaagggctggaattgaaggcggcgtgcaccaccacacctggttcttggatttttaactatctttagatatctaatcacttagtgggtctgggaaggtggctctagccacctgcaaacagctacagtacactgaaatgtgcccattcctgtgtcatatgtgaaaaatctaaagctcagagtcaaaatttgaatctagctctcatatttcaaatgaaacatttcctttttcatgccatataataaagtcatagatgatctagtcatttgctttgtcatgaagagacccctctatgttttagtgtttttgaaatttaatgatttgttcatttttattctatatgtatttgtgtttgcatgtacttctgtgtaataagtatgttggatcccctggaactggagttatagatccatgtgggttctgggaattgaactccagtcctctggaagaatagccagtattctttaactactgagccgtctctcaagcccacttttgaatgtttatctactcttatttgttttttggtttttttgtttttttgaagagggcgtcagatcttgttacggatgattgtgagccaccatttggttgctgggatttgaactcaggacatttggaagagcagtcagtgctcttaaacgttgagtcatctctccagcccctctactcttgtttgtatgggtattttttcatgtatatctgtacaccgcattggtgctgtgcatgtcagctacctgcagaagccaatcaagtgttcataggttcccattggactggagttacaggtggttgtgacgtatcatgtaggggctagaagttgatcccatgtcctccaaaaagaacagccaatgttcttaatttttgatcccctcctagtcttttctcaaacttcagatcttcttcttctatctcagtgttggtattacagggataagccaccacaccatattttgctgtaaaatctcagtaggcttgtcctcagggaaggataatcaatgggcgtccatttcactttttagaaaattacatttatttattaaattgttgtttattatgtagatgtctgtgcattctcaaataccactttggtttttggaggtcagaattttttgggttcccactcagtgaaccctagggatctaatttagacccatcgggctgagccatccctctggcctccctgtcactttccccagatcttttaagtcacagctgagtagatatgaaagggcaactggagggagctgtccttcagggtaagctggaggaattgcttgggggaggagccatctaaagagttgcaaagaataggccagggatagttagtgtttgggttcttagcttgtgggtattggataggagcaagccttgcctccctgtcttacacaacttttggtctggaacttttgcatcctggttaatgctaaattaaatcggatctctagtgctcaaagtatcatcctgtggtgtggaaactacctgaggatgcaggcagtttctcctgccccatccctcatctattggtctgtcttcctttccctttccctttttccctttccctttctcccttcttcccttttttccccctttcctcccttttccccccttttcccctttcccctcttttccctctccctctcttccctcttttcccccttttcccttcccttccttttgagatgataatataattacataatttccccttcttccctccaaaccttccaatgtataacccttctatgatctatttcagaagcaagtcttctttttctttaattgttgttacatgtgtaactgtatatgaattgaatacaaagaaaaaggaacatgactggtcctagtatggtggagaagaaagtttattatagatatgtaggagagcatagcaagaggcagggacctgtgaaaagagtccagggtggacatgatcatatgagctggggagtgaaaagaccagggaactagatgcagcacccaggaggcccaaagttaacaaagagctggcaactagaatcattgtattatacagtgacgagcagaccagacccttgggtcggagaattcagggtaggggactgggtatgccagccaggggtgccttgtaactggtagggagaacctggctgccagatccactttgatctgttaagtagtaggcacctcatccagttgacccaaggcttgaaacgttggatggatgatagatagataaatgggttgattctaaatcaattcaacctactcagtttgtgtaatgcttgtgtggttttgtttgtattatagacagtttttctgtgtagacctggaactcaatcagtatatctgggaggcagagaactcacagagattttctgcctctgcttcccagagtgctgggattaaaggtgtgtgcctgtgtatgttttctagacatttttttaatttgcatttttgtgtattttatgtatgagtgctctgtttacatgtatgcctgcatgccaaaacaggccatcagattccattgtagacggtggtggactgccgtgtggttgctgggaattgcactcaggccctctggaagagcagtcagtgttcttgagccacctctccagccccataagtttgttttcataggtgagattgggcattggggtcacggattgctgtgttctttaatggagaaggctatttttcttcctgttcctcagttgccagtagttctttgtcttgggttacccttccatgcctgttggtgttatccttgtctggtcttatttaggcagtcatgtctaataagttagaagccctgactagaaataccaggctgggagctttagagcgagataccaatactcgctgcttgtgagattacatcacctgttttgtggatacttttgagaccctggctcctcaggcttcagcccctagcattcctctgctgtcttaaactccctcataattcctaggtcggtccccccaagcccccaaccccacacgttatatttcttttgcttgagacacattcatttctctgtctatctctgttgctttgttaaataactgacagtggtctggaactctgtgacctggctatcctgaacacccacctgcctgctcagtttataggaatgtggctatgtggttagctttgtttttaatgaccaagcaggtttctgttgtggcttcaagcctaagctgaaaggtcttggtagggacttcattctctctcacttttggtgttggcataacaccatgcttggtatgtctgcttgagtccctcacattctctgcttacatgtgtattcactaaaataaaagcatgaaatgactcctgcattgacctcagccaacttttgtgctctttttggaggaggaacacatggtgggaatgcttaggactggggcaacttgaggggtttgaacgatgctgctttcatttccttttgttcttttcacagtaaaggagccatcagtccttgtctaggatttgctggtttattttctaagggtgacaaatactggtagcattttggtaaacaaagggattttaaaaagtctggccacacttagaattgaaccagagtgttctgtgtcctggctccccatcaatctgccgtgtctgtgagactgctctgagcagagtgtaccatgtccgtgtagcatcatttccagaacacttgcgctctggcagagccggctggtccacttctccgttccagtcacactgctctagctccgacactgccggtgccttccggagcctgtgctgcacatagctgcatgcttgtccctgggcccatttcctgtttctattctagtctctggtggctcagctacacttcctgcctgtgtgtgtgtctcacagattcttctttctggaccctcttgttttctttagaataacctcagcctgagaaacagctgaactttaatatgatggctcctgagttggtcatacctaagaggactgatgagaagtgacccctttccccagtgaagctcaccacatgatgactgtgacttgtttttcagtttgtccccagcctgctagaggaaactatagaccagaaatttggaagggaataaatggagccctcttcccctcaccgttaggcatgctgggctgttaggacctctgttgcttgttcttctgcagccgttgcttacacacaagtttcctgcctcggaggaagacaagtagtgtactcctagtgcaaacctccctaaagtacagagttaaaatgaaggttaggcaggtagagcatgctgtcttctgaatagcctgtagagcacacagggatggaaagtgctcctgcttacgtgaacagttcaagtctttttgtttctgagacattatctctatgtagccttggctgaccaggaactccttatgtagaaaggttggcctgaaattcaaatagatccatccagctgccttggcctggtactgctaatattgtggggactaaaggcctgtaccaccacactagtccaggtcttatgcacctccccatacacatacacaaactcctcacatatacataacaacaccccacattagaaatggagagagtgtgtagggaggtggtaaaaagggaagaaatgaaggaggccatctagacagacatatttaaaggacttccctcctcctcccaagtaaaacatttgtttaggagtgtatgctttgtgatttagtctgtatttcctacatagctactcggctgggtcacctgatgctactgaagccgattgttgagggatgaaccctgtgtctgggtctggctgtagagaaagaagagttgagtaatgattgatgactttgagttccttaggaaaggttgaagggtgagatccacttgtacacagaaacagtcagtgtgacccagaagtgctatcagactggccctggggtcctgtctccctccagatctatgacccagaaatcatttaggtagaatcagaaagcagcagtggcagccaggcaaaatgacacacaccttcaatgccagggcttgggaggcaggcaggtctccgatttgagattattagcctgttcctcagagtgagttccaggacagccagggctattcagagaaagcctgtctcaaaatcaacaacaataacaacataaagcagcagttgctaccaccagaactagttaagtagagcctggaaccaaaatgctcctgcagaaacagacagaggaaacagaaacatgagctaggaacttgaactgtgtgtggagcttatctgcagtgattttttttttttttttgaagacgtagttttagctttataacaaacagttgtggggcatctcccctcccatttcccaccccgccccccccccccccacacacacaaaagggggcgttggggagaaagagaaaatccagaaagaaatgggggatgagcgggtgagggtcatggcatttcctctggaaggatcaaatctttccagccagagtcttagcaaatccctgagtcggcctgtggggtgaatctgttgccttgtgttgacttacattcactcatttcttccttttataatgttcagtagaaaatgccagccaaacccagaactccaacccccaagtacgtaatcaccaagttatctctgtttgttaggggtggggtggggtggttggacctttggaaagaagccaagtctacctagaaatactatctttgtagagaaaccactaggacatccattagttaagttggaaatctctcaaacttagtccacagggcaagaccgaccccttgtgtggcgttgtcttcccatatctagtaaaacacttggtgttctgcctgtaagctgtgttgagcccaaacatactctggtgccatttgaagggagccagtacttgatccattggctcctgtgtcctaaacccgttccctcttcccccatgcaccagcatagaactgacaagtattgtgacataatctttgattaccatgatcaccctccaagctgggagcctccttccccgtttaacacttaccaaaggaggataagaagccatgccttcacgggtggaacctagatattgagaatcaacacagtttgcacttaaggccagccgtgatgtagatgttgtctgctgagatgagtaaaggtaatttgccaaccttttgggaacaggagagaaaccaggtttcagatggaaggaagcatgttgagaggacataataggaatgtttggatttgcccgcatcatcttctagaacttaacagaggcttccctgcattgttgtcctggtttaaagatactgaggttggtggctgcctttacttccttcagaacttttgtctattccccattaccaggtctacttgtgctacataagtatttatttaaactttttatctatactgtggtagtgaagatctctggctaatgtaaatgtagaactttacaaactggggtcgagaccgtcagtcccctaattaccatcatgtttgcacgtggccagctttgccttccccggcttgaccttacgtgctttctggttgctgtgggtctgagggaagagccaatgatttttaagtttaagtcaatatcctcttccctgttaattcctcagaccctccttgcttctctcctttttcttgccttccttgctttaagttctagaatcacagctggtggtcttgatggaaaaggctatgtgtggttggcctacttactattaggcaaggcttgactttgggaagataacagttgctagcttcccttgctttttctagctttgtaatgctcttgtttcttgctggggtgataatggcaagtaataattccttaaatatgcgctgctccaactcagatccaggtctgacccagacctacccccacccccgattgaagtctgttagctggtgattattaaaaaaaaaatactgtagatttctttggtcacaagatagttactaactggataagacatttctctctggcccatatgagaagcctttgagagaggccggatccaagtgtatggggtggtcagggtggccaagtaacatcaggcccataacagactggagagtaaaatttcaagccagacaatggtggcgcacgtgggagccagaggcaggcggatttctgagttccaggacagccagaggtgcacagagaaaccttgcctcaaaaaaacctgtagagttcttttagatctcccagtttttcacttggttcaataggaaggcctggcagtgaggcgaaagcatcccgagcctggggctttccttgtgatctgtgaggaccgcttgcctcatggcttccgctgctccatttttgcatttacttcctttgtggagcttctctgggataaggacggccatggagaacatcctcttctttgccaactcatgtgttttatggggtgggggggtgcatgtagagatgttgagcagaaacattcggtgtgattaaacctccaactgagaagatttgtgggagcaagatatcgaccccagcgaaatcaatggctgcagcagtagccaggctgctcattgcaggagctcctaccacaggagtgtgagcagcacagcagtctcccctcagcctccaccctgactcaatcccgcttccagactgtgctaggtgagttagaacagctgcggtttattttgatttttttttttttaaacaactagaatgaagtttggtcagtgatccctacctccaacagccttatcttactctgctgcagttctagcaacagcttttgtcttttcagatgggacagttggtactctaggggcagtacctgtccaaagtcgcaaatataaaaggtaaaatggggatagatatgacatggccattagagattgtatccaaaggggatggttttgggactcttcatcagacagcatttaccactcagcttgtcttgtgtgtgactggcatttttctgatcactaatagtctaataccgcttagtccctcaggctcatggggcagagacagatttaaaacggtgcaatcaagaataaagagcttcacctgatagtgaagaggaagttgtctgtggtcttcattttaaaggagatcaagtgtggcagtatacatatacatatacatatacatatacatatacatatacatatacacatacgtatacatatacgtatacatatacgtatacatatactttaagctgaggctggatgacgaatggtttgagacctccctgagctatgaattccaggccagcttgtacaaggtctgtatatcaagagagaaagaagaaaacaatagaatagacactctgacagaaccgatagcagatgggatgaggctagccctgcagtttgccagtggtttgtttttgattgccaagcccggccttggacttgaatattcctcctttagcctttcaagcagagggggctgcaagtatatactactgcatctagctttgatgttcccaaggcaaaaaaaccattttaaactagaagtgttagacctgtaacaaatggacttggtctccatgcttgctccagtgtgtgtttgaaggagcctgttgtcctgttgttgtcctgttgtcctattgttgaaacacttctgtggcctggcttgggaatgcggatgtggagctcacttggtggctgcccttcattcagtaaggaaccttcccatcttttagcctagggaatgaagccccatttctcctgtagtttgaaaggctctctgcagagctgggcagaggacgtgtgaagaactacggccacctgagacggggctcgttctagatgatgaggatatcttgatttctccatccattataacaaagttaatgttaatccccagtagattctagactaagatttaggagttcgtgctctgactcattcctagtatcctagtattgtatacagttccagctaacctgtttctctagaagtgtttgctagtagtgtgctttgctacccttgatcagtatgtgcttaagaaaagttttgttgttgctttttttttaaatgtggagccaacaaaacaaaacttttttgagacaggttatcactttatagcttagattggctttgaactcccaatcctccttcctctgcctcaagtggtagaattatatctatatacgataccgtgtatcgccatacctaaacctcccagatttgttttaaatggttcacttccctgagtctgttgaatctgttgccccaagcttccttctgcaaagtcagggtttcaacatctctcccgtgttctgagaattgtgcccacctccaagcacatgcgagtgagcagtggcctccgctcttagcttcttctattgatgcatgttttacctaccagtaacaatacaaaaccaggcaaaaaactcttcactgctaagtagcttcataaatgcaataaatattgctcgctgtggtctccttcttgcatagttctgtgggcaggccatttctcttcctactctttaattctggacgggtacctaacggcttcaccaggcaactggctcatggtacatcttgtgaacttttcttttcttggagagcacagcccccagcctccaccatgaggtatgaactgtgatttcaggcacggttttgttgtggtgtgaagagaaggtgtcagctgctgaattctgtttgtcagcagagcctgacaaacccatgctggcacactctagggctgggcaaccaatcacagctggaacagttatcgtcatggagtccctgtgggcttcctctatcaggtcacatcccaaaataacactgggcagtatttcaaatgaagaaatgaaggctttcggagctgtagccagcctagagtgtgagattctgtgtgaaatagttggacctgctccagcgcgtttgatctgcatggtggatgagcagtaaaattcatgaaacacgttggaaacacgtgaggaaattcttctggccccgccgcttccttggaactggcaagggcactgagtgggctgatccttgcctagcgtctccccgcaggattgtacttgaagaagagcaaacccagggaaaaagctgtccaactggagagacattgctgcgtgtctaagccgcccctcctcccccaagagatacttactagatgggtcctttgggagagttttgagagcatgggtctgtaaaatgctaaaggcacatggggcttaggttgatgagactcttatctttgtaaatgtgctctaggaaccaggcttgttaggcacacagaatgtctgactcaagaaccacataccaggtttgtatgaaacaggagacctgaaaaactggattattgtagagtagaaagccaaggtcccaagcaatagaaggtcatgaaatttggggtctgtcccctacaagaggagttgtttgagtggcagcttttggagacttaaacccttatatccaataaaaacatttaccatatgattagcccctgggactgattaatatctatcatttcctgctgcatggatattgtatgttctcattctctctgtttcgctcaagttgtaatgtgtgtatgtggtagatgcatgtgattgaggttgtgtctctggaatgcaggtatggagaccagaggagacatttgagtgtcctgctctgtcactcagtacacatgctttgagagtatttcattacacctgcagcttgacgttgccagctaggccaactggccagcaagcccctgcagtcttgtctttgttccccagcacagagcctgcaggtacttgaggtcactcccagctttgacacaggtagtagggatccaaactcaagtccttctcttacccattgaatcatctcccagctgataccttgtatgtgcttgcacactccctttttcttcttgagacagggtttccctgtatagccctcgctgtcctggaactcactttttagaccaggctagcctttgaactcagatccacctgtctctgttgcccaagtgctgggattaaaggtgtgccctaccactatctagcacatacttcttattctagaatatcgtcgctgatcttgccccagttgtaatgtattgtgctagtgaggtttgtgatcatgctccacacagtgtcacaaactcatttgttcctttcattaaaaacctaagccaaggggctggagagatgggtcagcagctacgagcactggctgctcttccagaggtcctgagttcaattcccagcaaccacatggtggctcacaaccatctgtaatggaatctgatgcccacagctacggtgttctcatatacataaaatagtctttaaaaaaaaaaacttaagccaagcttgtttgccaggttgctcataatcacaattaatgattacctaaagctcaactttatttacttaactcattgtatagcatgttttctcctcagttcttactgttttataaaataacggagaaaatgaatgaaaaggattgggcttgagctcttgcctggggttcaaactacctagtcaccaggtaattgggcaggtaattcaagctctctcaggccatcaatttcccttgtcttcaaaatttagtggtagtaatgtatacagccaagagttgtaaaaaattaaaatataggcgatcccagcctagtttacagggtgagttccagggcagccaaggctacacaaggcttgtcattttttaaaaaaggaagaaaagaaaacccacagactagccaggtgtggtggcaggcgcttgtctactgtcctggcacttggaagatagagataggagggtccgaagtaatcagtttgaatccaacctgaactgcatgaaatcatgtacgcatgcatgcagactgagcctcaggtggtaagcctcagtatactggcaggaggaggatcagccttcactatagaaagaatgtgagannnnnnnnnnnnnnnnnnnntcaaagtgcctgtatgaagaaagttcctctttgccatccatagatcctgagacttcagcctaagggctgctgctgggatccctcacccaagactgagcagttaactcagatctgtggtgggctctgcttatttaactcaagaccagctcaatccatttcctcattgtttagtggtggtgtcctgggtgcgtggaccaagtgggaggcagcaaaacaatagtaaagagggtctcatgcattgtctcagacgtggctcctaagacactggattttacctgtgtaaatataaactgtctaaaacgacacttcgtttttctttttccctttaaaagatttatttattgagtacactgtagctgtcttcagacacaccagaagagggcatcaaatcccattacagatggttgtgagccaccatgtggttgctgggaattgaacccaggacctctagaagagcagtcagtgctcttaaccactaagccatcatctctctagctcaagaacacttagtttttcaaagtaatttggggctttgggggctggagcaagattattcagttggaaaagtacatacataagcttgatccctagaacccatgtcaaaaaggtagacgtgagctgggcgtggtggcccacacctttaatcccagtacttgggaggcagaggcaagcagatttctgagttctaggccagcctggtctacaaagtgagttccaggacagccagggctatacagagaaaccttgtctcgaaacaaaggttgatgtggtgatggcacacactgctgtaacactagtgccaggaaggtagtggcgaacagtggttcctgaggcatgctagctagccttcttagccagttctacttccatttgaagctctgtcttcacaaaaacctcaaggtatatgacacccaaaaaacagtgtcagtgattgaccacgagttccacatatgcagttgtataccccatctcaaacacaagtgcaagaggacaaggacaggggataggtctcgaaggctgactgtggccgtgcaagttgggaggtgaaaatcaaggatagcattgtctatatagtaggttcaaggtcaacctgagctacatgagacccagatcaatcaatcaataaacatgtgtgtgtgtgtgtgtgtgagagagagagagagagagagagagagagagagagagagagaaagaaggagaaggcaaaaatggacatttgattcttaatatcttgtaaaataaactagtttcttcttccagtaagcaattagatcatctcagaagctggcagcgttcagaggagcaagagctgtgttgtataagggcccgactggtggttgaacagagagaacattgagtttgctgaacttctgtccgtccctccttccctcttacagatcaggaggtannnnnnnnnnnnnnnnnnnnacgggtgggggtgggggatggagagtgacagaatgaaacaccaagtacctgcacataatcggtgctcaacagtagctctgctaatgttgaatcttttgccctttatcattcttaaatggtctgcttcttaaaaccatttcagatcaatgttcccgtgtggaccagttaccacctgacaaagataggacagcttgttaagttggtttcaaaccaaccaaggaaagatgaaatgaatagtgccctctttgcttggcacagtctgtgcccaggcatcctaactggcatggggctcttgacagtagcttatttagcactttttcttcaaggaacttaagaccgttttgttttgttttgttttgttttgtttttcaaaactgacaactctcttcaaagtgcctgtatgaagaaagttcctctttgccatccatagatcctgagacttcagcctaagggctgctgttgggatccctcacccaagactgagcagttagctcagatctgtggtgagctctgcttatttaactcaagaccagctcaatccatttcctcattgtttagtggtggtgtcctgggtgcgtggaccaagtgggaggcagcaaaacaatagtaaagagggtctcatgcattgtctcagacgtggctcctaagacactggattttacctgtgtaaatataaactgtctaaaacgacacttcgtttttctttttccctttaaaagatttatttattgagtacactgtagctgtcttcagacacaccagaagagggcatcaaatcccattacagatggttgtgagccaccatgtggttgctgggaattgaacctaggaccttcttagccagttctacttccatttgaagctctgtcttcacaaaaacctcaaggtatatgacacccaaaaaacagtgtcagtgattgaccacgagttccacatatgcagttgtataccccatctcaaacacaagtgcaagaggacaaggacagggataggtctcgaaggctgactgtggccgtgcaagttgggaggtgaaaatcaaggatagcattgtctatatagtaggttcaaggtcaacctgagctacatgagacccagatcaatcaatcaataaacgtgtgtgtgtgtgtgtgtgtgagagagagagagagagagagagagagagagagagagagagagagagagagagagagaaagaaggagaaggcaaaaatggacatttgattcttaatatcttgtaaaataaactagtttcttcttccagtaagcaattagatcatctcagaagctggcagcgttcagaggagcaagagctgtgttgtataagggcccgactggtggttgaacagagagaacattgagtttgctgaacttctgtccgtccctccttccctcttacagatcaggaggtagaaatgtaatgccagaccttcttagcattgaagagattctctttcccatggtccatatttctttcttacctccttgcccatataatacaaaggtttggattgaaaaagtctttagtaaacaacgatgtgaggtacaggctggagagatttcttggagattaaaagcactagatgctctttcagaggacccaagttcaattcccaggaagcacatgtcagctcacacctgtctgcaactcctattccagggatttgacagacatgcatgcagagaaaacaccaaatcacgtaaaaaataaattaaattgaaaaaaaatcaacccccctcccacacacacaccaaagtgagagatgtgaggaaggggggttcctagcaggactttgtagttttctccttagagtagcatttaagcatcactaaagtaggcacttctgcttgttctaagagagaaaaggtaaaatgccagctgttataagatcatctgggatagtactgaccacccagctacccctttgtatgtctgaagctttatcgatacatgtacagttttaaggtttgtaactatttttgctaaagtagcagaattgaaataggtttcaatttgtttgtttgcctaggtggaaggtagctgactgactggtttatgggtattttgttttgtttttgagatagggtcttggaaatcacctacatagaccagactaccccctggtctcataaataatatacttgaattgattataaagaataaacttgacttggttctgtctctcaaatatttgggtgccagctcagcctgactccgtgtatgtttgtgtgtgtgttttgtcttgtgacacatttcttactgtgtggtcccggctcgccttaaactcaatcttactgctcagcctcttaagtgctagtttgcaaatgtgtacctccttgctcagcagtatggtaaagtccagaaggcccatgaattgaactcaaaagtgtattcagtatttcagtgtgttccttcatggcgtttgctgtatgtgaccaattgtaaatatgattattttgcttcctttcactaatatccttgcgtgtgtgtttcaggatctgtctggttcaatcgatgatctccccatggggacagaaggagctctgagtcctggcgtgagcacatcagggatttccagcagccaaggagagcagagcaatccagctcagtctcccttttctcctcacacctcccctcacctgcctggcatccgaggcccgtccccgtcccctgttggctctcctgccagtgtcgcgcagtctcgctcaggaccactctcgcctgctgcagtgccaggtaccctcagtactggtttttgggaagaggaaaagctggttgggcttgtgataataaaggggagctttgactcgtgcctgcatggtttttcccttagcatttgaagaagggaggtgggaagcccttggatgaatactggtgtagatatagcataagaagtgttgagcaatttccaggtccaaattcactccttatttaagattctcaggctgagccatggttttttgttttttttttgtttgtttgtttgtttgttttttcttttgtctggagcaggcaaccagatgccacctcggccacccagtggccagtcagacagcatcatgcacccttccatgaaccaatcaagcattgcccaagatcgaggtgagagcttgggtttcgacagaggactagcaggagcacccaccccaatctaccactattgtgacatgttattgtcaactgcaaacatgctgggccaaagtcatagctgtcccttgggctggaaactgaggaatgtggtactaaagtgccctgttcaataactcctgaagaactgtatggcagaaagcttacagtaatgccagcagcaggctgttaggttcagtgagcttgtccttgtgtccatcctccagcagttattagttactctacatagctcagtgctgaccagcactttgatggcttgcacctttcactgtgcctaattagtacacattttctgaagattccacattttggtttttgagggtggggctgattttggtgttttggtttggtttggttttttgtcagtactttttatcaattttctatttagtatgaaagttggttcgggcagtagtggcacgtgcctttaatccccccactggggaaggcagatgcaggtaggtctcttgagaccagcctggtgtactgagtaagttccaagacaagcagaaccattgtcttaaaaacaaaacaacaaaaaaagttaatatgtgccccatgtcttgtcactttcaaggaatctgaataggcagaggacagtagcagatcccatgccagaggcgttcagcggagtggggaagccgtttattcccattatactgagcagataattatttggatacattccacacataggttatatgcagaggaacccccagatgccccagtacacttcccctcagcctggctcggccttatccccacgtcagccgtctggaggacagatgcactcgggcgtgggctcctaccagcagaactccatggggagctacggcccccagggcagtcagtatggcccacaaggtaagtgtgctacccctttagaaggaaagagaggtactgtgttaacagctgggttaaaagagtagggcatccttccttacatctccccagccgaggccctagggaggagtggggcaacgaatggttcatcgtgtcttcactccattctgtcaccttgtatgggccattgatgggccagcacaggtgcttattagatacaggcgctgtgccatgactggatgtgccttgatcatgcatgcatgcacataacacacaaattaagaaaattttgggtgggaggcagggaaaatacgtagaaaggaaagaattctattgaatgctgaaaggcctagatagtaactctgccatcattctctgtgctgggcagtcagggattgtggctcagtaatgaacaaagccctgggattcagtgctcagcaaaccccaccccaaactggggatggggctagagatgttttcctcccttaatgatggatttgttcattttcatgacccagatattgatggattctaattgtttggagttttaagaattgtagttctgggacttgctaaccaaggcttgtgttgtttcctccccacccctccccaggaggctatcctaggcagcctaactataatgccttgcccaacgccaactaccccaatgcaggcatggccggaagtatgaaccctatgggtgctggaggtcagatgcatgggcagcctggaatcccaccttacggcacactccctccagggagaatggctcatgcgtctatgggcaacaggccctatggccctaatatggccaatatgccacctcaggttgggtcagggatgtgtcctccaccagggggaatgaacaggaaaactcaagagtctgctgttgccatgcatgttgctgccaactctatccaaaacaggtaaggcctgggagtgaagagagggttctggtgtacaagcgcatgcatgcaacggaacttgtatgttattgaaagttcttctaagcactgtgttttctttttaacacacagtttaaacacatgcacaaatgtgctggttcttcaggatgctaataaaaattgatatgacgaagtatcctgtgtacagaacttaagctaggtgtggtactttgtgcctgtaggctacttaggagtctgggcaggaaagagtaatgggaaagcgactactggaggcttataggctctgccataaagcgatcctttaagtagaaacatagcaactttaggtgttgcctatgggaaagtggtgtttataaaacatcataagaccttattcttcaagggttattccccatcagactaagctagtgcttgctttacagagttcaggccttccttgaacctttgtggcaaatagatgtgtggcctcggttagatttgtgagacttaaaactttttctattcttattagacaattaattctacttttttttttcctcctcattcccaaatgtagaggttcactgtgtctctaaccttctctttaatgttcatcttcttccttaggccaccaggctacccaaatatgaatcaagggggcatgatgggaactggacctccctatggacaggggatcaatagtatggctggcatgatcaaccctcagggacccccatatcctatgggtggaaccatggccaacaattcagcaggtcagtgtaattgagtgctcatcacaggagtttcttcaagaaagatcttcaagcggtagtaaaatctactggacctgaactggtatctttttacagggatggcagccagcccagagatgatgggccttggggatgttaagttaactcccgccacaaaaatgaacaacaaggcagatggaacacccaagacagaatccaaatctaaggtttttatcttttgccctttcaattttgtatcttatcccctttgctgaatgatacaaggaaaattgagagccagggagtggtggcatgtccctttagttcagtactcagtaggcagaggcaggtggatctcttgagttcaaagccagcctagcctagtcaatagagcaggttcagggacagccagaacttcacagagaaatcctgtcaggaaacacagggtgctagaagaataaatgaaagagaatgacaaggttttagcatgttatggtgctggtacccacaaaggcttccattgcctcagtatgtcactcccattgggctctgcagtatacactcctctgtgagacttggcctctgacgcatatgcactgatgatgaatactgtaggcagctagctgcccctctcttcctagactttactcagagcagcaagaatgtttggtactacaattctacaagcagaatagtgacgcaggtgggggttggggtcttaacctctctgtaggttagatctagatgtgttggagttacagggatttatgaagccacctgattggaagccagccacctctaaacagctatcatgtttacctgatgatcccctgcttgattggtttggtttggtgtgttggggagtcagtgggttgagacagggtctcactaggtagctctggatgacgtagaactcactatatagacctggttggccttgaactcacagagatctagctgcctctctgccccctctatttgctgggattaaagatgtgtgctgccacacccagtccacatctacattttaaaaatgcaaagctgcagggaacatagaggggatagcacactcccatagtccactcctcaggagctaggggcggacaaggctctttggagaccagcctagtgtatagagtgagttctagcacaggcagggctacacagagaaaccctggctcaaaaaaacaaaacaaagttagggtctattgagatggttctgtggttaggaacactggttgctcatccagaggatctgagtccacttgccaggcccacatggcagcccacactgtctgtaactccagctctagggggctccattgttcacgtgccctcttctgctcatgtaagcaccagacatatgtgtacttaagatcaaaacagtccttggcatgaagtaatttttaaattttagcatgaaaaggacaactgtgaaataaaaacaatcacacaattaacgctaaagtctgcgtatctcatgaacttctgtgcagttagaaccaccgtaccgaaactgcagcttggcagcggattttcagcctttgctatcacacacattttctcttaaaacttctaagatacattcccagcacctgggagacgaaagcaggcaatttcacgaccagctcatgctctagaagacttgctctctcagagaggggcggacagagaagagatttctggccccagtgtgcataggctttgactttgagtttctctggtttcaacccaccctccagaaatccagttcttctaccaccaccaatgagaagatcaccaaattgtatgagttgggtggtgagcccgagaggaagatgtgggtggaccggtacctggccttcacagaggagaaggccatgggcatgacaaatctgcctgctgtggggaggaagcctctggacctctatcgcctctatgtgtctgtgaaggagattggtgggttgactcaggtaagcaccagacagtttgcttctgagagtaccattcatcccatggagttcgtgctccaagacacttaaaacccatgatcgtaaacaaggtgtgtaaaccacatgagcttcaagtcttcttaatggtaaaacagggaccatatgtaagcatttgtcctgtcagacttagataatctctgtaaaccttcagcaagaggcctcgtgaatcacttggtctctgtgatggtatgggaggttcattgagcctttgaacttaaactttccagagaagatagaatttcagaaattgcatatagagtggttacagagggagaagtagaatactttgacttcagagaacgggtcagtcctcactggaaatgccattgctatatactttacagttctgtactcagccagacaggataactagtgatagctcactttgccttgtgggctttctttattttacagaccagaaactctggagtggggttgggagagcctgacagggagaaacttactccaaaccttgtaaatcagaaaaggaaaacagctgtcaccagcagaaaagaaagtggttggaatgaagccagctaccagtcatttatgactcccttctcccttcaggcttctcccctcccccacaaagggaaacaaaacagaatagggcacgtgcaggctgccatatcactggcgtgggaagcaaaaccacatagggcttctgaggtgacctgcgtctattcctactttccactgtcatttggtcctcgttcccgacttgtgggaaaggaggattggctgcttatagctttgccttcttctgattgctgggcctcggagctcactgagcattagatgggatacagaacaacgcttgtcttccggttggaaaaggaatcttttaagttgccgttgatattgatagttgtattccaaagacaataagaattcatttctgagtgaaggccctgagaaaggcaagcatgagtcctgagcttgaaaggttagtgagagggccatcccagtagcctggaccaggtattgcggggtggaagggagtgtgcggagatatccacgactgttgctaactgagaaaacagccaaaatgtattctcaccagggccaccttataaagtgtttctggtcacctcgcttctgtctgtggaagttatctctgcttccttgagctctgtggatcaaaggtatcatgtcccagaatctccctgtggatcaggactgcagtgcccatgcgctcagcactagagggataagcctgccattgtgcttaagaatacaccatggatcacactactgttaggaggggacacttgggaaatggtcttgatcacggtggcctggctgttgacagcctcatactgatggtgaagagtcatgtaaaattcattagctttaaagagtctggttggagagatggctcagtggctaagagcactgatttttatcccgaaggtcctgagttcaaatctcagcaaccacatggtggctcacaaccatcagtaatgagatctggcgccctctttaaggatgtctgaagtcagctacaatgtacttacatataataaataaggacatctttttaaaaaaataaaaattgaaaaaaagcgagagggtgagggttggagcacagcccagacactgagttctgtccagtctcggtgtgccgtttgaatttgtcctgtttgaattaagctgctgcttgtagttatttcagacttgtaagcttacaacaacctttttgggttcagcacctgtgaactggaaggctgggtcatctatattctgactcttctggtggtctttcaggtcaacaagaacaaaaaatggcgggaacttgcaaccaacctcaatgtgggtacatcaagcagtgctgccagctcactgaaaaagcagtatatccaatgtctctatgcctttgagtgcaagatcgagcgtggagaagaccctccccccgatatcttcgcagctgctgactccaagaagtcccaacccaagatccagcccccctctcctggtaagaatggctgagtaccctaccctaccccaccccctcaccccaaagctgagagcacacttccttaggtactggtatctctgtcactccaggagcagagcagatgccagggatgtgtgtttttagccatccacgtggcttggcaggttggcagactaaagagctgtagtggcgactcccttgggaggtgctgtgcggcagccttaagttttaactttctaattctcctgttgtacacctggcatcttgccaaatgtttgtaaactggtgagtgggagggacaccagaggagtgagggaaaactgacaaatagcagcatggttgggccatctgggagctttggcctgctgatgtcagcgccttagaatgcagtgcctgaaattcccccagagagctaagatggtaatgaatggttagaaggagtagggagagaatatgaatggaactttctgatgacaggagttctgctttaccctctgttctcagaggaggctggggcctaggctagcatgggaaagaggccagggtagaaggtaggtgtaaacatacgtgccctgtctttgacctctgagggtgtacttcatgcctgagatgactcatcggcttgggaaggcctcagtagtgtgctgtctaatgctacgaaacggtacctattggaaacattcattactgggtggtctgtgctctttagaggaatattagaatctaagggtgacgttttgctgtgtgcctaatagaaacatctaggcactggccatgtgactcctttctacaccccatgtttcaagagctctgattgggcattttttgctccatcatcattatggtgttagaaaagttatttggacaaaggtgatgaggaagctgcccatgacttaaatgacctggtggaaagcaaatgtccacttcagctctcaagccaccaatgcagccagacctcagatatccacatgtgtgtggaaggagggtgtggatatttatttattgtaactcaattgtgcagcttttttgtgtgaactttgacatgccatttttatatcaggacatgcctgcataagtgacaaaatcccttctctatgacttgccttttacatcaccgactgtaagaagtcgtcttggatctgttcagtgttcttaggaacatctcttagagagggatcctgggaaggcaaacgcagtgtcattcccagctctccagaggctgaaagaaaggattaccagttctaaccagcctgggctatacagtataaaaagaaaaagaaactcatacacatgaacacgcacacactacacacacacattctacagcgttcgtaatattgtaagagttaaatacttttcttacaagttagcagctcactctgcatctctgtccacagcgggatcagggtctatgcaggggccacaaactcctcagtcaaccagcagttctatggcagaaggaggagacctgaagccaccaactccagcatccacaccacatagtcaaattccccccttaccaggcatgaggtaaggaatgatcaggaacgctgagtgtctctgggggtgaaacttgggtaacccaagggcagttcatccctctgctcactcaccccacctgtggctcccgtggttcttggcttagctgagctctgtgggaggcttcattagttttcctcactctggagcaggagcaactcagtcggaatccaggatgcctttcctgatggaagtgaccccacattccagaagcggaattccatgactccaaaccctgggtaccagcccagtatgaatacctctgacatgatggggcgcatgtcctatgagccaaataaggatccttatggcagcatgaggaaaggtaactgactgctggcttatgcttgtggagtttgagtggcttggtggtgttgctgaggtagcctctgaaatgcttctgtgtcacccctcaccatacccttcccttctccctgcctgccttccctctttccttcctggtgcagtgctagaggttaaagaaagctagggtatcacgctaggcaaacatcatcccactgagccaccaacctctttcccccaccccacgccccacccttcttttctctctcaaccttgttttacttagctactcattctctactcagcctgtcattagagaaacaggaagaaaccgtgctctgtagagaacatggaaccgtggggtagggatgtgtagactgcagagcctgccaacatgctggttttctcactcattgccttcttttctgccctcagcgccaggaagtgatcccttcatgtcctcagggcagggccccaatggcgggatgggtgatccctacagccgtgctgctggccctgggctgggaagtgtggcgatgggaccacggcagcactatccctatggaggtccttacgacagagtgaggtgagccctgccccggccctgcccaactcttgctaccctgaagctatagaccatgctcaattcccttctctaattgtgtttaggacggagcctggaatcgggcctgaaggaaatatgggcactggagcccctcagccaaatctcatgccttccaccccagattcggggatgtattctcctagccgctaccccccgcagcagcagcagcaacagcagcaacagcagcaacagcaacggtgagtaaatcctggttcctctgtctgtgtttctcaggttttgtgattctccaccttgaacctttttgttttctgcagacatgattcctatggcaatcaattctctacccaaggcaccccttccagcagccccttccccagccagcagaccacaatgtatcagcagcagcagcaggtaaggaaggcagttggggatctgctggcacacccctagaaagcaggaagcaaccaagagtaataggtagcgggctacaaagttcactttggctactcggtgggtattcctctacccggccaggcagttctacatagacagtcacatgccttccttgtttatctcttctaaaagggctagaaacagagtctgtattgatttttgatgttttacatatttttctacttgaaaggagagctttagaagataaaatagttctctagcaatagtttctgttgctctcagaaacagcttcaaaagataatttacaaaagtgtttgctttcttggcatctgtcctatatctcagaggggcaaaagaacaatgaattaatatctaatgagtggaagnnnnnnnnnnnnnnnnnnnncccctagaaagcaggaagcaaccaagagtaataggtagcgggctacaaagttcactttggctactcggtgggtattcctctacccggccaggcagttctacatagacagtcacatgccttccttgtttatctcttctaaaagggctagaaacagagtctgtattgatttttgatgttttacatatttttctacttgaaaggagagctttagaagataaaatagttctctagcaatagtttctgttgctctcagaaacagcttcaaaagataatttacgggggctggtgagatggctcagcggttaagagcactgactgctcttccaaaggtcccgagttcgaatcccagcaaccacatggtggctcacaaccatccataatgagatctgacgccctcttctagtgtgtctgaagacaactacagtgtacttacatataataaataaatctttaaaaaaaaaaaaaaaaaaagataatttacaaaagtgtttgctttcttggcatctgtcctatatctcagaggggcaaaagaaaaatgaattaatatctaatgagtggaagccatccatggttcttgtgagttttgtgtgactcggtacacagtattaatctcccctttgcgttctctgttttagaattataagaggccaatggatggcacatatggcccccctgccaagcggcatgaaggggagatgtacagtgtgccgtacagcgctgggcaaggccagcctcaacagcagcagttgcctgcagctcagtcccagcctgccagccagccacaagctgcccagccttcccctcagcaggacgtgtacaaccagtacagcaatgcctaccctgcctccgccaccgctgctactgatcgccgaccagcaggcggcccccagaaccaatttccattccagtttggccgagaccgagtctctgcacctcctggttccagtgcccagcagaacatgccaccacaaatgatgggtgggcccatacaggcatcagctgaggttgctcagcagggcaccatgtggcaggggcgaaatgacatgacctacaattatgccaacaggcagaacacaggctctgccacccagggccctgcgtatcatggtgtgaaccgaacagatgaaatgctccacacagatcagagggccaaccatgaaggcccatggccttcccatggcacacgccagcctccgtatggtccttcagcccctgttccccccatgacaaggccccctccatctaactaccagcccccaccaagcatgccgaatcacattcctcaggtatccagccccgctcccctcccccggcccatggagaaccgtacttctcctagcaagtctccattcctgcactctgggatgaaaatgcaaaaggcgggtccaccggtgcctgcttcgcacatagcgcctacccctgtgcagccgcctatgattcggcgggatatcaccttcccacctggctctgtagaggccactcagcctgtgttgaagcagagaaggcggctcacaatgaaagacattggtaaggatacctccctgattgggtggctcaatctacccctttccatctttcacatggttccctccatcccaatattctggatgtggttaaatctggcacagtatttactaaaagaaagccaaagaatttggaggatggaagaaataagctgatttcaggtttttcttcaaggctctgtctgccatatgctggtgccctagacagcttagaagcaatgaagtcagactagcctgactaatggaccagccttgggggtgcctctagccagctggggcttggtggatggacaacacagaggtttatttcaggaaccccggaggcatggcgggtaatgatgtccctcaagtccgggctcctggcagagagcacgtgggcgttagacaccattaacattctactgtatgatgacaacagcattatgaccttcaacctcagccaggtgagtacaggtgtctgggcaaggtgagggggtactgttgatgtagataacactatggcacagcaggaacgaagccattcttggcccttgtcactgtgctggagaccttctgtgcttgcagtgttcgtgccttgacccccaccccaccccccacgtggggttggaattggaagcagtgctggcaactcagttgttgctgctttcaagacagggtttctctttagtgagctggttgtcctgtcagagttttatttgggagaaagggtttcattgttctttagggtctgttgttttgagacagggttacaacgttacctgtatggaggcagccatagagtgtgtggtgctgcttctgccctcttctctataaagtgccattctcagcgggggctttgctttccttttatgagagagggtctctccctatcccaacccctcagtgctggaattaaaggttctgcacagctgggggaaactttgttactggtaaggattaagcaagatggctcagtgtgcaaaggcacttggcactggagcctgtgttcagttcccatacatcaaaagatagaaagatgacttcaaaaatgatctcccctcatcccataatgcttcctctcattcgtttattaattttttttcaaggcagcatttctgtgtttagccctggctatcctggaagtcctgtggagcaggctagcctcaaacttgagatctccctgccttctaagtgctgagataaaggcgtgtgcccagaccaccgtgctgctttcatttcttttctttctttttcttcttgttttctttaattaaaaagaacttcaggactggaaactgggattgtcatttagatggtaaagtgcttccctaacatggtcatggcccagagatgggcttatattatagtaccatataaatgaggtgtagtggtgcacacataatcctagcacttgagaggtgtaggtaggagatcagaagttcaaagtcatctttggttatatagatagtttaggaccaacgtgggcacatgagatcttgtatgttaaaagaaatatgtattactattattatggtgatggcagacttacagaagatagaccctgggggacatatttccactgcctatgtcactattgctgatttgttgatggaggagccgactaaaggatgcttcgttggattactgtgctcttgcttaattactgttttgtttcacgtcatttttataggagagttgagtaaatgggctcagagtcatcttggttttctgaaacactttcactactgtatccctgactggcttagaacatactttgtgtgggtcctgaacacagaaatccacctgcctctgcctcccgagtgctgggtcaagtgcatgtactagcatgtccaggtcgtagtctttttgttttgttttgttttgttttttgtgtgtgtagtttttttttttgttttgttttttgtttttttttttttgtttttgttttttgagacagggtttctctgtgtagccctggctgtcctggaactcactttgtagaccaggctgacctcgaactcagaaatccgcctgcctctgcctcccaagtgctgggattaaaggcgtgcaccctctccctggtctcccaaaacctcagattccgttttttgaccatagctggtcagcacatttccattctgtgatagtcttgtccaccagaaagtaagggatagattttgctcacttcctatataccagaaccaactttataatgctcagggatttatcaccatttcatacaactaatttctgggaaaagcagtattcaaaccaagatctttacaactctaataatgaggtggatggatggatttcgagcaagtgttagtgtgactagaaactagtggggaatagacgagcatctgttgacagtgcagtgcagtccttctctagctcgtgttggaaaggggtcatcccagcctgctgaagacctggcccccatgtggccatgagataacagaggccactttaggtaaacgctggcagtgaccagatgcctagtgaaaaatacaacacacgctcagaaagaagtgttcgaagaggttgggtgtaactgtcaggggaggtatagattgtagctcacatttctgtcttgctggaagcaggcttatgtgaccattgtttgggtcagagaaaaattcttgcccttctttacgaaggaaatggttagagaactgtaaagagcggtgtggtggggaagcctttagcatgggacagctctgcctgggagagaaaggagggggaggagaggggggaggggagagagaataaatatgaattggataagatcttgggaactcctgtcaagaattcttcccttcctttttttctctctttcagctcccaggcttgctagagctccttgtggaatatttccgtagatgcctaattgaaatctttggcattttaaaggagtatgaggtaggggacccaggacagagaacattactagaccctgggagattcaccaaggtgtatagtccagcccatacagaggaagaagaggaagaacaccttgatcctaaactggaggaggaagaggaagaaggggttggaaatgatgaggagatggcctttttgggcaaggacaagccatcttcagagaataatgaggagaagctagtcagtaagtttgacaagcttccggtaaagatcgtgcagaggaatgacccatttgtggtggactgctcagataagcttgggcgcgtgcaggagtttgacagtggcctgctacactggcggattggtggtggggataccactgagcatatccagacccactttgagagcaagatagagctgctgccttcccggccttatgtgccctgcccaacgccccctcggaaacacctcacaacagtagagggcacaccagggacaacggagcaggagggccccccgcccgatggccttccagagaaaaggatcacagccaccatggatgacatgttgtctacccggtctagcacattgactgatgagggggcaaagagtgcagaggccaccaaggaaagcagcaagtttccatttggcattagcccagcacagagccaccggaacatcaaaattttagaggatgaaccccatagtaaggatgagaccccactgtgtacccttctggactggcaggattcccttgctaagcgctgtgtctgtgtctccaataccatccggagcctgtcgtttgtgccaggcaacgactttgagatgtccaaacacccagggctgctgcttatcctgggcaagctgatcctgctgcaccacaagcacccagagcggaagcaggcaccactaacttatgagaaggaggaggaacaggaccaaggggtgagctgtgacaaagtggagtggtggtgggactgcttggagatgctccgagaaaacacgctggtcaccctcgccaacatctcggggcaattggacctatccccatatcctgagagcatctgcctgcctgtcctggacggactcctacactgggcagtttgcccttcagctgaagcccaggaccccttctcaaccctaggccccaatgccgtcctctccccccagagattggtcttggaaaccctcagcaaactcagcatccaggacaacaatgtggacctgatcctggccactcccccttttagccgcctggagaagttgtatagtaccatggtgcgcttcctcagtgaccgaaagaacccagtgtgccgggagatggccgtggtactgctggcaaatctggcccagggggacagcctggcagcccgggccattgcagtgcagaagggcagcatcggcaacctcctgggtttcctggaggacagccttgctgccacacagttccagcagagccaggcaagcctcctgcatatgcagaatccaccctttgaaccaactagtgtggacatgatgcggcgggctgcccgagcactgcttgccctggccaaggtggatgagaaccactcagagttcactctgtatgagtcacggctgttggacatctccgtgtcaccactgatgaactcattggtttcacaagtcatttgtgatgtactgtttttgattggccagtcatgacagccgtgggacacctcccctccccgtgtgtgtgtgagtgtgtggagaacttagaaactgactgttgccctttatttatgcaaaaccacctcagaatccagtttaccctgtgctgtccagcttctcccttgggaaagcctctcctgttctctctcctccccaccctcactccctcacacctttctgttccccatcctcacctgcttccctcaggaccccaccctatttgaaaagacaaagctctgcctacatagaagacttttttattttaaccaaagttactgttgtttacagtgagtttggggaaaaaaatggctttcccagtccttgcatcaacgggatgccacatttcataactgtttttaatggttaaaaaaaaaaaaaaaaaaaggaaaaaaaatacaaaaaaaccctgaaggacaaaggtgactgctgagctgtgtggtttgtcgctgtccattcacaatctcgcaggagccgagaagttcgcagttgtgagcagaccctgttcactggagaggcctgtgcagtagagtgtagatcctttcatgtactgtactgtacacctgatactgtaaacatactgtaataataatgtctcacatggaaacgagagaagacgctgggtcagcagcaagctgtagtttttaaaaatgtttttagttaaatgttgaggagaaaaaaaatggctttccccccaaagtatcctgtgtgaacctacaacgccctgacctctttctctcctccttgattgtatgaatagccctgagatcacctcttagacctggttttaacctttagctgcagcggctgcgctgccacgtgtgtatatatatgatgttgtacattgcacatacccttgaatctccacagtttggtccccttcccagctacccctttatagtatggcgagttaacaagttggtgacctgcacaaagcgagacacagctatttaatctcttgccagacattgcccctcttggtgcagtgctctacaggtctctgtaaaaagcccttgctgtctcagcagccaatcaacttacagtttatttttttctgggtttttgttttgttttgtttcatttctaatcgaggtgtgaaaaagttctaggttcagttgaagttcctgatgaagaaacacaattgagattttttcagtgataaaatctgcatatttgtatttcaacaatgtagctaaaaacttgatgtaaattcctccttttttttccttttttggcttaatgaatatcatttattcagtatgaaatctttatactatatgttccacgtgttaagaataaatgtacattaaatcttggtaagactttgtgaagctttttttattttcaaattatttaaaagctttgcctgtggctagaaagctagctagctcttcagttttaggaggactcatgcttgaacctgacccctctgactagggcacttgtgcttgcatccacatggacagaggatacagcaggacactcacacgcaaacacacaaacagttcaaactacatcttcaaccaagactggagaaatggctcactgatgaacagcttttcataggtccgcaggcttagccctcactctgtggcttatagccatctgtcttaactccagctccagggatgctccagcacccccagatggagcatgatctgaccccggtggctccatgtacacaagacagtgcacaaacataaaactaaacaaaatttttagccaggctagccaaagttctgcctcaataaaataatcttttaaaaggaatagatgctgggcatagcagcacactcctttaatcccagcacttaagaagcagagagagtttgaggctagcctggtctccttagttccgggtacagctatatagtgagtctctctgtctcagaagtaatgaaaacttgaccttctgtaggggatgaagaatcctgttctcttgaacacccctaatgtgctctcctgagtagtggttgacaaggaggaatagcctttacctagaagcagtttctgtctattggatctgcaatctggcattctcttgacaccagatcagcatcactactggaagcttgaatatatatatttttttcttatatatacattttttccttatatatgaaactggtctggaagcctatttttctcagtaaatggcaagtccaacctttggccagaaaaattccttaactcatttgattgttgtttttgtgatttttgatacaaggtctcgctgtagttcagtttgttatagaactcactttgtagaaacaggcaggcctgaacctcacaagaggtcagtgagatctgcctgctcctgcctcctgagattaaatgcatgcagtttcacaccagacccttgacacttctacatccagttgtcactcttgagggaatcctgcgcagtacaactactgccaccagaagttcatcactgtcgcatctttctcaatttcttaaaatctccctcccatcctgtgctttgcatgggtacaagcgtatacaagcacagcaagccattaaaagtcagtgcaaactcctacaatgctcagtgtgaaaaatcgagctcctgggtatagtgacatacaccttgagtcccagaactcaggcagaggccagcctgtctagacttacaggtcaactttgtctatatagtctcttaaaaaaaaaaggggggggggggcgggataaaatccaaagcctttatgtcatggacttctttgtcttgtcattcgtctggctggctcccaccctcttgcattctactgtctaaggagtttccactttggggttgttctgtatattcctctaccacagcagaaggctctcatcagataactgcacacatagctcgcattatcatctcaccttgttcacgtgtcagctctgcggtagcacctcatggcgcctaacacgcccaagagttagggctctaaaaacagagggagctagcaagatggctcaagttctcaaggtacttcctgcccaacctaatgacttgagttcacaccccagttcaccaagacccatatgctaggatagaaccctcttatacttctgaatttttccctctgaccttcacttgtgcatgagtacaccctgggatacatggtcgtatattcccgatcacatctattttgagacaagggctcgtggagctcaggcctcaaacttcctatgtagcctggtattcgccactctattttaaattgcagtctgaggtggtttaagggttaaggatccaaaagggaatattggatttcctcaagttacaggcagttgtgagctgtccagcatagatactgagggccaataatgaccaggttcagttcccagcacctccgtggctgcttactaatatttctaactgcagtcccagggggtcttatgcccttttctggcctccatgggcactaaacacaaatgcaggcaaaaacactcatacacatttttttttaactcccttctctccctcccgtctcgctttcctttctacccagtttcatacttccctgccatcttccactgaaatataaacagagcttgtgaggctcgctgttgcatccctttctgacatacatcctagcatactgcatcaacttagtaataactagctgagtggcatcatagcaaagaagcagttgctttttagatcagtcttgtaatacccctttctgtgcatcccttctatcattccttcctttaggaaagtggagaaaattaaggttcagattttttttttctggaataatcagagatactaacaaaaggtgagtgtagatacttagtgagacctgagaccgtttttttgttttgttttgtttttttatctgttacacacctgtcagctggacaaaatagatggcaaatagtcctacaacacccttgtgtctctgaggtaagtgcaaaacaaggccctctgaccaaggtccaagtttttcccagcaagtggcacaccacacttactccatccacagattgccactgggaggttggtttctattgtctttggcatgagacaaaagtgtctcaagaattttagtcaagtgctcgtcagacttgatgtagctgttaacagagtcgtcaggggcaagcatgggaaatgagcacttagtgaagaagaaatctttgacaaccaagatgctttctcattttaaagggggcgaggaaggggcttttcgtatcttacttagtaattgcagtagctatttttgttatggagctctcaagctcccacttcccagtctagaaagtgcatttctgggctgtgtgtggagcattacctaggagttctgtttcctgggctcctttcatctgctctctggcaattctgggggccgcctagcccagtctccagtttctgacgggagccactgggagagaggactgctgaccagcgagctgtgagtaattggcttttgagaagtaaatagaacccggccagtagagaacccggggtgtggctagtagttcttttcccaggctcctccctcccacccccacccccaaatgaccttaaccttctttcagagctggacagcagccaagccctgcctaaacaatactctgaagctcattggctcctttgcttggcagccaccgccacccccaaggggctaaggccttcccaccgtgtctcagtgaagtcaagtttcctaactgttcaaaggcaaaccctaaagggagggtttcagtaacaggagcatagattttgaagcatccatgtttggtacctgcacctggagacagggaagattcttagtactctgcagtgggtgaacatcttcaagtgacatgacagaggtcacacatggatcctttgggtaaaggtctgagaccctaattggtgtcatcctgatgtcaggatggctacatataaacaccacccttggaaactatcagatgatttttttatgatgagtgaagagaagtgtcaagttctggaaaggcatagcttctgttcatcacgagccttagactaaacccgctcactgtagatggtaaggaacccgagggtggccaggcagtggtggctcaagtcttcaatcccagcacccagtaggcagaggcaggcagatctctgagttccaggccagtttaaggtatacagtaagactcttctttttttgttgttttggttttggttttgatttgggttggttttggtttttcaagacagggtttctctgtatagccctcgctgtcctggatctcactttgtagaccaagctggcctcgaactcagaaattcgcctgcctatgcctcacaagtactgagattaaaggtgtgcaccaccactgcccagctactcttcttaataatatattaattgagccaacttggaaagctgggacctgacttcaagacatttgtgaccttaggcaaggcacttctctttagcgagccttaattcccttgtctgtaaaatatggcatcaagttaaaaatcaagtgaaactaatttatacagcagtctaggacaaatggtctgtctcatactccctgtccagactggcaagtgctctaacacttaggtgaaagattgccctggtcttccattatatacaggggctaattttccaaaagaggaaaacaaatgtcatgggcaggatgaagcagatggtgacaacatgcaaggcacagacagaccagggtggtggatgccggtgggtggatagagtttgtccctgaagccaaagggtagcctgctgtgataatgtttcgggcaagaagatcagcaaatgcagaggcaggcaaatttcaaggacaaaaatggtgtcatcgtcttgaatgttaggtttctagaacgcgcattgcttgcacaaatcagcttagggttctgttggtgaacctcgcctgatggtgtagggtatttccttcctaatgccaggtggaagatgtactttcaggagcccggggacatggctggctgtcttccttgccttcctggtggctcagcaggctccattttttaactgtagactctaaaggcaaactgcttagcactgtctctctcacctctcacagccttggagccctacacacccctcccatcccatcctgccaccttccagtccaaaaagccagagtgtcagggctttgagagcacaagattcagtttcctttttttttttttttcttctgtaggagaagaagccagaaaatgaaacgggaaacagcagaagagaagggggttgggcggctgggaagggaagggaagggaaggaaggagagattgcagccaagtgcgactgaagatctagtcaaagttctacctcctaaggaagggtgtttcagcaaacactctcacttctcacaaaaggacccctgccttttttacaagcagattctgcagggattctttattggacagacagaacctcgagcttgcatgccattttcccctgtgaattcacgaagcaaggatggttctttaaggtcagggtgctgcgaagactgtaagaaagtcaagtcacaacctcgggccctagtcacaagtgtgcctagagaggcactgacatttcactcacaggactggcaacaaatgctttcgggggggcggggggggaggaaaaatgactttggaaactcctgttttctctttaccagtcattaaattatacattatccaccttacacgcaaacatccaaggggcagttgacatcccagggcctgagacgatagacagacacagcttctggcccccaccgaactgatgaaggctagtttttttttttttttttttttttttttgcttggagagatagagacccatctccttgttcccacccacatttgtggctgttgcagaagataaacccctccctcagccagggctgtggccagaggttaacctagacccaagctacgtttgagaggacagataactgaaaccacacaaggctttggaatcctgagaaacgagaaatccaccaacggagaaggatttactatctgtttcctctaaggcgggtgcaaagttgttctaacagtttccgttagttacaggggtaccaactggccgctcctccccaacaggcggttttgttcaattagcttcctttttttttttttttttttttttctttttcttttttttggcgccagttcctgcgacagaaactgcttgagggagaatcctcgggggtgttctctgaggtttccttcctcgtctcatacagtcatctgaggtgggacagaggactgtcgcagggcagaggtccttcattgccaggaggggaaaggcagggggaattcccctactttcttctcacccaggcgcagggtaccgctgcttgccacaaaaaccccaagaaggctttcttttgcctattcatattgtctatcgtgtgccaggtcctgtgctgagctggggtggcggaacaccgagagaacgcgtggctctggggcagcgcccgggtccagcctcggctcacaccgggaagtcagaggctgctcacggcaggggactggggtgagagccccgacccgggagcgcagcgcccgcgcacaaactgctggcgagtcaagaggcctactcctcaggtgtcaccacgccgggaaggtgcgactcaccgccgccgcctcggcccccgccctagctggggtcaacatggccgccgaggaggggggcggggcgctccgagtccgggcaggagcggggcggggccgccgtcggccgagccggcgcgcaggcgcggcacggacgggacccggatggaggcgctgaagttggagctccgcgggggtggtctggacgcgcgggcgcggaggatccggcgccagctctgcaactctggagtcctccggggagggaagctgtcaaacgcaggccgagagaaattaggcggaggctgtagagaagcgaggagccccgcccctccgccatagcagcctccggcgccgcctcttcctttgcagcctccggccctcgtctgcttccggccccgttgcctggcccggccccgcgattcccccgggacgaagccctgggccgtggctcccttggggtgagggtcactgtcccgtcctgggtaggaactgtgtccgaaaagagcaggctggaacgggctcccagtatggcagggcttagcagaaggaggcggctcgctccacgttgcctctgggtcataacgcagcacccatttgagagtattagccttccgcagaaaatccaggactccagttcaacagatctttcccagttagggcccatcaccataagcttccagcaacaacatgtgctacagttggagaaagttctgggctaagccttggatgtcctggctggacaaggaatgcataccctttgtttatggcaaaaagctcccctgactgtggacataggttttagaaagcagtgcgtgaggagctttaagtggtgggcgtgtcacttggctccagtgagcctcagttttcacatccataaaatggcgatggtaattacacagtcttactggtgtctaatgagatctctgaagcctatttcacgggtaaattaaagaaaaatgaaactggttggtcctaagcatccggccagttaagagtctgatttggcaaggggcttctttcaaaggggtgttggcaaaatagctagagagataattgactgtcttgattttactttgtttaacttgagtgtgggtgggttgcatctcctgtggccactgatgccagagtttgaaagagggaaggactgagaatcaagatgcagaggtggattcagtacttttcctctctctgcctcctttgtgcgtgcggattggaggccagggaaaagagagggagggagggagagattgattgagtttgagttgggtgtgcatgtttctgtgatttatttgggtttagtgaatccagtgttggagatatcgtgggtagtcagaaaatgctgtttcctgcggcttaactttaaactgaattgtcctaaataaaccgacatggagttgggaggtgagggggcctccttttctcccggtctcctggtgatgaagtaagcagcaggtgccccctcgtgccgaggatggggtactgccgctattaaccagtcttgttcccttggcggagaattttttcttttctcccatgctttctgtgactttgtcatttgctttttttttttttaattctattttatgtgcatatgtttatgtatatatgtgtggagctacaggtgcgccttggcacacctaagtgaggacagagaacaactttgtgggagtgtcttctcatcttcagcctatgggtcactgtagtggcaagtgcctttgcccgctgggccatcttgctttttaacctgaaacacgatgggagaaatgcttggaccagtgatcttagttctagcgtcagaaaacttgacgattctctatcctgtccttgctacttcgtgcacttggagaacagatgtctgtttacatgctgggtcctgggatataatagagttaggagacaaagcccctgtcctcataaggaacagataggaagataaagatggcagggcatgaggcagtgagaatatagggctgtctggtgggatcagaaaattccagaaagcaagtgtagcctaaaagtttagagggtgttagccacgtgagagaagaaagacggggctcttcctctccttgcttaaacacagtaagagctgtgactgctattaaattgtgtttttaaagaaatgccttgatgtgcattctgtgcctcagaatggcactgggtttttgtatgagtttgccgccactcctgcggagatgggaaatggctgtttaccctgtcccgagtggtagactctgtcttccccgagtttgttttagcagtgggagctggccggagtcctgctgagcagtggttttcttttccttctccacttaatttaacagaccagctgaacacacatcagagagtgaagctggcatgtgtagtaattacgggcttctaggatggttctgtgccccactttggggactctggtttgggaattcgcttattattctgggcaaaagggaaaatggcacaggcaaataatagcagccacggcattgacttgtggggtaccttttagttcagtccattttaccatgatgacgagttggtgagatcggaggggtggagaatagtgtcctggtttacacacacaggactgactctcagagggactaagggagaacttgcaagtgacaaaattgggctttgaacccgggtctttgagtcctacataaaagcatttcaacgggcttttaaaagttctgtgagcttagctttccagctttgtgcttatctgtgtgttacttactgactggcctagagtgcttcaagagtgacacccagtggtccagctgccttcaggatagtcttcccaccgggaagccaggtggctctgtttgccatggccatgttgaagtgggtggttcccctggagaaaatgttattgatttgcttttagcctgtgtgtgaccttttctcccttgggtgttagaatttagaagccggaggaagctcagtcctggtggtgagagagaggatgggactcctggacccatcccagaaagaggtgctgagattcgcagtaaactgccgcatcctgactctagtgctacaggtcagtctctgatcctttcccctgagcatgcgcttgccatgtgactgagctagcaatggagaataagtggtcctcatctccctacttcctggtgtgcctcagcatgtgggtgatcacatacaggctgagacctggaacctgagaagtgggcaagagccttaaactgtgtatcgatcatgtgtcttacacgtgaagcagcaggttaaatgatttgtccaaagctaaagacccctagctccctgcccaaagtagagattttcctaacagccttagctatctgatggtcttgccaaccgagatacttttaaggtgtgtgtgaccgttcacagtgtcacacagggctctttttttcttggagttcaagttctgtgctacttgagtgggagagaggagccactttcaagttctgagaccatctatgaatatccacagtcctgagtccctctccttgctgtctccagcattcagttctcagtctttttgcccttttaccaacccctcccccaggctgccttgatacatactttaatgaaagttgcacatatgtgaattatttggtgcctagtgtactgctctgtacttgaagtcccaagtatatgactgtgaacagaggtcaccaccctagagttgctgagttgacataatgatggtgtctatgtcactcgtacctgggactcctagctgcttcctttgtagaaaccttttctgtccccctccgcccca

SEQ ID NO: 1513 - DNA, 7310 bp, Mus musculus
cacccccaccctcaaccaactgctcacgtcgcccagctcggcccgtggctaccagggctaccccgggggcgactacggcggcgggccccaggacgggggcgcgggcaaaggcccggcggacatggcctcgcagtgctggggggctgcggcggcggcggcggcggcggcagcggccgtctcgggaggggcccaacaaaggagccaccacgcgcccatgagccccgggagcagcggcggcggggggcagccgctcgcccggacccctcagtcatccagtccaatggatcagatgggaaagatgagacctcagccgtatggtgggactaacccatactcgcaacaacagggacctccttcaggaccgcaacaaggacatgggtacccagggcagccatatgggtcccagactccacagcggtaccccatgaccatgcagggccgggctcagagtgccatgggcagcctctcttatgcacagcagattccaccttatggccagcaaggccccagtgcgtatggccagcagggccagactccatactataaccagcaaagtcctcatccccagcagcagccaccttacgcccagcaaccaccatcccagacccctcatgcccagccttcgtatcagcagcagccgcagactcagcaaccacagcttcagtcctctcagcctccatattcccagcagccatcccagcctccacatcagcagtccccaactccatatccctcccagcagtccaccacacaacagcatccccagagccagcccccctactcacaaccacaggcacagtctccctaccagcagcagcaacctcagcagccagcatcctcgtcgctctcccagcaggccgcatatcctcagccccagcctcagcagtcccagcaaactgcctattcccagcagcgcttccctccaccacaggagctttctcaagattcatttgggtctcaggcatcctcagccccctcaatgacctccagtaagggagggcaagaagatatgaacctgagtcttcagtcaaggccctccagcttgcctgatctgtctggttcaatcgatgatctccccatggggacagaaggagctctgagtcctggcgtgagcacatcagggatttccagcagccaaggagagcagagcaatccagctcagtctcccttttctcctcacacctcccctcacctgcctggcatccgaggcccgtccccgtcccctgttggctctcctgccagtgtcgcgcagtctcgctcaggaccactctcgcctgctgcagtgccaggcaaccagatgccacctcggccacccagtggccagtcagacagcatcatgcacccttccatgaaccaatcaagcattgcccaagatcgaggttatatgcagaggaacccccagatgccccagtacacttcccctcagcctggctcggccttatccccacgtcagccgtctggaggacagatgcactcgggcgtgggctcctaccagcagaactccatggggagctacggcccccagggcagtcagtatggcccacaaggaggctatcctaggcagcctaactataatgccttgcccaacgccaactaccccaatgcaggcatggccggaagtatgaaccctatgggtgctggaggtcagatgcatgggcagcctggaatcccaccttacggcacactccctccagggagaatggctcatgcgtctatgggcaacaggccctatggccctaatatggccaatatgccacctcaggttgggtcagggatgtgtcctccaccagggggaatgaacaggaaaactcaagagtctgctgttgccatgcatgttgctgccaactctatccaaaacaggccaccaggctacccaaatatgaatcaagggggcatgatgggaactggacctccctatggacaggggatcaatagtatggctggcatgatcaaccctcagggacccccatatcctatgggtggaaccatggccaacaattcagcagggatggcagccagcccagagatgatgggccttggggatgttaagttaactcccgccacaaaaatgaacaacaaggcagatggaacacccaagacagaatccaaatctaagaaatccagttcttctaccaccaccaatgagaagatcaccaaattgtatgagttgggtggtgagcccgagaggaagatgtgggtggaccggtacctggccttcacagaggagaaggccatgggcatgacaaatctgcctgctgtggggaggaagcctctggacctctatcgcctctatgtgtctgtgaaggagattggtgggttgactcaggtcaacaagaacaaaaaatggcgggaacttgcaaccaacctcaatgtgggtacatcaagcagtgctgccagctcactgaaaaagcagtatatccaatgtctctatgcctttgagtgcaagatcgagcgtggagaagaccctccccccgatatcttcgcagctgctgactccaagaagtcccaacccaagatccagcccccctctcctgcgggatcagggtctatgcaggggccacaaactcctcagtcaaccagcagttctatggcagaaggaggagacctgaagccaccaactccagcatccacaccacatagtcaaattccccccttaccaggcatgaggagcaactcagtcggaatccaggatgcctttcctgatggaagtgaccccacattccagaagcggaattccatgactccaaaccctgggtaccagcccagtatgaatacctctgacatgatggggcgcatgtcctatgagccaaataaggatccttatggcagcatgaggaaagcgccaggaagtgatcccttcatgtcctcagggcagggccccaatggcgggatgggtgatccctacagccgtgctgctggccctgggctgggaagtgtggcgatgggaccacggcagcactatccctatggaggtccttacgacagagtgaggacggagcctggaatcgggcctgaaggaaatatgggcactggagcccctcagccaaatctcatgccttccaccccagattcggggatgtattctcctagccgctaccccccgcagcagcagcagcaacagcagcaacagcagcaacagcaacgacatgattcctatggcaatcaattctctacccaaggcaccccttccagcagccccttccccagccagcagaccacaatgtatcagcagcagcagcagaattataagaggccaatggatggcacatatggcccccctgccaagcggcatgaaggggagatgtacagtgtgccgtacagcgctgggcaaggccagcctcaacagcagcagttgcctgcagctcagtcccagcctgccagccagccacaagctgcccagccttcccctcagcaggacgtgtacaaccagtacagcaatgcctaccctgcctccgccaccgctgctactgatcgccgaccagcaggcggcccccagaaccaatttccattccagtttggccgagaccgagtctctgcacctcctggttccagtgcccagcagaacatgccaccacaaatgatgggtgggcccatacaggcatcagctgaggttgctcagcagggcaccatgtggcaggggcgaaatgacatgacctacaattatgccaacaggcagaacacaggctctgccacccagggccctgcgtatcatggtgtgaaccgaacagatgaaatgctccacacagatcagagggccaaccatgaaggcccatggccttcccatggcacacgccagcctccgtatggtccttcagcccctgttccccccatgacaaggccccctccatctaactaccagcccccaccaagcatgccgaatcacattcctcaggtatccagccccgctcccctcccccggcccatggagaaccgtacttctcctagcaagtctccattcctgcactctgggatgaaaatgcaaaaggcgggtccaccggtgcctgcttcgcacatagcgcctacccctgtgcagccgcctatgattcggcgggatatcaccttcccacctggctctgtagaggccactcagcctgtgttgaagcagagaaggcggctcacaatgaaagacattggaaccccggaggcatggcgggtaatgatgtccctcaagtccgggctcctggcagagagcacgtgggcgttagacaccattaacattctactgtatgatgacaacagcattatgaccttcaacctcagccagctcccaggcttgctagagctccttgtggaatatttccgtagatgcctaattgaaatctttggcattttaaaggagtatgaggtaggggacccaggacagagaacattactagaccctgggagattcaccaaggtgtatagtccagcccatacagaggaagaagaggaagaacaccttgatcctaaactggaggaggaagaggaagaaggggttggaaatgatgaggagatggcctttttgggcaaggacaagccatcttcagagaataatgaggagaagctagtcagtaagtttgacaagcttccggtaaagatcgtgcagaggaatgacccatttgtggtggactgctcagataagcttgggcgcgtgcaggagtttgacagtggcctgctacactggcggattggtggtggggataccactgagcatatccagacccactttgagagcaagatagagctgctgccttcccggccttatgtgccctgcccaacgccccctcggaaacacctcacaacagtagagggcacaccagggacaacggagcaggagggccccccgcccgatggccttccagagaaaaggatcacagccaccatggatgacatgttgtctacccggtctagcacattgactgatgagggggcaaagagtgcagaggccaccaaggaaagcagcaagtttccatttggcattagcccagcacagagccaccggaacatcaaaattttagaggatgaaccccatagtaaggatgagaccccactgtgtacccttctggactggcaggattcccttgctaagcgctgtgtctgtgtctccaataccatccggagcctgtcgtttgtgccaggcaacgactttgagatgtccaaacacccagggctgctgcttatcctgggcaagctgatcctgctgcaccacaagcacccagagcggaagcaggcaccactaacttatgagaaggaggaggaacaggaccaaggggtgagctgtgacaaagtggagtggtggtgggactgcttggagatgctccgagaaaacacgctggtcaccctcgccaacatctcggggcaattggacctatccccatatcctgagagcatctgcctgcctgtcctggacggactcctacactgggcagtttgcccttcagctgaagcccaggaccccttctcaaccctaggccccaatgccgtcctctccccccagagattggtcttggaaaccctcagcaaactcagcatccaggacaacaatgtggacctgatcctggccactcccccttttagccgcctggagaagttgtatagtaccatggtgcgcttcctcagtgaccgaaagaacccagtgtgccgggagatggccgtggtactgctggcaaatctggcccagggggacagcctggcagcccgggccattgcagtgcagaagggcagcatcggcaacctcctgggtttcctggaggacagccttgctgccacacagttccagcagagccaggcaagcctcctgcatatgcagaatccaccctttgaaccaactagtgtggacatgatgcggcgggctgcccgagcactgcttgccctggccaaggtggatgagaaccactcagagttcactctgtatgagtcacggctgttggacatctccgtgtcaccactgatgaactcattggtttcacaagtcatttgtgatgtactgtttttgattggccagtcatgacagccgtgggacacctcccctccccgtgtgtgtgtgagtgtgtggagaacttagaaactgactgttgccctttatttatgcaaaaccacctcagaatccagtttaccctgtgctgtccagcttctcccttgggaaagcctctcctgttctctctcctccccaccctcactccctcacacctttctgttccccatcctcacctgcttccctcaggaccccaccctatttgaaaagacaaagctctgcctacatagaagacttttttattttaaccaaagttactgttgtttacagtgagtttggggaaaaaaatggctttcccagtccttgcatcaacgggatgccacatttcataactgtttttaatggttaaaaaaaaaaaaaaaaaaaggaaaaaaaatacaaaaaaaccctgaaggacaaaggtgactgctgagctgtgtggtttgtcgctgtccattcacaatctcgcaggagccgagaagttcgcagttgtgagcagaccctgttcactggagaggcctgtgcagtagagtgtagatcctttcatgtactgtactgtacacctgatactgtaaacatactgtaataataatgtctcacatggaaacgagagaagacgctgggtcagcagcaagctgtagtttttaaaaatgtttttagttaaatgttgaggagaaaaaaaatggctttccccccaaagtatcctgtgtgaacctacaacgccctgacctctttctctcctccttgattgtatgaatagccctgagatcacctcttagacctggttttaacctttagctgcagcggctgcgctgccacgtgtgtatatatatgatgttgtacattgcacatacccttgaatctccacagtttggtccccttcccagctacccctttatagtatggcgagttaacaagttggtgacctgcacaaagcgagacacagctatttaatctcttgccagacattgcccctcttggtgcagtgctctacaggtctctgtaaaaagcccttgctgtctcagcagccaatcaacttacagtttatttttttctgggtttttgttttgttttgtttcatttctaatcgaggtgtgaaaaagttctaggttcagttgaagttcctgatgaagaaacacaattgagattttttcagtgataaaatctgcatatttgtatttcaacaatgtagctaaaaacttgatgtaaattcctccttttttttccttttttggcttaatgaatatcatttattcagtatgaaatctttatactatatgttccacgtgttaagaataaatgtacattaaatcttggt

SEQ ID NO: 1514 - protein, 1945 aa, Mus musculus
MASQCWGAAAAAAAAAAAVSGGAQQRSHHAPMSPGSSGGGGQPLARTPQSSSPMDQMGKMRPQPYGGTNPYSQQQGPPSGPQQGHGYPGQPYGSQTPQRYPMTMQGRAQSAMGSLSYAQQIPPYGQQGPSAYGQQGQTPYYNQQSPHPQQQPPYAQQPPSQTPHAQPSYQQQPQTQQPQLQSSQPPYSQQPSQPPHQQSPTPYPSQQSTTQQHPQSQPPYSQPQAQSPYQQQQPQQPASSSLSQQAAYPQPQPQQSQQTAYSQQRFPPPQELSQDSFGSQASSAPSMTSSKGGQEDMNLSLQSRPSSLPDLSGSIDDLPMGTEGALSPGVSTSGISSSQGEQSNPAQSPFSPHTSPHLPGIRGPSPSPVGSPASVAQSRSGPLSPAAVPGNQMPPRPPSGQSDSIMHPSMNQSSIAQDRGYMQRNPQMPQYTSPQPGSALSPRQPSGGQMHSGVGSYQQNSMGSYGPQGSQYGPQGGYPRQPNYNALPNANYPNAGMAGSMNPMGAGGQMHGQPGIPPYGTLPPGRMAHASMGNRPYGPNMANMPPQVGSGMCPPPGGMNRKTQESAVAMHVAANSIQNRPPGYPNMNQGGMMGTGPPYGQGINSMAGMINPQGPPYPMGGTMANNSAGMADEMMGLGDVKLTPATKMNNKADGTPKTESKSKKSSSSTTTNEKITKLYELGGEPERKMWVDRYLAFTEEKAMGMTNLPAVGRKPLDLYRLYVSVKEIGGLTQVNKNKKWRELATNLNVGTSSSAASSLKKQYIQCLYAFECKIERGEDPPPDIFAAADSKKSQPKIQPPSPAGSGSMQGPQTPQSTSSSMAEGGDLKPPTPASTPHSQIPPLPGMRSNSVGIQDAFPDGSDPTFQKRNSMTPNPGYQPSMNTSDMMGRMSYEPNKDPYGSMRKAPGSDPFMSSGQGPNGGMGDPYSRAAGPGLGSVAMGPRQHYPYGGPYDRVRTEPGIGPEGNMGTGAPQPNLMPSTPDSGMYSPSRYPPQQQQQQQQQQQQQRHDSYGNQFSTQGTPSSSPFPSQQTTMYQQQQQNYKRPMDGTYGPPAKRHEGEMYSVPYSAGQGQPQQQQLPAAQSQPASQPQAAQPSPQQDVYNQYSNAYPASATAATDRRPAGGPQNQFPFQFGRDRVSAPPGSSAQQNMPPQMMGGPIQASAEVAQQGTMWQGRNDMTYNYANRQNTGSATQGPAYHGVNRTDEMLHTDQRANHEGPWPSHGTRQPPYGPSAPVPPMWPPSNYQPPPSMPNHIPQVSSPAPLPRPMENRTSPSKSPFLHSGMKMQKAGPPVPASHIAPTPVQPPMIRRDITFPPGSVEATQPVLKQRRRLTMKDIGTPEAWRVMMSLKSGLLAESTWALDTINILLYDDNSIMTFNLSQLPGLLELLVEYFRRCLIEIFGILKEYEVGDPGQRTLLDPGRFTKVYSPAHTEEEEEEHLDPKLEEEEEEGVGNDEEMAFLGKDKPSSENNEEKLVSKFDKLPVKIVQRNDPFVVDCSDKLGRVQEFDSGLLHWRIGGGDTTEHIQTHFESKIELLPSRPYVPCPTPPRKHLTTVEGTPGTTEQEGPPPDGLPEKRITATMDDMLSTRSSTLTDEGAKSAEATKESSKFPFGISPAQSHRNIKIDEPHSKDETPLCTLLDWQDSLAKRCVCVSNTIRSLSFVPGNDFEMSKHPGLLLILGKLILLHHKHPERKQAPLTYEKEEEQDQGVSCDKVEWWWDCLEMLRENTLVTLANISGQLDLSPYPESICLPVLDGLLHWAVCPSAEAQDPFSTLGPNAVLSPQRLVLETLSKLSIQDNNVDLILATPPFSRLEKKTMVRFLSDRKNPVCREMAVVLLANLAQGDSLAARAIAVQKGSIGNLLGFLEDSLAATQFQQSQASLLHMQNPPFEPTSVDMMRRAARALLAKVDENHSEFTLYESRLLDISVSPLMNSLVSQVICDVLFLIGQS

SEQ ID NO: 1515 - DNA, 106255 bp, Homo sapiens
  misc_feature (1)...(106255): n = A, C, G or T/U
cccaaatagctgggattacaggtgcctgccaccaagcccagctaatttttgtatttttagtagagacgggtgttcaccatgttggccaggctagtcttgaactcctgacatcaagtgatcagcccgcctcagcctcccaaagtgctgggattacaggtgtgagccaccgggcctggcctgtttttgttttaaagatgacatctccatgtgttgcccaggagtgtggtagctattcacaggcacaattatagcgaactgtagccttggattccaggccccaggaaatactcccacctcagcctcccgagtagccactgtacctgacaaaatgagggatcttgatctgagtgctaggaacttataaacaaatattgaatccaacaggcttgtactattttggaggtatgtttttccttttaagtagatatcagcttataatgtactttatgggaggtacaacagtagtgtatactcaatgttgtatatcatagtagagtaattataagaggatctcccatttatagtaaactgaatgaaaggattgacatcccaaaccaaaaagtggaaaatggcaaactggtttcaaaatatcatagtgaagagatggctattctactggaggggaccctctgctctgatgcttctaagcagacatagtccttataactggattttgtgagtctatttgaaatcctggttattacagtttatgaatggatacagccatttggaaacctgacttagaatgaaagtctagacatttgtctcaaaagtagagctagctctcaaactatatgctccttgctttgaatactgagtagggcataagcctttaactttcctttcctcatctcctactcccactcacttccaagaagaacacctctgtagagttttcatctgtctttgtagtactccattcctgtaaattccttctccacgtttttgctatttcatttagtttggaaaatggcagtgtggaatatgtttggtataaccttaatcctggccagcgtctctgatccctaaaaaaaaaagtatacatacatatatatatatataaaaatatatatatatttagagagagagcgagtgtgtgttttctggggttaaaaacacagaagtaaaaaccttaaacacaatagaaaacaaacctcccttattatccaggtcccctgcatatttttagttgtttagaaaatgtttctcctgggtcgggcatggtggctcatgcctgtaatcccagcactttgggaggccaaggcgggtggattacctgaggttgggagttcgagaccagcctgaccaacatggagaaacccccgtctctactaaaaatacaaaaattagcctggcggggtggcgcatgcctgtaatcccagctacttgggaggctgaggcaggagaatcgcttgaacctgggaagtggaggttgtcgtgatccaagatcgggccattgcactccagcctgggcaacaagagtgaaactccatttcaaaaaacagaaaaaaagaaaatgtttctcctgttgttcctgttaaatatttctcatattttggcatcacacacaaaaatatgatgccagaggtttgtgtgtatgtgtgtgcatgtgtgtggtggaggtgagggggagacttggtcctatagcacggtgtgcaatggtgaagaacctactaaattaattaatcttcacattagcagataactgagaatatgaatcactcacaggcagtcaaaaggtgatgtcagtgaacagttatggcacagcatgactgctcctgtttgacactgcatttagtcctagcactactgctattgcagggctctcctatgaattttattgtggaatttcagaaatttctactgccagttgggtgcagtggctcatgcctgtaatcccagcactttgggaggccaaggtgggaggatcatttgagcccaggaattcagaccagcctgggcaatatggcgaaccctgtctctacgaaaaaatttttaaaaattacctggatgtggtggcacatgcctgtagtcccagctattagggaggctgaagcaggaaaaccacctgagtccagggaggtcaaggctgcagtaagccatggtcacaccactgaactccagcctgggcaacagagtgagaccctgtctcaaaaaataaataaaataaagtaaaataaaattctactgccaagtagtagctaaatgtaattccccccccccgaccccccacccaagacagagtcttgccctcgggtgcagtggcactatctcagctcactgcaacctctgcctcctgggttcaagcaattctcctgcctcagcctcccaagcagctgggattacaggcacccgccaccacgcccagctaatttttccatttttagtagacagggcttcaccatgttgactgagctggtctcaaactcctgacctcaggtgatccgcccgccttggcctcccgaagtgctgagattacaggtgtaagccacagtgcccggcgctaaatgtaatttctatagcattaataagtattccaggaggtagttaaatcaaggaacaaggtacttaatgaagttttaaaatacagctttggaatggttattattagcaatcatcatactgttaatttctagttgaaagaataacaggctcacaaaaatttctaagtcttaggagaagaccgattttggtggaaagtgggtcagaagagcatgtgcaactcaaggattgctgaggatgaacaagtgcatagggtaaagttgcttcatcatgaaaggtgagtatttagggtagagactgcggtcttggtctacattacttggttgagattataaaatggtttctgtcgaccctctctacaatcagtgacaaattgtactaataatgatggactcctaaaaaccctcagtagccaatcaggttgcaacctccttcaccttgaagctttttcctagagaatattttctttccgaaggttgtgtggtacttccactctccttgattccaccttggaaacactggctactacttcataaagaactggaaggtaggtgtggtggagtcaactagaatccctcttttctaaaccctttggacttccaactttatctgggctaaaggggcaaacacgttagccacaaactcgggtttttgttagacagagtatccatattttatttatttatttatttatttaattttttgagacggagtctcgctctgtcacccaggctcgagtgcagcggcgtgatctcggctcactgcaagctctgcctcccgggttcacgccattctccagcctcagcctcctgagtagctaggactacaggcggccgccaccacgcccagctaattagagtatccatatttttaagtagctgtgagtgattaggagaaaaatacttcaatgagctcttgggctttgttctgaagtcgaaagggcctagtaaaaatgtgtaatctccatcctggttttggtgtttggggcaaaaatagtgcctaatgttgcacaacactgtgtgctcttgagtgtagtttgcggatgagttatattaatgaatacacattgtgatagaggtgtgtgtgtgtgtttccgtgcttttttttttttttttttttttggagacggagtctcattctgttgcccaggctggagtgcagtggcacaatctcggctcactgcaacctctgcctcctgagttcaagcgattttctcctgcctcagcctcctgagtagctgggattataggtgcctgccaccatgcgcagctaatttttgtgcttttagtagagacggtgtttcactatgttggccaggctggtctcgaactcctgacctcaagtgatctgccagcctcggcctcccgtattgtttttaaatggcttgttggataggcttgatgaagtgtgctggattatttcctccattgtctcctgttctctccctcccacagcaagactagaagagcaacaacacacttctatacaggtctctagtagtctctttggaggggtaggccaataagaaccaacctgctggtccctacccccaacccctctggtgacttctgaatccagtttcaatattgttaaatttcagggaagaaagtgataatgtggaaaagtgccaaaactcagtctgatttttcctggcagctttcccttggtgtcattggtaagttccgcatttcactggagtggagtgccacactgctactatgactatagtagtcactcccacgcctgacttttttgtttggtccattttatctttaggaataggcattttctgtagggatagatgggtttaaaccctattaaagctagtcagaatgtttttcattaggggccactcaattcctgtcttatacctaatagatttctttggattttctttgattcttatacaaaaacacccagtatcatcatgctggaggattctcttaaggtggttgctttgcagagaacagacagcacatttgcttttttagccacctatcctatttcataggactgcatgcctgcctccctccattttgtctgtgcttacactgttttttccttctctttccaactcttctacagaacttgtgttggaataaaagactccattccagatccattccagagttgctgtgagaaacttccccactgactctttttcctaactcagtaaaatggcagtgtaagaaagctttatgcaggcaagggctgaaagaaatctccacctagaatacagtgtttgatttttccttctgattttcttgtcaactctcaaaaacttcccttataatcattttatatgtgtgaaatttccctaggttggttttaaagaacaaaacaaaacaaaagcaacctacattggtttaacatgggaaatcctagataacagacttttcctgttcctgggcaatagccttctgtgctaagattggtgaccttaccttggtaatattgttggtgcttagccttccagatctaaaaacagcttagtgtaataagtaccaagcacaaaattgttaagtttctcttttgattgactatgaagaggctatcaagcttttttttgttttgttttgttttttgttttttgagacggagtctccctttgttgcccaggctggagtgcagtggcgacatctcagctcactgcaacctccgcctccccggttcaaccgattctcctgccttagcctcccgagtggctgggattacaggcgggtgccaccacgcccagctaattttttgtattttcagtagaaacggggtttcaccgtgttagcaaggatggtctcgatctcctgacctcgtgatctgcctgcctcggcctcccaaagtgctgggattacaggcgtgcgccaccacgcgcggctcaagctttaagtaggtttttcatacagtattttttgtattagttggtgaatacaaatcttcaatgagctcagcagaaataagaaatccaaatttcctgatctgcccagtggttttatgaaaccccagtcccgtttttttgttttttgtttttttaaaaaatattagtagtagctttactcagtcttttccacaaaaataagctcactggtcagcaagctcaccagtgagactggtgagtgaggctgtacttagaagaatatgaaagccttggtatctttttcctcatattagactggccctgggtgttatttttgtttgaaacctgccacaagccagaccagcctggacttttacttattttattttttatttcagttttggtggaggtggtggtgagggtaatttttaatttatattgagacaaaataagctggctgacttatgcctgaggctctttttttcacagctactttggggaaaaaaagtctcattcagaaattaacatttctcaaaatgtgttccttattctgaaatataaatgaccccaaattgcttaagagtttgagatgagtggggaaaagatctagaaaagcatttattgtgtgccaaccaagtttgaggcctcctggtttgctcctttgggattctagatccttggcagtcacagttttaccgcgaagagctgttgaatgccattccgagttcattccatttttctccgtgtgtgcatccagttcgtattttacagctcccgtatgggagccggtaacataatgaattgccttgactctcgcttcaatccactttcctcgcttaatatgcagcccaaagttttgcagctcgctgtcagatggtagtgctagactttcacaccgatcccaaagcctccgctggggctgtttcttaacacggagttacaaactttaagaacagacagctccagacggaaatccacgccaggctttgaactctgcttctggcttccgtcaactgacatagttgcccttttgctcaaactcgcagctccagttcgcactcgagagagctctgctgggtgtctgctgctgttccgcggcgggaacgtgtgggggcaacaacctggcgctccagcgattctccacgccttagttaggaatctaagcaaaccctcgctagggtccctgggcttaagacgacttctcccacaaggattgggtggaggaaggagccgagcccgatcttctgtttgtttgttgagttttgtatttcagacatttaggggaagcaaattgcgagaaaggaagggctgtcttccctgcaaacgtttccctctcctagcaaaccctccaggcctcggttccacattttgcagttgactctctggattttaataggttgttcccttgtcctcgggcccaatccatgcacgctgtgcagccggataaaatgggagcacatcctctgccattttcagccggtttgtcctggcagccctgcccccttccttggctgctctgccgctggagttaatacgcccagaaactccgcctgatcctccaggcctcaaatccagtccgcgtttgctaagtgccgtgcggtcggggacggcgataagaactctcctgtgagggagagctagcgagactttagtccggtttccatgtcaacgattcagtccatatttgccatcaggctgttggccgaggtgctttcgcgagggtagcgctgtcctagtcctagttctccaatctgcgccgggattcctgagctgcctgggtgtggggttaaaaggcaggggccgtgggggaaaaaactccaccgaagggaggacccactgcccccagccggggtctcgctgctcgggccagccacgtgcccagctcctcccctcccccgctttcccgttgccactgcccctagggaaagctgatgggccagtttctaaaaaagttccctcagcccaacatttcctgggatcgtggtgtggggctctaaaagtaaaagtggaagagaaccctagtgaattaaaaaaaaaaaaaagtagagaaattccacattatctcctccaacccaggtggatagatttttgtgcactttaccttattgctagagaaaaatggtgactgttttcaaaacagcttgcccacgtgtagggaaggagatttttggcgctttccatatttcacagccattgaagaaaggggatgagggctttctttggagagaaatccattctagcttccagattttcactgggctccaggtttcccattacaccccagctctaaggaaaatggcagagtaatggcatgtaaaaaaatcctcatttgtgtgcaggactcaggactgtttgccagctcaggggcagttgattaaatagccaagctctatttatgaggcagcctataatttggtttctaggacctaatgcaccggggagagttgttgcccctgaggactgtgagtgaaaagagggcactggcccataccagtcagtcggatcttcttggtaggctggtttggttcttggcttgaggccgggggaggggagaagaataaaactgtgggattttttttttttttaaatctcatcactcttagattaacaggaaggttttgcctttctggtgtaggatgcagtaagttttcttggggagagaaatgagttcaggctttggaattattcatagtgaccagggacattgccagcactcccgggtcctgcataatctaagataatgctcctgtggccatgaagtctccctttacaaaatctgagggggaaaagagatcctggtgtctaggaacactggcctgggcctttcccaaggcagccttgggtctggtgaggagctggaatcccctctggcttttgtagcctgtcatatcagaacattccaagtcagcctgaggaagaaaaggctgctgctgggatttggtggggcctgtagatcaggagaacactggagctttctgtgtatgtcgatcttttcagataaacctggccttctacccaactccagctcaatcggggtctcttagaatgtaatggtaaactttaaacaatctttacgctacaggatagaaaacaaatctgacaagcatccattttctaagtgacttgttggactgtgccttttcttcaaggagaaaatggtttccattttctgcatctctcttctgtaatggtttgaacactcaggttcctgcagtccctggagcctcttctgtgggttttcagtattagaaggtactgtctttggagactggggctacttgtcatggtaggctaagttttcttaagagggagtgagaaacggtgtttaggttttcctgctgggtaactgttctatgctcctaaagcaacttcagtggcctccattttaagttagtggtgagatgatcagttttgacttcaaatccattttgatattctgatcccattgttgaatgtgctcacaacttgatttttttttttttaaaggcaagtagaccgaaggcagctttggtgactccacttctttttaaagtcaccctcctctgccctctgactttaagtgacaggcagttccctcccctctctttcaattctgtaaaatggggataatccggacctcatgcccccagagccttgtaaggaccggctaatgagggcaggcgagtgggaaacgaatcgtctgaacaatgatcagtcattctttcgggcttgcaaagagggtaaaaaaggttgggtctttagcggggtccgtagaaggctttgaagacgaaaagtgctgtagaggtgctaagcagcagccaacggaccgggcccgctgccagggggtcagggctgggccgaggcggccgcggtctcaggctctggccaattttgcagccgcgggtaaagttcacgctgcccgctcccctcggtacggccgggaggggacagacctggatagggacgccgggagggaggcggcgcaggctccagagatgcgcgggctccgggccgggttttctccgaagccttcggcggcggcgctgcctagcgaaagcggctgagggcctgccgccgccgcggcttgttctctcccctcctcctttgtgaagggaagggagcgagtccgttccacggcctgcgcccgctccgctctccactccgggtttgccaggcggccgcgacggcgctgggtaaaatggcagtgctgagcctcgtgtcggagtgagggggactcggaggagagtggggcgctctagccgctcagtccggccgaccgcttgctcgcccgcccgctgccgcgcagcagcctcgacccaagccgcagctggcgaggggaggcagggcgccgggctcggcccgcgctctgactctggctcccggcgccccggctgctgccgcgcgcctccagcccgcccgtcccgggtcccnnnnnnnnnnnnnnnnnnnnnnnnnnnnnnnnnnnnnnnnnnnnnnnnnnnnnnnnnnnnnnnnnnnnnnnnnnnnnnnnnnnnnnnnnnnnnnnnnnnnnnnnnnnnnnnnnnnnnnnnnnnnnnnnnnnnnnnnnnnnnnnnnnnnnnnnnnnnnnnnnnnnnnnnnnnnnnnnnnnnnnnnnnnnnnnnnnnnnnnnnnnnnnnnnnnnnnnnnnnnnnnnnnnnnnnnnnnnnncctcctcctccgccgccgccagcccggagcctgagccggcggggcgggggggagaggagcgagcgcagcgcagcagcggagccccgcgaggcccgcccgggcgggtggggagggcagcccgggggactgggccccggggcggggtgggagggggggagaagacgaagacagggccgggtctctccgcggacgagacagcggggatcatggccgcgcaggtcgcccccgccgccgccagcagcctgggcaacccgccgccgccgccgccctcggagctgaagaaagccgagcagcagcagcgggaggaggcggggggcgaggcggcggcggcggcagcggccgagcgcggggaaatgaaggcagccgccgggcaggaaagcgagggccccgccgtggggccgccgcagccgctgggaaaggagctgcaggacggggccgagagcaatgggggtggcggcggcggcggagccggcagcggcggcgggcccggcgcggagccggacctgaagaactcgaacgggaacgcgggccctaggcccgccctgaacaataacctcacggagccgcccggcggcggcggtggcggcagcagcgatggggtgggggcgcctcctcactcagccgcggccgccttgccgcccccagcctacggcttcgggcaaccctacggccggagcccgtctgccgtcgccgccgccgcggccgccgtcttccaccaacaacatggcggacaacaaagccctggcctggcagcgctgcagagcggcggcggcgggggcctggagccctacgcggggccccagcagaactctcacgaccacggcttccccaaccaccagtacaactcctactaccccaaccgcagcgcctaccccccgcccgccccggcctacgcgctgagctccccgagaggtggcactccgggctccggcgcggcggcggctgccggctccaagccgcctccctcctccagcgcctccgcctcctcgtcgtcttcgtccttcgctcagcagcgcttcggggccatggggggaggcggcccctccgcggccggcgggggaactccccagcccaccgccacccccaccctcaaccaactgctcacgtcgcccagctcggcccggggctaccagggctaccccgggggcgactacagtggcgggccccaggacgggggcgccggcaagggcccggcggacatggcctcgcagtgttggggggctgcggcggcggcagctgcggcggcggccgcctcgggaggggcccaacaaaggagccaccacgcgcccatgagccccgggagcagcggcggcggggggcagccgctcgcccggacccctcaggtacacagctgagtggggagggggctggggcgagcgtggtcctgggggtgggtggcggctgcggtgagcgggccacagccttgggctcccctcagtcccgggcccccactgctggggagctgccattgtctggctcttctctcttaaaatggctgcctgtctgccttcctctccttccctccttcagcctttgtgttgggtttttccagaggtgtctgctcctctttttcctctcccctggtcccttcgaactccaggggtcttgatgggggtgcggggcagagtgtgcggggaagggcctggccgggggtgagggggtgagggggcgctgggggctcaggttaggagtgtaggcagtggtaggagcccaggagttgaatgaacgtttctttgctcacctgccgctcctctccgtcccccggccttcctctgggccgccccccatctgtgctttcaaagagggcccctagagctcgaggggacctcgaggggagggcaggggactgcttgggagctgctagaggccggctgcggttcacctagggcagcccggtccatctcctgtcttaggctccgccggcccagtggcctgggcttctccctggaagtgctggtaaacagctgagtgattggagtagtaagtgcagattgctttggtttgggatttgaattatggaggtaaaatccttctgtcaaagccaggagacagttggtcttaggttgacatcctatctgtgatctgattggctccccatctcctgctcttggccatttataattgcctctgatgtaatggtacaacaatcctgatgagctcataaacttttacactctgcttttctgccagtgataacccaaactatcgctgccactatctgccttttattccagagctgaaattggctgtgaccttgaggagggaggtttaagtagcaatactgtatcagcaagagcaaagcctcagacagcctgcccttgttacattgtgcccaaacaaaagaggaggcaatggcattttgcttgtaccttggatttattttgcttgttatgttttatgcagcctgaaatgaattctgtgttgtcagaacagtagctgagttttttctctacaatgggtttgctgtttgttttggttttgtgactttcctgatggtataaatgacttctttgatggctctgaagatgcatttatcttgagtaattttgacactggttgctttgcagaattgaaatgattttactgggctttttattgagtggcaaatgtgggatctttatggggggccagaaaacagtttttgttattttttttagaactgggagctttctgaggaattttatattaggttcaagcggtctgttttaaggaagactggcctcattctttgtttacatgttgaatcttgttaacactttcttttgttaattgaactttggaatagcagcttaatttaaagggaagctggtgtctttcatgatcttgagggactttctcctaaaggcttggtttggtgaaattgtttttttcctggaataacaaaaagtctagttttctgttttgtcatcagtcattttagagctttgaaatagagactggccagtttattcctttgcattttaatgtatgttccactttttttcttgtcttccaagatatgaagatacgacctagaatgacacttaagatttgcttagaaattgcaacttctgagtaccttgttacactattctatcttgttttattttgttgcttttcttccatcttcatcatgctctgtcagcagtgcttttggtcagggatattgagtattctgtggagtcatacatgttttcaaagagggggaagctccattcatcccctcccaaaccccttgcgcttttgtgctaggaggaaattttgttcacttactagctgtattcccagcccatcctagagctactttactactcttttgagctggggattttgaaattagctgtgttagatggtgggcttggagctctgtgccttgattctacatcttccatgatgttctgcatctggacaagaaatagggaaatgttacattgtttttctagtgtctggaggaaaagttttgtcttaaaagacagcatcctcttgtctctgggtcatcctatagtctgaacctctttcctctcattccccttgttttgtttggttttggctgaaaattttacttttcttgaaaactattagaataagtcatttggggtagtaagtcagggttcatttaaaagcaaaattgattggaattctgctggtttggaaatatttagtcaaaggttttaaagaaaaagccaactcttttggtataatgatttttgtttttcagtcagtaaattatggaacactttctgtgtagatgataggagaatagatacagtccctgtttggatgcctgtctgtgctgcctttggatgaattttctgatctcttttattatcactagacccacacaacatagattcctaattaatttcagctcagttgtctactccccagagacccagggaatgggctggtgagcattcagttgtgtaagagacagtgcagcttccacttctgtggactgcttcaggtgtgtggtagtagtctaggtgagggttgtaggttcagactttgttctgaatttctctttgctacttgataaacctcttttcagaccatgatgctctactcttcaacattcttaaattaaaaagtcttgctctgtctccatcttttcctggcgcagtcttagattaagaatattttgcagagacttaattaacacagctaaggtgataacgttttcatttgactctgcgcttatgaaataaagtttaggtaagtgtgtgtattgtggctatgtctttttcacaggacctgggaagatcttagacaaacttttactttattccttttcataagtagtgtatctcaagtgttgaatcccggtactgatgaaatagttttagattacttacacacatgaagttgatttaaggctttttattgggacgctttttagcaataatactttgagagtaataccagtttaccaaggtaaaaaataaaatacaataaatagtccaggaacaagttggattttattgtagaagtttggttgttagtttctactacggaaacatcaaatgatatttctgactcctgggaaacagatacaggaatcctagatttattatgggaatgcctactggcagaaattctaggctggctgaaatacaggactcttggagctctctcaagtaggagggaccaggaaaaccacactgagatggcactttagttgtgggggtttcatgtttctctactgttcatgagagagctggggtgatgaggattgagatggtggtgtgagaacagagaaagcagccaggaccaggtttggcttcttgtgtattgggccctgtgaggactttttaggttcctttctttgtgtgtgacatgagtaaccatgacaagcagcacctgctgaaacaggatgtcttggattgcattaaacattaatatgttggattgactcctgtaggtgtaatgtctacagtagaccttttgcaaagaggttagtgaacttttttagaatgagggaataggctaacaaagtaataggcagggctctttcctgttcccatccctcaaaaggttgtattgattggcttcaactctcaaaattctagaagcaactgaagcttgtaaatatggtaaaaatgtggtattcaaatatattggcaccgagtagttcttttctgccagtgagctgtaatacctggggcttgaatggagtcctgattcctgtggcttttatctctgggtttttccttgtttagattggtcattatcattactgacgcacacttacgttgttattactgatgcatacttgagttgtgtgttgcgttagtggtaaagagcacaggactcacaacaggaggaggaaggaggaggcttaggttccacatacagctccagattaagctgtgtgaccctgggcaggtcatttgctttctctatttttcattttctccctcatcaataaaatgaagttggtctgcatggccttctcactctaagatgctacatatctgtgcttccatagctggcttgttatgaaggcagctttctgtacataaatcaggggtcttgagaccatctttcttcccctggactgaaggaactcaaagctattttctcctgggattcacaggaacaagctctgaacagttgggtgccattgtggtctgtagacttttacagaaaaagctctaccagactgttgccttgaaactgttaatctgtttgtcattagtcattccacctggctggtggttttaaaacactaaatagtcgttggaaagttaggtagatttcattaaagcaagacttgaaaaatagttgcttcaggatccccaggaggcttttgcacttggggttggggtgaggaatggatattcataagttcagtgttgatattctgctgcttttggggaggggtagggagagagagggagcattaagctctccagactcctggtgtttgggcaggtctaggtctggtttgggcagttggttgtaatctgagtgcctggacttgccctgtaagttttgctgagagagaagcaaatgttcctgagactggaagaggaaaagctgcgtttcagggtcaatttcataggtgcatttgttgtttctcatcgctatggtttaaaaaactacatggtgtgctttgcacgtggtcctggaaatgctattctttctcttctccagcacacctgaatttccattctttctcttcctggcttagtagtttagaagtgtaatttaggtatattagaggaaggaagcttccctttataaaggagggaaaagggtagagggaacagtgtttgataattctgtgcttgacacagcatcttctatcgtctctgaaggaaccaaatgtttcagagctttgtgtaaatacttgctgagctgtcaatatgtacccaggaggtttctgtagtaagatgtaaactgttctatagaatgtttgacaggcaaattaataaacagttttcaagcaaagataatgctagcctcctcatgtggtggagtaaaataacattggggaaaaagacttggggataggaaaagggtagtgctggggggcagtgagtgtggagataagaagtgatctaaaaaaaaattgaaatggaaagatgctgccctggcagtgaaacctctgtggccctggctgcgtgctaagttcagggcatgtggtatcctgttaaagtcaattgcagtttcatagtgaaaatagaagtttggaaagaagatcctgactgtcaatagtaaggtaagtattaccccagacacttggcttatgagactttgaggtttaaagggtagcttggtgagattatttttggcttgggtttgcatttctggaatattagaaaggagaaaaaagatactgcaacttgagtgtgatctttatcctcaattttgctgttgtgcttgggattataagtccactacccaatggcctgggtttatttatacagtttttactggacttctgtgtatcacttatgataaaattaatatgcctttacactctgttcctgggtcagtacaaagtccaaatatttggggactcactacatcttacttgaaggattatgtgagtagatacagtctttgtttttgaaattgccattttaggattaaaaacatatctgggttccttcagtgacacattctttttatggaagaagaagaagaatctatgaatattttagctgtctgtctgtggtcctcttctttggtagccttgtgagatgaccagatttgccttctcagaatgtcttttttaactagattcattgattctgacaccagttttctttataagaagtgttttttacaccagagtcctggaagtgcccttttgacttagctgtttatatagtagcagggaatatgaatgtaattatggtcctgactatgatttttaggttcagctaacttactaccaaaggctatcagcttgttttaatacaaaacacaaaaacttggattggcactgacataggttgcttaatattgcatggtcctttcccagtatgttggtagtgagggtattaggaacttcagacttattgctgagagcatagtttctaagtcagagagatcaggaaattccaatggggatgggaaatagccctatgtgattacaccagctaggtactaggaagagatttaaaaggtagaaacaatatctccttcagaggcatttagttttcttaggaaagcatgcttatgtgcacacatctggaaaacttgaaaagcaaggtttcataaatggatgtagaccacactaattatgtgagctgaaggaattagaggaaaaggttcaatcagtttggcagggttaacctgggacagcttttcagaggctttttttgtgaagctaaatgttcaagaaacttagaatactaatttgccttttcataatgctattcttaagttccatgggcttgatagaatccacattgcacatccatctccagaccagtagctgtctcagtgttccaatgactttgagaatttggactctaaccataaaactccctgaaagagtggttccagggtcttagtggttcttgtggtcaggtagagcctttggtacagactgttaagttcttggctagttcaggggcacttttctagtaaatttggatttggaaggtcatgtcaccttcagagttgtgtgccctggacagctctgtagtaatggtggttcaactttgttggtgagtctgtcttggcagagttagttgacctttcttaaaacaagagccacgaagtaagtatctgttgggactcttaggctgctatttctgaggagctgggagctgtgttcaagtcaagttgcttgtgttagaccttatattgaggttgatgggttaggtaagcctgcacatatgcagtctgcccatttattcatagaaatggcctttaatactgtttttggccgggcgcggtagctcacacctataatcccagcactttgggaggccaaggtgggaggattgcccaagcccaggaccagccttgggaccaggctattaacatagggagaccccatctttacaagacacaaaaattgctggatgtggtggtacgtgcctgtagtcgcagtttacttagaaagctgaggcaggaggattgcttgagcccaggaggttgaggctgttgtaagccatgattacgccagtgcactccagcctgggcaatggagccaagaccttgtctcaaaaaaaaaaaaaaaatttgttttttattaggttactatggccaagcagctaacaaatgctgctcaccaatgcttaatccttgtggagcctctggaatatagtgattttggtttctttacctgctggtcgatctgtggttgggccttggcacttcaccggtcaaggatcatcagtggatgcttaacagctgaagatgcatggcatgtccagtgccaggccactgtaatgcttctacctggagaaggattggttacactgctccagtacagaagtactgcagacctttttttttttttgagatggagtcttactttgtcacccagactggagtacagtggtgcaatctggctcattgcaacctctgcctcccaggttcaagcgattctcatgcctcagcctcctgagtagctgggattataggcttccaccaccatgcccggctaatttttgtatttttagtagaggtggggtttcatcatgttggccaggctggtcttgaactcccaacctcgggtgtgatccacccaccttggccttccaaagtgctggaattacaggtgtgagccaccacgcccagccttttttttttttccccccccctcaagtaatggtccatgacctgctgaaagtactggagtcttggataaacattctggtttagaaataccttttccactttttttgccttgccattttggcattttgcaaaagtgggttttcagttactcagaattgggcaccatagttaacctcctatggattacaggtgtttaggggcttgaactctgatcattcccaggttttagaggaatccaagttcgggtgaatattgacttagtagccttgagtattcttcctgaaattacccctcctctccatttaaatggatgaaattagttttttactgaatgtgaagggacatctgaatgaacttctgtttgtttttgttagtcacttgtgcatagctggaatattatcttgggacaggttgagtctatttcccagtggcttctgcattttctaagggtggactggaatgggaagaagtctaatgccaagaatgcattccaacatgctgcagagtaggaaatttgatccctaaaatgttgacttagtgttggtcatggtacatattagaaatcacccagtaatccaggacagatttttgtcaccctccaggaagttatgttgatataaatactaaggggctttgggtactgagctaagtgctctgcaggcccaaagcgctgcttgaattgctacccatatgaagaggaaatgtgccatgtgcctttttttctctcttttgcatttgggcttccttatggctttgttgcttttatgttcccaagtctgcaaagttagatattagacttcctcctcccttggcactggcagattcatgattttccatggctcatcactagcagccaagatttttgtatgcttttctctcttaaacttgttcgttttcagcttgcttgtttataggcatctctgttaaaaggaacccttcttttccccttaagatctagcaccaggggtgcttgggggttgttgtgatatcagtcaattaaaagcccatttggtgtgtgcttggtgtttttattttgctcatgttttctttgaggtcacaacgtgcttgccgggcatgagtgcctttgggcccagctgtttactctcaactgccgtgtactttgactttaagaaaagtgcaaattcagccacgtggtagagggattaaaggccacatagtgttggatgcttccttttggaagaaacagatatatctttgggctcttcttgcccagtgatttctcctgtctggggtagacattgttgctttctgttgtccttagagaacagggcagaaatgctgggaattggtttattactgtgtctctttggcaaatatgtatgtctttttctcttgccctttggacaacattctgttctggtcctaaggtgttggagttcacaggttgatctagcgttatgtgaaactcttggtaatttaggtttggataaccggcttttagtctccagatttctaacattgtgcttgtttaggaatttaggcttctaaagagaaccatattacaaagcttttggggaacaattctgtaggtagtttatctgttcttgggtcacagatcctcaccaggatcctgacttttttttttttttagacggagtcttgctctgtcacccaggctggagtgcagtgcagtggggcaatttcagctcactgcagtctccgcctcctgggttcaaggggttctcctgcctcagtctcctgagtagctgggactacaggcatgcgccaccgcggctggctaattttttttttttttttttttttttttgagatggagtcttgttctatcgcccaggctggagtccagtggtgtgatctcggctcactgcaacctccgtctcccaggttcaagtgattctcctgccacagcctcccgagtagctgggactacaggcgccttccaccacgccctgctaatttttgtatttttagtagagatggggtttcatcatgctggccaggctggtctgaaactcctgagctcgtgatctacccgtctcggcctcccaaagtgctgggattacaggcataagccaccacgcccggcctaatgtttgtatttttagtagagatggggtttcaccatgttggctaggctagtctcgaactcctgacctcaggtgatccgccggctttgacctcccaaagtgctgggattacaggcgtgagccactgtgcctggcaaggatcctgactttcaaatgatggccaccatgcatttgagtacttattatgtgctaagcattatgcttagtcctcttgatgaatttcctaatttaatcttcaaaactgtataggaggtgggttctattattaatcttcctcttttacaaatgaggaaatagagtaagataagaaatttgccctagggaaaatagctggtaaaaggtagagttgggtttgtctgacaaggtagacaaggtttgtctgactcttcaaaggtattacaatctaaaatactaactttgcttctccaaaataaattactcaggcaccaagattgtttaggacattatttttacaatagcctgaaactcttaaatggggtgaaagactgaaaagccattagttaacaatttgacatcgtgcctagagctctgtcctgtcattcccttccatcccttccacttagggttttgttgttttggatttccgatgaatggccatggcacttggtttatagctgccttgtgattccattggtgagaactggcagcatctggtcctctggtccccggtcctctctttctcaagagggatcttttggggttgagagtgagattcagcctttaagatacagtccttcacttttttttttttttttttttttttttttttttttttgagacggagtcttgcactgtcgcccaggctggattgcagtggcgtgatctcggctcactgtaacctctgcctcctgggttcaagtgattcttctgcctcagcctcctgagtagctgggattacaggtgcccaccaccacgcccaggtaattttttgtatttttagtagagatggggtttcactgtgttggtcaggctggtcctgaactcctgaccttgtgatccacctgcctcggcctcccaaagtgctgggattacaggtgcgagccaccgcacccagccagagtctttcactttgatctgagtgaaagtgacttgaattatgaaagtatatgcagagtgatattacttttccagaaacttggagcacttgctgaagaggcagggattattgtctttttttttcttttgagatggagtctttgctctgtcgcccaggctggagtgcagtggcgcgatcttggcccactgcaagctccgtctcctgggttcacgccattctcctgcctcagcctcccgagtagctgggactacaggtgcccgccaccacgcccggctaatttttttgtatttttagtagagatggggcttcaccatgttagccaggatggtctcggtctgctgatctcgtgatccgcccgcttcggcctcccaaagtgctgggattacaggtgtgagccaccgcgcccagcggattattgtcttaatttgccacttgggggaaatgaacacataaagttgagtgccacatacaaagtttcatagcagagtcatctctaaaacctaggtttaaagttctcttagggcagtatgactttaggtaagtcacttctctgaatctgtattctcaactatataatgaggaaaaatatctaccttgaagctatggtaaatattagatatgtgaaagtactattcgtttatcaaatacaattctaacatgactcctgattggtcaatcccacaactatctctcccactctccagccgtccttttcagaagcaagcctccaggagagttgataccactattcccaccttcctcctgtgcatccaccaatctacctcacattctcctcccctgcacccagcacccctggaatgctaccaccctgctccagccaggaggccagaagggtgatgtaggaagattgcagcactaccatggaagttctcaacagcacccccgacccaggaccccaggttcccactggccctgcttctcaattcaggagagatagaattgagtggttaaagctagtattggtctttaccgaattcaaaattttccctagtttttagctacatctgagttactgtaatgcttttttttttttttttttttaaactaaaatttgtttagagacaaggtctttctctgtttcccaggctggagtgcagtggctatccacaggcacaatcatagcccactctcaaactcctgacctcaagcaatcttccttcctcagcctcccaagtagctgagctacaagcacatgtcactatgccagctatcagggctagcttgcttacttttttttttttttggagacagaatctcgctctgtcggccaggctgaagtgcagtggcatgatctagctcactgcaacctccgcctcctgggctcaagcaattctcctgcctcagcctcccgagtagctgggattacaggcgtgtaccaccacgcctggctaatttttgtatttttagtagagacggggtttcaccacgttggccaggctggtctggaactcctgacctcaggtaatnnnnnnnnnnnnnnnnnnnnnnnnnnnnnnnnnnnnnnnnnnnnnnnnnnnnnnnnnnnnnnnnnnnnnnnnnnnnnnnnnnnnnnnnnnnnnnnnnnnnnnnnnnnnnnnnnnnnnnnnnnnnnnnnnnnnnnnnnnnnnnnnnnnnnnnnnnnnnnnnnnnnnnnnnnnnnnnnnnnnnnnnnnnnnnnnnnnnnnnnnnnnnnnnnnnnnnnnnnnnnnnnnnnnnnnnnnnnnnnnnnnnnnnnnnnnnnnnnnnnnnnnnnnnnnnnnnnnnnnnnnnnnnnnnnnnnnnnnnnnnagagcgagatgccatctcaaaaaataaaatacatacacacacacacacacacacacacacacacacacacaccacttgttgttccagcttgagaagtggattagtgcagtggttctcagtgtggtccctagccaccagcatcagcattactaggtcctgttaagaagcacagacccttggccagtcctatcgaatccaaaactctgtcaatatgttctaacaagtcctctaggccattctgatgaacactgaagtttgagaactactagatttatacatttacactcaactgggctgcagagtatatccagattacctgaggggctgcttctaaattataccatagattgatgttttatgtctatgtgccctcctatgaaaaaagtattaatgaatggagaaaaggttaaaatgcttgaggctaggggagtgtgttagtttgcttggactgctgtcacaaaataccatagacgaggtggcttaaacaacaaacatttactacttgaagtcctggagggtgagaagtccaagatcaaaatgctggcagatcgggttcttggtgacagtcattttcctggcatgtaggcaactgtcttctgtcttcttgccggtctaccaccccaattagtgccctcttagcctcttatgtctcttgctcttttttttttttgagacagagtctcgctttgtcacccaggctggagtgcagtggtgcaatctcagctcattgcaacctccgcctcctgggttcaagcaattttcctgcctcagcctctcgtagctgggattacaggtccacgccaccacgcccggctaattttatttatttatttatatatattttttagtagagacgagatttcaccatgttggccatgcaagtctcaaactcctgacctcaagccatttgtccacctcagcctcccaaagtgttgggattacagacgtgagccagcgcccccggctcttgctcttataagggcactaagcccatcatgggggcacaccctcatgacttaatctaaccctaattacctcccaaaggccccacctcctattaataataccgtaacgttggaggttagggcttcaacattaatttcagggtttcataaacattcagccagtaacaggagaagaaagaaaatacttttgagatggacctttactagtgcagtgataagttctagtcacaaaacacgtctgcttgtttataggacttgggggctccctgccttccatttctctttctcttagttcttcggcaatatggcatgaagataatctggacctgtggtcctgggattttgatgaaggtgggaaaggtattttaagatcttgactggcagggcatggtggctcatgcctgtaatccaagcactttgggatgctgagctgggcggattgcttgagcccaggagttcgagaccagcctgagcaacatggcaaaaccctatctctacaaaaacaaaaaaatcagccaggcatggtgatgcgcgcctgtagtctcagctacgtgggggctgagatgggaggatcacttgagcaaggaaggctgaggctgcagtgagccatgatggcaccactgcactccagcctaggtgacacagcaagaccctgtctatatacagaaaaaaaaaaataggatcttgactgtggtggtctccaagtatggccaatacagtacacttttccaagaaagtgattcttgaaaatgccacttaaaggtcagtgttggagcactaattaaatgccatgatgtcccttttgcctgtgatggctgtctgatctgagaacagggcgttgggtgatttggtgttctcacagtaagcctttattgacctctctccctcaccccctacttcttagtggccagtctgagttttgctgtgaattcctttccttgtgtctcttcttgtgaagttttagtaaataaaccctgtaagtaggccgagagcagtggctcacacttgtaatccccgtgctttatgaggctgagatgagaagattgcttgagcccaggagttcgagaccagccttggcaacatagcaagaccttgtctctcttaaaaaaaattttttttaaattagctgggcctggtggcatgcacctattgtcccagttacttgagaggctgaggcaggaggatcacttgagcccaggagtttattggaggctgcagtgagacctgattgtgctattggactacatacagcctgggcaacagagcaagaccctgtctcaaataaaaataaaccctctaagtagattcctgaacaagtcacctcatctctgcagtgaatgaggactctctgaggggtggacatttgagccaagacctgtctccagttgtataacttaatgaataaggattgtgcttggcacagatgtgggagttacagaagtggtcaggtgataaatattaacagtttgaagaccaagtgaagaaccagtgttctaattcatttggactttctgaacaccttatgtggtttctctgtccttcccattaaaaacaagtattctgctaccaggcctctttttcctcctgcctgagaagcgtagctgtgatcactgggacctagctgcaatgaaggcagtggtttccaggaggagactacagtttgatctgtgatttcatatttgtatgtacagatgaatactttagtaaggaatcttatgtttgtgtgtgcatgtgtgttttaaactctatcacttttaagctttattttctctgttcttggctttttcttttttcctttttcattttctcctttgatgtctaactctgcattagtagaatgcagagcacatggaaactccagtaactttaccacaccagagctggtaaaatggagatacaacatacaccagtttcagactaacatcattttggtgaagattgatttttttttttttttttggcagagtcttgctttgttgcgcaggctggagtgcaatggcgtgatcttggctttctgcaacttctacttcctgggttcaagcaattctcttgcctcagcctcccgagtagctgggactacaggcgcccaccaccacacctggctatttttttgtatttttagtagagacagggtttcaccatgttggtcaggctggtcttgaactcctgacctcaagtaatctgcctgcctcggcctcccagagtgctgggattacaggcgtgcgcccagcctgtgaagatttttagtatctgctttcctttcttggaaaagcctggctaactagaggcaggaaatgtctatgtctgattaacaagttcctaaatggtctctacctcttctcatttcccactttattgtctttggtctggagacagattccttcatctgtttttggggttctgttgacccagtacagatttgtaacattgtttttctttacagtttgtgatttcaatcctctgctttcccaatgccactttgaattggcttctttaaaactccaacataaaacctcaagtgaccaatatgtggtctcattatggtattttgggttaaaatgaaattaagatagctgggctcacccagccaaacacattcaccaaagggaaattttgaggcatcatagactgtgaagtggttagggaaaaagagagttaaatgttggctagtttagaatgccaagtgtccatcccaacttggttatactggccagagatggcaaagaatagagacaataaggttctgaaaagacagctggtgactggtatggccctgtatactcctgggataaatcatgaagtgagggtctcctgtacatacttgtatagtttgtatagacagtggtgtagatgaggttggtatgtaccagcatacttttggaactttgagaagaactgtagaatttgtagtactctggttttccatccagggaattgctgaccttaaaacctgaggatttggatgcatctataatcttttttgtttgtttgtttgtttgtttgtttgtttttgagacggaatctcgttcggttgcccaggctggagtgtagtggcgcaatctcggctcactgcagtctccgcctcctgggttcaagtgatttttctgcctcagcccagcctcctgagtagctgagactacaggtgtgtcaccatgccgggctaatttttgtatttttagtagagatggggtttcactatgtcagccaggctggtctcgaactcctgacctcatgatccacctgcctctgcctcccaaagtgctgggatgacaggcatgagccaccgcgccgcatatataatcttaataaggttgactattccctgggccgttctttaacttatttaattgtgcctgctatagttcagagtggacttagggggacctagtgaaagactggtattttggggaagtagtccaaggcagccctaggaattaatgaaataaacagtggcattgctgctgcttcttggtgtttttatcaacatacagtacttgattggattgatgtacaagcatgatgacaaacagaatcccagactgcatgtaacttcagttcctacagctcagtgatctgtcacagataccttctttggcgggatatagaactatgtattagagaaatttagcgtcttttttgtataactgaaagaccagcccaagtttgcagttgtagataaaataaaaagaatgggagaagttagagaaagaaaacgaggctttgaagttttgtggctaggggcagtttttatctttatttactttgtttatttgtttgtttgtttttagcacttatctgcaaattagtttaacatggaagagggaggagtattttagaaactagatcagaagatgcatttagaacaaaagttggaatgtgcacacctgggtaaagctctgtaaggttactcttgcccctccatgtattccttaagtgtaccatatcacttaatggtaggtaatgataagtagggcagaaaacatcaaaaggacagcaatattcagttgggcatgtggtccatccataccaaggaccttttcctagtagaagcaccagaggatggtctgtgggaggaagtacctttttctgatttcaatctatatcacctcacatggggacaaattttctaatttttgagcatatattgggatgcagtataccagtgtgtctttgcgtaccatcaggatttcctagactttgatgatattttccatttctcaggaatttttaggataagaactttttaaagttcacttaattgcccagtcctgttgttgaaatgttgtttaatttaaagcataaaatatgctggggagagtggcacacgcctataatctcagctactgcagaggctgaggcaggaagatcacatgagccctggagttccaggccagcctgggcaatgtagggagacccgtcttaaaaaaaaaaacataaaatagttgggccttgccaatgtaagaagtcatatggcagaatcttttttgaaaaacctgtgagtatcaggctgggcgcggtggctcacgcctgtaatcccagtacttggggagactgaggtgggcggatcatgaggtcaggagtttgagaccagccttatcaacatggtgaaaccccatctctactaaaaataacaaaaattagccaggagtggtggtgcatgcccgtaatcccagctactcaggaggctgaggcaggagaatcacttgaacccgggaggcagaggttgcagtgagccaagatcgcgccactgcactccaacctgggtaacagcgagattccgtctcaaaaaaaaaaaaaaaaagaaaaagaaaaaaacctgtgagtatctgccacatgctagttgcttacattaatgcaaaaacacttactgagcttctacagtgaatcagatagtatgttatgaacataggattcataattcctgcctccatggagtactttctagtggggaaaaatatgtaagcagataagcacaaataactgtagttacagttgtaataaatgcattggagaacaacacaactgtttttttaaatttttatttatgcttaccttgtctgatgggtggctttgtagtcttgagatcttaggatgggtgctggtcagttctgagtccctttccctctagggtcaagttttataggaagttatccattgaggcatgctgggctagagttcattgttcctcagcaaggctcttctgttttgtttttgtttttgttttacggggagatggagtcttactctgtcactcagggtgaggtgcagtggtctcagctcactgcagccactgcctcccaggttcaaaccattctcctgcctcagcctcccgagtagctgagattacaggcatgcaccaccacacccaactaatttttgtatttttagtagagacagggttttcccatgttggccaggctggtcttgaactcctgatctcaggtgatctgcctgcctcgccctcccaaagtgctgagattacagggtgagccaactgtgcctggccaggaaggctcttctttttgtggtgctatattgcaggacattggcatcttgctccccgggtaataaatgccagtagcactatagagttgctgtgacaaccaaaaaaggcgctttcatacatttatttccaaacacttctcagtggttggtattgccccggttgaatactactggctgtactgtcaggattcttggaaggagctttgaacaaaatcctctgggagaacagactgaaagtaggtggtgcttgagacttggactggccaacccttttggtgtctgacttgtgtgttcatgttttttaagtaggtattttgaaactgctctcaaccccattttgccatttctcctattgagggtgcagagagagaagtattgtgtgtgtgctttatgaactggcactgtaacaagcatttcacatacttaccatttgaactgttttgtatctttgttaaacagtttttaatccctgtttacagatggttctggtgctaagagataaagtgacttgctcaaagtggtgtgaaactatacttttttttctttctcaaaaagtacagcctaaatttatttgattgtcagttaacctctagttgatgactttggacttctggtcttaagtgtatgggacagacattaattgttctacaaatttccaagctctactgccagaaacttagcacttgtgtaggatgatgatagctgccattctggatgctagaggatacagcagtgaattaaacatacacaggacatatagattgaacaagataaataagtgaatcatatatatagtatgctagtgatacatgcttgggagaaaaagttaatcaggaaccaagtataggagtgtgcagggttaaaatcttagaggagttcaccagggaaggccacactgaagtgatatttgacatgaaagtgagctatactaatatctgggtgaagaaagtattccaggtagaaggatctatgaatacaaaggctctgaggctagaggatgcccagctgatttgaggaacagtttttttgtttgtttttgttgttatttatttttgttgttgttgtttctgagatgaagtttgctctgttgctcaggctggagtgcaaaggtgcaatcttggctcaacgcaacctccgcttcccaggttcaagcagttctcctgcctcagcctcctgagtagctgggattacaggcatgcaccaccacgcccagctaatttttgtatttttagtagagacgcggtttctccatgttggccaggctggtctcgaactcccgacctcaggtgatccacctgcctccgcctcccaaagtgctgggattacaggcgtgagccaccgcacccagccgttgttttgttctttatttactttattcgaccctgaagtgtggtactactatctgttctgttgataaggaaacagagacaaaagttgaaggcactgcaggggcagagctcttaagccactgcctagaactggccatgtacaatagtcctcccttatctgtgcggcgatatcttccaagacccccagtgggtgcctgaaagtaccagaccctatatgtacaaatgcccctcggtatccgtagggggttggttccaggactccctgaggatactgaaatttgtggaatatataaaattgcatggtatttgcatataaaccattaatacgtacattctcctgtatacgttaaatcatctctagattacttataatacctcatacaacgtagatattatgtaagtagttgttatgctatattgtttagggaataatgacaagaaaaaaagtgtacacattcagtacaggcacaaccatcgtaggcctactaactacatttttgatctgaggctggctgaatctgtggatgcagaacccatggatacaaaggtttgactgtactttgtttttcctatacatgcatacctatgataaagtttaatttattaggcatagtaagagattaacaataactaatgataaaatacaacagttatgtgattgtggtctctctctttcaaaatatcttattgtatgtaatgttttcagattgtggttgaccgtgggtaactgaaaccttggaaagcaaaatcaaggataatggggggtactcctgtagatccaaagcatttcagttcagcattaatagggacaggaattgccaggccactagagtttcactttctcttctacattcccctttcctttcctgcttttgggcataggggagcatttgtttgttttgtatacatatctcttatctctgcctacctgaaatttatattctagtcaaggatacagatagcaaacaagataaataagtaaagcattagtatgttacgatacttgcccaggtgaaccagaaaaatctgagactgagtataggaatttggggaagcttgattttggctgaaagtgctgctcatttgggaatctgaggtgcatttctagcttttctttactggccaggcactgccctcttcagaccattgtttggctaaggaaaacgaatgtacatctgaattctagagacactctgtgctggagatggatttgcactataacaggcatttcacatacttatcgtttgaactgtctcatatttttgttaaacagtttttaatccctgtttaaagatgattctggtgccaagggatgaagtgacttgcttaaagtggtgtgaaactctatactttttttttttttctttttaaaaaggtacaactgaggccgggcacagtggctcacgcctgtaatcccagcactttgggaggctgaggcgggcagatcacctgaggtcaggagttggagaccagcctgaccaatgtgatgaaaacccgtctctactaaaaatacaaaaattagccgggcatggtgacatgcgcctgtaatcccagctactcgggaggctgagacaggagaattgcttgaacccgggaggcagaagttgcaatgagccgagatcgcgccattacactctagcctgggcaacaaaagtgaaagtccgtctcaaaaaaaaaaaaaaaaaaaggtacaactgggctgggcgtggtggctcacacctgtaatcccagcactttgggaggctgaggcaggtggatcacgaggtcaggtgtttgagaccagcctgaccaacatggtgaaaccccgttgctactaaaaatacaaaaattagccgggcatggtggcatgcacctgtaatctcagctactcaggaggttgaggtaggagaattgcttgaacccgagaggcataagttggagtcagccgaggtcacgcactgcactccagcctggtgacagagcgaggctctgtctcgaaaaaaaaaaaaaaggtacaaccttccagattggccaacatgatgaaatcctgtctttaccaaaaataaaaaaattagcaggccctggtggcacaggtctgtaatcccaactgctagggtgactgtggcaggagaatcacatgaaaccgggaggtggaggttgcagtgagctgagatggcgtcattgcactccagcatgggcgacagagcaaacaagactccatctcaaaaaaaaaaaaaaggtacaaccttaatttatttgattgtcagttaacctttgggcatgtagcccaaatgctcccagactggatacgagactctcttaagattaaaaatacagattcctggctgggcgcagtggctcatgcctataatcccagcactttgggaggctgaagctggcagatcacttgagcttaggagttgaagaacagcctgggaacatggtgaaaccccatctctacaaaaactggctatgatggcatgtgcttatagtcccagctactcaggaggctgaggtgggaggatcacctgagcccaggataggaggttgaggctgcagtgggccatgattgcaccactgcactccagccggggtgacagattgagacaccctgtctcaaaagaaaaaaaaaaaaagattcctggcccggcccccatcccagacctgctaattaagaatctggagggtagaattggattgagtagctgaggaggttgaggttcaacctggttgattgtcttgaccactccctcaggaagttggtctgagaactgggattggaccccagatgtacttactgcctctcagtttactgctctttgcacctggttgtactgctgccttttgagataaaaagttgtaaagaaggggacgtttaattttatgagatgacattttggttcttgtttcatagttttcttggggtcttactattgttttggtcaccctggtttgtttttgtttttgtttttgttttgagaccgagtctcactctgtcacccaggctggagtgcagtggtgcgatctcggctcactgtgacctccacctcccaggttcaagtgattctcctgcctcagcctcccaagtagctgggactacaggcgcgtgccatcacacccggctaatatttgtattttcagtagagaccaggtttcaccatattggccaggctggtctcgaactcatgatccgccctcctcggcctcccagagtgctgggattacaggcgtgagccaccgcgcctggcaacccttggttttaagcagtacctgaaaggattttttccagagaagttacttggtttccttagtggcttttgtaatttgtttgaaatagggagaaattggttaagtttagtcttaggaaaaagtgatcttcatcattttaggaagagcattttctctggaaatgatgatagccacctgttatggaaaatgtggctaatgaaagtgccctggatgaagagagaaggacttatcatttgttgggattcattagtttgatgctgtagctgctttatttgaagggccctttctggtgccaaagaagtgaagaagcatcagtcacttggttgtggtttttctggcatgcctctttttggtagacagctgtgaggtggttattatggttgtttctcataatctgattgagttttgctacatgattcaatgactcttccccttttggtctccttcttctaaccttagtgagttttctcttatcttctggtctggaaggatagagatatggtagtctatatatctctaagcccagaagagaatgaggcctttgtcttgttttacatcactttctagatgttcttggtttgacatctggttgcaagcgccttcctggaggtttgatcaggctagtgcttcaggggatatcattggaatgggctaagtctgcaaaggggaatgtgtctgatcttctagaatggtttctgtaagcagaatggggtagatagaacttttcactgatttttgtggtggttttttttgtttgttttcaagatagagccttgctctgtcacccaggctggagtgcagtggtgtgatctctgctcactacaacctctgcctcccaggttcaagcgattctcctgcctcagcctcccgagtagctgggattacaggcacgtgccaccatgccaggctaattttggtatttttagtagagacggggtttcaccatgttggccagcctggtctcaagctcctgacctcaggcgatctgccgccttggccacccaacgtgttgggattacatgcgtgagtcactgcgtctggccaatttttattccacttggaaatttatggaagtttgaaagaatttttaaaaaacaaaacttttttggggagtggtagttgcaaactagttgttgattcctctctcaccaaaggcagatggtcagtttgtttagaacttgaatgaactagaatgaaggaattgtgaagtagaaaactgagttatggttcctaggttatgaatgaagagaatcataggctgagtgggtttgattccctgtgacaggtgttggtataatctaatgagatttttttattttcctgtcatcagcttggcttcaggaaatctttagtgttgtctctgttgaggccaaataggaggttagaaatctcttattgtcctaggtcatataaaaagtcatgtttccccactatttaaaacaagatgaaggtagtctccttattttaggaggcggggtctaggagtaaaactaagacaaacatgtttctggacaatttctcctcaattgggggctaggggttcttgactagtcttcaaagaaggtctgaaatactaggggatatagaaaagacaggataaggggcgttagatacagttgtctggctggggagagaagggacaatgagaatgatttatgctggtcattttatgtaccagggtacatagggtgatttttttggtggaagcctagtctgtcctaagatattactcctgagatctaagtgagccacgtgcagctggcaggaagctgaaagctgttggttgggagaggccttaatttttacacttgcccctgcctggaatgccctatcacaggggagggtcccatactggaactggatcaacagctgtcgcctgtccctggaatcacaggaagcggaggacggggtgcctttgtatagggagctctgaagccagacaatagtttgtgctggcggggccatgtggcgagtcatgtgacctggggctgttttctgctggggtccttacccatctgttctctcggctctttctgggttatcaggcgccagtccaagtcctcccaggcagccagcttcatggccagagattacgagcactaaccttcctggcaggggcggtgtggcttcgagtttatgcagattagccatgtgtttctcacttcaaggcgttccacaggaaaagccttttcctgtgtttggctctcagtgggcggttcccagcttactgtactgggactcagcaagcagcaggcatgcaccagagggatcacagtacactggcccccctctccattccacctccaatgctacgtcaccacaacacaaccactcgcgctctcatactgttggtgtcattcattcggtgccaagattgctttaaaaaattcccttggccccagttcaaacaggagtacagctgggatgtgttagattttaggcagtctgccctcaatttgagatgagttataaatagcagtgccgacttccttaactaccgctctctgaggtaaaatgcaggttaattactgtgggaatcaattaggggggttcttttggttaaagagccagggatgcatttttttaattattattattaaaagtcatataacaaatctagccaggaataaattgaaagcacaaggagtaataatacttaaatgtccaaaagccaaggttatagctctaggtttacactagccccaactagttagcatttaggatgataaaatgagtagtggtcaagacttctcctctctgatggacacctttttggcagctcctggcccaaccctctctgttcttattcttgctggcccttggcactgttgagtactaaatttagctccttagggttgccgcctggtcacttctttctatttccttggattggaactggagctttcctcagttggacttttatttaaataaaattatgaagtttctctttcctggtgccactgccacgggtggtacatttttgtgaatggtatatctctgcttagaagttttgagttcttggctctgtcttctctgctctctcctcggtcatggtcagatggagaatttgcagctattttaatctgtgagtttcacaaagtggttactttgggttataagacattcagcccaggtctaccttaaaagtctagtctgttatttcagccgtttttgggggtcattttggttttccttgatgcaataagaagttgtaagaggttccagtagccagctagtctggagggtcttgtaattctattggcttggagcaggggaactccctatgcaaggggtctgtctgctagctgtttgttctgaatatattcggaaggacaagctgctaggcatccttgcctttgatgcccctaaactgcatcttttgatacatttcatttggcaggcagtttataacatggccagtgatctggaaggaggtggtaagtggtagatggagatgaggagttttcttatggctctttcccccttttttatttttattttttatgaatgcaggagagtatatagcagggggcccgactttgctgatcaaggggcagcattttcctctcaattatgtgtctctgtggcagagcctttgcttttgaagtgtaatcacagtaatctactcctgtggtttcccattgaaaggatttcctctgtctttcccagagtggaatctctggctttttgcagctagggtttggagtttccatcccctgccttgtgcctgcagactgctgatactggcttttgtatcttgcatgtagggatttttctggtctgaaattgctactttccaataaaactgattagtgaatatttaaggccccttctctgttacgagagattgggagatggcatttcatctgtaactgcaaatcacaaatatttcacgatggttttaaatgtcataagtgtgagttatgtccctgctcacctccccttctgatttgagcagatgtctaacttttacatgagatcagaataatctgattgtttgaactgaatatatatttagtttgccaaataagctgcatattctgttgatcataagccttttgtgatgggagggagtcaaaaatctgacgaccagaaaaagaaagcatattaattttatttttagaataaaaatttctttgatgtacatttatttttggtctacaaagatttcctaaagttgaggtgggacattccttgaaccctttatagcccccatgtaagtagctgtactcaattgggagcgcaggcctccgtgtgagagaggaaaaggtgacttgtccttagccttttgtttttaagcagtgtatatgaggatgcccctgcagttctgaaattctctctggtataaaccttttttttttttttttttttgagacagagtcccactctgttgcccaggctggagtgcggtggcacaatctccgctcgctgcagcttctgccttctgggtttaagtggttcacctgcctcagcctgctgagtagctgggattaacaggcgtgcgccaccacgtccggctaatttttgtattttagtagagacggggtttcaccatattggccaggctggtctggaactcctgacctcaagtgattcacctgcctcagtcttccaaaatgttgggatttacaggcatgagtcactgcgcccagccttgggtttgtttttttttgttttttttttttttttgagacagactcttgctctgctgcccaggatggagtgcagtggctcgatctcggctcgcttcagtcttcgcctcccaggttcaagtgattctcatacctcagcctcccgagtagctgggacttataggcatgtgccgccacacccagctaatttttgtgtttttagtagagatgaggttttgctatgttaggcaggcttgtctcccaactcctggcctcaagtgatccacctgccttggcctcccaaagtgctgggattacaggcgtgagacactgcgcccagccaggttattcttaaagtgtgcttgttctcccttgaatattctcatccttctttctcatctttcacttcagtccaactttttttctaccttcaaagtcataacccctgtgttagggttagatttaggctatgaccctggctttatggctagatagtttgatttgggctttgtccccatagtgtctcctacccttttttggaataggacagcattgcacattgaacagtcactgagcccaagctctgtactttggtatttgggagagctttgaagataaaacacctgatctctggcttcccagaagttagtcttgagaaatgcaatcagttagttggaatagttagctgcaactaagtgttaaatcttaggatgctaactggatttacaatagggcatttagaaatgttagagatcaaagtgtactgaagatatgggaagtggcttcattttgaaaggtcaagtttctgttactagaagccactgtggacaggagggcagggcaggatgccattgcatagagctgggcatgtacagtatgtggggaatcttggagtgagactgaaaaaatgtggaaaactggttcacattgtagagggctttagagccaggtaaaagcactgttttatcattactgataatcgctaccatttattggacatttaaataccaggcactgtgtgaagtgtgttatgtgcatttaaagaactgatgtgttcaaggtaggatggtgagagaggtaggatttggacccaagtctatcaaattactacactaccctctatgtaataatactgtgcaggatttagtagttaggaagtttggaactattattgaccagggagtggtggaagtgatttgggaacagcattgtcctagaactgctctaacataataagccactagccacatgtagttatgtgaatttaaattaattaaatgtaaataaaaataaaaatttagttcctttgtcatatttcaagtgttgaatagttacccatcacagaaaatgttattggccagtgcttctctagatcactggttcttagctaatagtatacaccagactcattcaaagatcttaaggaggttggagaagagcacaagcccttccagacccagtaaattggaatctctagggagaggcctagccatttgtgaagcttcacagaaaattctaatctgcagccctggttaatagctactgctctagaagctctatagtaaccatggtaatgactgcccctcatgttgtggggagacctagactgacagagatacccagagcaggctgatctctttgttcaacaaaatagtctctccagttggaggccacatggacagcagctgcagtctgtgatgagatgaggacctcagtgtgatatgtggcatgatatggccatgtaagcccccaagctctttacaggggagaatggtgatgttttggctccattgccaggtgtattggggaggaccgtatgctatttattaattgttgttaaattcgaacttcctaagtaaccctaaaatctatgtagctctaaaattatgatagggaacattattggagcttctgatatggatgaaagacttgggcaaaaattgtttagttaggattgttggcaacagtactttaataatattgacatgtagtagtgatttgggacacagttttactatgactttgtacagtttagaaacatgggggaggagtattcccatcatcactcaccaatttagctgagatttcagatatagcctaagaaataactctgcttctcttttttccctttgatattaagaagaacagcctctgtggcttattgtcttacctgttttctttcatgaaagctctacttcctctactataaaacacttaatagcattattaaaaaacaaacacgtacagagaacgaattgtttggatctccccttcctttattttggaggttttgttgttgtttaaggtcttaacagcttaaattatagaatagcttattaattattgaataatagaactggaaggaaccctagggataacctagaccagtcctgggaggtgggttctagcagtctgttttaacaagcctttcaagtgattctgatgcatgctaaaatcaatgaaccactgaactccttcatgtgacggttaatgataggcctagagtatcagtatctatttcacccccaatgtaagagctagtttttaagttttatatcagacccatgcctactctccatcttgtgtgtgtcttaaaggtgcttagagaaacttccccctccccgcacaccaccaatagatataggtagatatttctggcaggggaaagtgtgctctggagtgccagtaggataaaggcatatcaaaaagtgaatgagctggttgaacctgttgctccacaaagagctggaaagaaagctgttgcatcaaatacctgtgaattgaattttgagctttcattattggtgctagctgtacctctctgtcttcttgctcttttttttttaacttccatgacagcctaccattgaatcttcttgtctctcaaagagataaaagttctgttcttcttatatcttcaaactcttgaatattaaaggaaatgagcttttcagttgagatgcacaagactcttaattcagagttcccattccctcaactgtcacttagctgctttgcttatttggaagaaagcataaatttaactgtgccatagtgcaaacaggctatagatgtgtaaggggagtttccactattggaagaatagaaacatctagatgtttgtgtatttgaattccccgtcatggtattgaagcatcaattttggtgtgtaacaaggtgatggcagtgcatagcagcaccgtcctctaccaactgaagggcctttgtttatacccggcctgtcccttggatctcaagcagtaccacagttacaaagtagtttttagcttacaaggtgttttcacaaataggtggtattttcatttttcaaatgacaaaattagggttctgaggcgggtcagttgacttaaaggttactaggttggtctcattgctctttcaaagtaactgtatttctttatagcatacagactaaaaaaacctgtgtacttgggttatatattcagtggccagaggccatcaaagctcaggttaatgaaatgctctttattttgtagccatccagtccaatggatcagatgggcaagatgagacctcagccatatggcgggactaacccatactcgcagcaacagggacctccgtcaggaccgcagcaaggacatgggtacccagggcagccatacgggtcccagaccccgcagcggtacccgatgaccatgcagggccgggcgcagagtgccatgggcggcctctcttatacacagcaggtagatggtgattgtgattaccttgacccttgttgctgtccaaaatctgatctgtgagctatagaatcagaatgtatccttggcttccaagcctcttgacaggaatgtagacctgttggctcagttaattacagagtgctactaacaaagccaaagctataggcaccgttccatgtgtgctccaaggaaaactacttactccctggtcacaggtacgtatctctttttctcttgacctgactggccagcttatacctagtgagtggtcatctctgaatgagatgggatgaaaggcagtggctgaacatgtaggcactgctactattaggaaaaccattcatatcatgtgccctggtgacggaagaggccctttatgcttctgaatacctttaacatatctgccttctggttcaaaatgaatgtgactgggagtagaagaaaaggggaagattaaacagaaaagatgttaacagcattgatacaaatgttaagatttccccttatccatctctttttgtcgaaccattcacatcattatctctttattgtcatttttgtattgacaaagttttctatcatttatctttgagtgatactcatactgaaaatagggagagaatataaaacaaattttacttctaagactttaaagcaaagtacgcctttaatatagaaaattgtctcttttttccaatagaggagagatgaggtaattttatttattttttttatttttttgcctgcttactaaatatatccccagtgcctaaaatagtgcctggtacaagtaattgagtaggctgtcaaatattttttttgaatgaaaactaaatgaaagagagaaccaaagtagcttagtgattttcacactgtctgaattactaaaccttaggttttcagttggttgagccaggctgctattgactattcattgtggttagggtacagattcctaacacttataaaaacagtctaggccgtgataaaaagagttaggctcactggtagaaacagctgctctcaaacttatgttgcccaaatagtaaatagtgtaaattttcagtggataaatgtagtccacttgtaaacaaaccacctaaaaacccagcttggccgtccttcctggctcagtttaggcagggtgagagaaaaaccctgggcctcctaagtatgaggccttgcatgcttgctttctatactcatcatcagtgcatagcttctcacaaaacacttcatctttcctcatgcaggagagtcagtgctaaaagtatattttcctttcctacagattcctccttatggacaacaaggccccagcgggtatggtcaacagggccagactccatattacaaccagcaaagtcctcaccctcagcagcagcagccaccctactcccagcaaccaccgtcccagacccctcatgcccaaccttcgtatcagcagcagccacagtctcaaccaccacagctccagtcctctcagcctccatactcccagcagccatcccagcctccacatcagcagtccccggctccatacccctcccagcagtcgacgacacagcagcacccccagagccagcccccctactcacagccacaggctcagtctccttaccagcagcagcaacctcagcagccagcaccctcgacgctctcccagcaggctgcgtatcctcagccccagtctcagcagtcccagcaaactgcctattcccagcagcgcttccctccaccgcaggtaagatatccctgcctcctgcccttccctgtgtgtgactacagacagcttgggggttagtgtcatgagaactttgctgtacagagtggttctctaacgtgcacttaaagaccaattaaactctgggtaaacatgataactggattgattgaactaataaaggcataacctccttaactgcataaagacctgtagctctccttaatgatgaagaaatagggcaatggaaagttgcatagatggataagaaattaaagataatgggactggtttttttattttattttattttattttattttgtaaatcaacatcagaacttcagcatctaagtgagttggtcttttttcaaaacagtcactttgagaggcagtactgtacattcactccaactgccattccattctgctatcgctcaaaatacttggatcccttcatttggaattgccaccagagctgataccacattctttagaatactctcagtggtggcaaatcttattttttgtgggtggattttgtttggggaaatagcaaaaattcatttggagttatgtctggtgaacaagatgtaggtaatagagcctaaaatagcatttggggctttatttttgtagagcccaaagaaaagagatgactgagtgatgacaggtccactaaaaagtttatgtattggtggcactgttggaataaatatctcatcccaaggtgatgtctttgaatgaagcagtactcattttaatgcagaggttctagcatgatttttttgtggtttcattggtctcattccttgatagatttaacttgaagttggccagacattagcatttaaccccaagaaacagccctctgtaggcagcaataaatgggtgacaattctgtcagaaagagtccactgttgacattcttaccagtcacagcttggatttttctggccttcacataatacttttcgcaactggactttctctcacactcatgagagacagtcccataaccctttcacagtgaagtaagcctgcctggtttatcaataccaggccatcacagcttttgtttttcttgttgtaggagctatctcaagattcatttgggtctcaggcatcctcagccccctcaatgacctccagtaagggagggcaagaagatatgaacctgagccttcagtcaagaccctccagcttgcctgtgagtatttctgcaccttctgaaaggtgataggggcagagaggaaaccaatgcaaactagttagtttctggttggaagtttagctaattttgacctaaatgaataagttatttcttgaattcaaggaacttaaaggctgacttgtagatgtctgttctgtctccctgcccagggaataggtttgtgatctgtttagtttgtttttgtctttttaagtcttgtgcttttagacatggacccacatgaggggcagagaagatggagatatcagaagcactgtctgctctccatcaaagttgagaaaaatatcagtttcttgactttactcttacaggcttaatttttaggtttttggcttaatgtttagctacaaggtaggatcctggagcaattcagcatgcattgtcacattgagcgtggctggagcaaaagcagtttttctggtggtgattttgtgtgaatactttttttttttatttttggtagagtacttgatgcccaggtgcttaagttatggaatcaggtacttatttatgggatggactgaccatatcctgagacaggcagtatagtctagtgattaagaacttgggctctagagccagagttcctggctctagcttctgccaccaactctgtttcataggggtggtggtgaacattaaataggttactagagagtgcacacgagcactgcacattgtaggcactccataaatgtcagcctttgtaatcatcgcctcagagggcattgggactgtgctttatacctgaaaggcagttaacaccatactaggtggttgtaggaacctttactgttagtcttagctctgtgggcaagttactcagcctctgaaagttaatctgctgggcacagaaataaaataggctactctgaaatctagtcatctagtaagatggtgggtagcaaacccaccatgacaaatcctgcttcagttaggaaatggaaattcagccacatacccagataagaatcttttggaattttgactctacttggatgtaaagcctgtgtcttcatttattctgacctgagagaaatggtttcaggatctctaagaaataggcagaaggcgggaactctcttcatcatgaagcctcccatggattcccctgaaggtctctgagacacctcaatagggcaaggtctgcagagtcccttagtacctggtgttcaggcttctgaggccagaatgcagataggacgtctgagattgttgactttctcaactgaggaattgggggaaggaagtgccttaataaagtgatcactctttgttcccttctcattagtgtctgttgcaatccttttctgcatcctgaacttcattggaatgtgctttttaacctgattcagtcagaatgtgtaaccactccctcatcatctgtggtctgtggctaaatctgggtgaggtgctattgtgtcaagaacccaaatcggtggatttctgtcagtgctgtaagttgcttcattccaaaaagtttttgcttgcttctggtgaccttttgatagatctgtatttggcttctttttttttttttttttttggtcctgagaaggcttgtatccagagatgctacatgccttgtaagggttgggaatcttaagaacttcttatctgacccactgaagtgaaggtgaaggtgttggcagccttttaggcccaggggatggttgttcctgggaaggctatcacaaggaacattcccacgtttgggctttttctaaagattcatccaaatgggtcatttgctcagtggtagaagctccatgtgggaggtaagctggctgggttattggcatcttgttttttgaattgctttttatccctttgctacttgggcaggcatcaaaaagtggttattctttgaaattttggtttgatgccagatttgcctacgcaggctaggaagcagccccatctgaagaaatgacaagttggattccctacaagagccctctcctttcttaaccagtcgtgttaaaggatccctaggtttgccagtgcattgcttcactaaacaaatgtttatgaggtacctattggcaccagagcagattccaggctggctggagagcagcccctcagatttcacattgctctccttactcattcacgttaccttcctggccctaaaggcattatgattgtgacccttgaatattacaaaaattaaattttgaggagtctgtgctcagttattgatgccaagccatttgggtgctattatcctgatcatgttatccctatatttaaacctctcaattatttttttgttaatcttagaataaaatccagaatttttttttttttttttttggggggagagagagtttcacactcttgttgcccaggctggagtgcaatggcacgatcttggttcactgcagcctccacctcctgggttcaagtgattcttctgcctcagtctcccgagtagctgggtttacaggtgctcgccactacgcccaactaatttatttatttatttttggatactgagtctcactctgttgcccaggctggagtgcaatggcacgatctcagctcactgcaacctcagcctcccaggttgaagtgattctcctgcctcagcctcccgagtagctgggattacaggcgccctctaccacgcccacgtaatttttgtatttttagtagagacgggtttcaccaggttggccaggctgatctcaaactcctgatctcaggtgatccacctgccttggcctcccaaggtgctgggattataggcgtgagccacctcacccggcctgaaatccagaatctttaatgttagacatcagaaacacagattgctgttccctctcagctcccatcccctgtgtctttctcattcagtaggtctggagtggggcccaagaatgtgcatttctaacaagttcctctgtgattctgttgctgctagaccagggatggcactttgagaacctctactttattcttttttctctgccttgctcttggctttctttcagtttctctaaggcaccatatgctattttttgctttcagacctttgcacacacccttccctttgcctcatacttttcccctcaactcctcctgttcatctttcagactatatcttaaagattgttccttcagaaaactactacctaatcaagcttcaagacgcaccttaaataacttctatgatgacttcattgactaaaggccattgttattttacctttaaaaaaaaggccgggcgtggtggctcacgcctgtaatcccagcactttgggaggccaaggcgggcagatcacgaggtcaggagatcgagaccatcctggcaaccatggtgaaaccccgtctctactaaaaatataaaaaattagccaggcatggcagtgggtacctgtagtcccagctatttgggaggcagaggcaagagaatcactttagaacctgggaggcagaggttgcattgagccgagatcacaccactgcactccagcctagttgacagtgaactccatctcaaaaaaaaaaaaaaaaaaaaagtatagctgggcgcggtggctcacacctgtaatcccagcactttgggaggccgaggctggcggatcacaaggtcaggagttcgagaccagcctggccaatatggtgaaaccctgtctctactaaaaaatacaaaaattagctgggcgtggtggcgggcacctgtagtcccagctactcaggaggctgaggcaggagaattgcttgaacccgggaggcggagattgcagtgagccaagattgtgccactgcattccagcctgagtgacagagagagactctgtctcaaaaaaaaaaaaaaaaaagggcacagtggctcaggaggccgaggcgggcaaatcgcctgaggtctggagtttgagaccagcctgaccaacacggagaaaccccgtctctactaaaaatacaaaattagccaggcgtggtggtgcatacctgtaatcccatctactcgggaggctgaggcaggagaattgcttcaatccaggaggcagaggttgcagtgagccaagatcacgccattgcactccagcctgggcaacaagagtgaaattctgtctcaaaaaaaaaaaaaaaaaaaaccctgcacaatatataaggcctacaaaaactataaagaacagttcagtacctgagtacccatctgtagaaatcaagccttgctaacacaggtaaaactttatatagctctctgggatcacttatccctcttggtaagcaccatcctgtatttgacagagcattttgccaatgccctctacctgtgcttgctttttttttgtttgtttgttttgagatgggggtctctctgtcacccaggctggagtgtagtggtttattctcggctcactgcagtctccacctccccaggttcaggtgatcctcccacctcagcctcctgagtagctgggactacaggtgtgagtcaacatgcccagctaatttttggactttttagtagagatggggtttcacgatgttgcccaggctggtctcgaattcctgagctcaagcagtctgcccgccttggcttcccaaagtggtgggattataggcatgcaccaccttgcctggcctgactctacttacttaaatggtaagttcctggaaggcaggcactgtgttattgacctctgtgcccccagtacctatcatgtgatgcccaagaccagtggttctctactgtgtctgcatgttagaattacccaggggagtgtattatctttaaaaattaatgcccaggcccgagcacggtgcctcacgcttgtaatcccggcactttgggaggctgaggtgggcggatcacctgaggtcgagagtttgagaccagcctgaccaacatgaagaaacaccatctctactaaaaatacaaaattagctgggcatggtggcacacgcctgtaatcccagctactagggaggctgaggcaggagaatcgcttgaacctgggaggcagaggttgcggtgagccaagatggtgccattacactccagcctgggctacaagagcgaaactccgtctcaaaaaaaaaaaaagaaaaaattaatgcccagagttcacagagttctgatttgtttcatgtggggtttgggcattggtgtggttagcagctgtcccaggtgaatcccgatttgcaggtagagatctattccagactgtatgaggttcctttgctatagtaaactcttttttttttttgagatggagtctcactctgtcacccaggctggagtgcagtggcacaatcgcagttcacaacaacttccgcctcccgggttcaaacgattctcctgcctcagcctcccaggtagctggaattacagacgcccgctaccacacccggctaatttttgtatttttaatagagacgaggtttcactatgttggccagactggtctcgaactcctgacctgggtgatccacccgcctcggcctcccaaggtgctgggattacagccatgagccacggtgcccagcctatagtaaattcttagcacccatacttcttgttagtacttatctcaagtgtaatttaaattacttatttaatgcaagttcattgaggactgacttgctgtcttgcttattgccatagtgcctggcatctggttgcttattgccatagtgcctggcatatagtaggctccaacttactgaatagatgaacctgagcagcatccattatagtgctcattcaggaagtatacatctgacaggagcagcttgactgtattaccagagtcttgctctgtcacccaggctggagtgcagtggcacgatcttggctcactgcagcctccgcctcccgggttccagcgattctcctacctcagcctcttgagtagctgggattacaggtgtgcgccaccactcccggctagtttttgtatttttagtagagacagggtttcaccacgttggccaggctggtttcgaactcctgacctcaagtgatccacccacctcagcctcccaaagtgctgggattataggcgtcagccactgcgcccagcttctgtaacttttcttttgtttttttttttttttttgagacagagtctctgttgcccaggctggagggctggagtgctggagtacagtggtgccatctgggctcactgcaagctccgcctcccgggttcaagcaattctctgcctcagcctccctagtagctgggattacgggcacccaccaccacgcctggctaatttttttgtatttttagtagagatggggtttcaccatcttggccaggctggtcttgaactcctgaccttgtgatccacccaccttggcctcccaaagtgctgggattacaggcatgagccactgcgcccggcccagcttctgtaacttttcttactgagacacatttgtaaatttacattttggtcttgaaagtgtacctaggatagagtaatggaaaatggatacaggattgaaagctgtgatctgaagaggttagctagtgcttcacaaactttagcgtgtgttaagaatcacctgaattactgcctctacctgagaaattctgattcagtaggtgtgggctgggacctaagaatttgcatttctaacaagctctgaagtggtacagatgctgccagttcagaagaccacaattggaatgagactgaagtaggtagtcacctttaagggaaggaaaaaaaattactagactaggaagccacagcggtaactagaataatagtggtgatttacactgtagtttgactcttgattatttggaaggcacactgtgggttaagaatggtagaaagaaaagagacttgaaagaaactagacttcctgtagctgtggcctcagtgcagtttattcctgggtaacggagcccttgccctgccagtaccaccctgggagctcctctgctctatggtgctcatcactggatcccttcctttagtggggccaaacttagttggtcaccaaatcttagtctaccacagaaatggtttttgcttttgaatctggtttcccctctctttctccactgccttttgttttttcgggtccctgttatctctcacctggtgtcttgccacaaacttctgactgttctgtttcttttcttcctcttttccttccaagtctgtcctcagcataatcaccagagtgatcatcttaaaaaaaaaaaaaaagaaaaaaaaaacctggccaagttatgttaatgctttaaaacctggctacgtgttgtctgtagatttaagtccaagtgtgacatacaagtaagtttttttgggatctggaggatgaggagagatgtaggtaagtttcctgtccctggagtaaaacctggcacactttttgctatgggtgttatgtagaagacaaacagacatttgacaagggttgaacttgtgtgacttctgaggtcatttgaactcttgggtccatgattccgaatatgatacgatgattcctaaaggatcctcctgtgtttcattagtaaaatagacataaaacagaagaccatgtgcctgtatgttataatgagtgctgtcagagtttggtgaagtcactgatccatttatgtctcaatagttgaaggaagaagtcatgttgaagttcagtcagtatgagctagatgtggatgtatttaagtggttagttacaaagggaaagtccagcttgaacagaggccatgcagggatggggatgaggtgcagtatagatacttgggggctggtcagcttccaggggtgggaagtaacaggaaggaaagctagatcacagggatcctgctgagcttaagccatttagatctgatcttatgggcttgcagataggtaactggggcaatcatgtgataaaactaatgttttacaaaaatgatccattagtttgtagtatgctttgaaaacgggagagtcttaaagcagtggaataagttaaaccgtagaactacttctggcaagaggtatggagttctggtccttctgtctcatttgcatagccacctgctcccacatgtggaacatgcaggaaagaatacaggactgagaataagtgggttctgtgtggtggaatatttaaagattttgattgactggtgggcagggggagtctcatttttgaggaaaagttaaattccatatttattttgtggaatataatatagtaagatttctgaaaacaaatgtccagtttctagttggagataagaaactgaaacttgggtaagacctgagtctggatacaagtttgcgagttacctgtgtggtagttaatagttaaaccatagaatgaaacaggcctcctaaactggagtttagagatagaagccagatggagctctggacgatgccggaggccatcaggtagaagcagccaacagagagttggagagatcggagaaggaccaggattgtgtaatatttctggaagccaagggaggagggacgaagtcaaatttatatttcaaagaaaataggtagttgggtttgtcataaagcattttattgggatcctttttagataaggaaaaggccttatttctgagggcttgagaaaaggaaatgagcaagggaaagggaaagagcactcttgaaatgcactgagaaaaaggagagtctggctgaatcagtccaattcctccgcttcatcccaaagacccgcatgtgtataaggcagatggaagagggaaaagtgaaggtgctggcagaatattaggagggtataaacaggcacatctttctggagttgtgagaaaaaggaatcaaaggcatccactggattaatttctaagggacgctatacccttggctgaaaaaaaggtaatcttaaagactgttgttgaagattggatcatactcatttcctcaggttaggtaggagtgaatgttatcgatatcaggagggaggtggagaacagaattaggatctgtaatgtctatcaaattatcccttgagtttctgagccattctttagatttcacttaacatcttagctattacccttcgtatttttacttctgtaatgctctcagacgctgagatcttggaattacattggtctagaaagaggaaatgcgagggagctatgctgtccctgtagaatccagattttagagggcaggagtaaggccaggcaaggagctacagtcaacatcagttattctgaaaagataggaattggaaggtacagaatacccactcctgttttacatatgaaaaaccaagggtcagaatcaagatttgaatctagctctgatatttcaggtgaaatatttcctccagcatcccacccagtagaggaaagacatggacaatctgatcctctcttcatttttaggcaaaaaactcaactctttgccatttagcatttgctagacttgtcctaaaaggaatgtcaatggatttccattttacttctgttttcccagacatccctgtgatggaggcacagatgagctgtggaaagagcgagtggtaggaaagatagccaaacctataggacctgcttggaggaactagccaactagggaatcgcctcaaacagtgaaccgttgactagagtttggttatttggttcctgtgtgggatgagagcaagccctgttctgtgtctgtcttcttagaacatactgtcctggtcagtgctaactttaatcagttagatccttgctactcagtgtggtccattgtctagaagcaccaacatcaccgggaagcttgctagaaatgtagattttcaggccccatcctagatttattggatctaactgttaataagatctctaagtgattcatgtgtctaatggtttagaagcacagagaccctgagagctgagagtaaaattttcaaatgaaatatcaagctggtaggccaggcacggtggctcacacctgtaatcccagcactgtgggaggctgaggcgggtggatcatgaggtcgggagttcgagagcagcctgaccaatatggtgaaactccatctctactaaaaatataaaaatttagctgggcgtggtggcatgcacctgtgatcccagctactcaggaagctgaggcaggagaatcccttgaacccgagaggcggaggttgcagtgggctgaggtcgcgccactgcactccagcctatgtgacagagcgagactgtctcaaaaaaagaaatataaaaaatatcaagctggggctttggaacgtcataaattttacagattgtatccagtaatatttaagtaatctctgagtgtgggagaccaccaccagttgtttcgtgcgtgttttggggaccctggctcccagtgccttacccagttcagaacccatagtggagccatccacagctcccagcatacctctgcaacttcatctccagccactcatttgtaccttaagctcctcacaattcctggtcctcttgattaggatgtatacctgtttctctctctttctgtcatgctcagcaaacttctactttggcttcaaaacctagctggaatactctctctgagacttcttccccattttcatattggcatagccttatgctggtacctctgcttgaactgtatctgacatctgtcatgttgtgcccagaacaggcagatatttgtaaacctttgttgaatacctcctagattcttgctacctagttgagctttgggagctgacgttttgttgtttaggtttattgagaggagtgacaaatcctctcaataaatgctttaaaaattagaacatttggctgggcacggtggctcacacctatagtcccagcactttgggaggctgaggcgggtcatcatgaggtcaagagttcaagaccagcctggacaacatggcgaaaccctgtctctactaaaaatacaaaaataggcaggtgtggtggcaggggcctgtagtcccagctactcgggaggctgaggcaagagaatcgcttgaacccgggaggcagaggatgcagtactccatctcaaaaaaaaaaaaaaaaaattaaaacatttgaaggattttaattttacacagtttctgttcccttttgttcatttcatgatagaaggagagagggcccacagtccttatctaggtttttgatggttgattttcaaaaagataacagaaatgtcactagcgattttggtaaccagagaagcagggtctttctgaggttggtgacctgttttctttatagctgaccatgtatctgtgcctgctccccttgaattatagcccaggtgctctctcagagtctcgaaaaggaaatccccaccccctctgtcatatctgcccagactgctaagagcagcatgtaccctgtgcatgtagccatcccttctctagaacgctggttctctgggctggactggccaatccgcttctccatcttagtcacactgttccaaccctgatactgcctgctgactgcctgagcctgtgctgcttgcagcagattactgtatgcttgttcctgggcccatttcctgtttctattctagtcgctggtggctcagctctgcttcctgcctgtgtgtctcacacagattcctcttgctggaaccttttgtttccttcggaacagcctcaatctttgaaaagcaactgagccttaactctagtatgatggctcttgagtcacttagtcctacagaggtctggctggaagtacctcttccccattaagcacaccgtttgaattttaccttgtttttcagtttgtcgtcagccctgctgtaggaagttaagttgggccaaacttgtcctcacttattagtacacagagctatcgggactggtatgtcctgattcttttgtacctggagcttttaaatgtatttcctactactcaagaagacacttggtatcctctctggcccaagcttccctgaagcccaggtgatacttattttgagttgggcaggttatgccatcctcagcagaataacaggctgcagaaaacatagggatggaaaagaaagcgtgtgctgactcaaccctccatcctgtgtgagcaattcaaaccccccacccaccccctcagagcttagggtgagagagagaaagtacagtgaggttgtaaaaagggaagaagtgaaggaggttgtcctggacaaatgtatttaaaggcctaaggctcccccctcttgcccatttcctacaaaaaatatgcttcgtgaataaatcttttttctcttcctttacagccactcttttgggatcatttgataatactgagtcagaggatttctgtactggaccctaggtctagctatgtttaaaagagagagatttaatatagggaatttgggcttacaactggaaggagtgagggagcttgctctaggcttggcctccaagaaaccagacccagatttaacctagatttgacctaccaggggaacgtctatctcggagctactattagattgattgctcttgaatcatacccctaaacctgtggtccagaatcagtaaactggaatcaagaagcagtagctgctgccgccagaaccagcacccagttaagtggaggatggaaccaaaatgctcctgcagaaacaagtaaaggagacagaaatatggtctctgcttactttgatctaatctcatgagtcagcttctcattagcagaagctgaattgtatccaaaaccaagggattcttggaaatttcgtttttaagctttttaacctctacaattagagaaagaatagaatggaggctgcatgaactagcccaacagaatatttacaatactgacaccccattcccgtctcccctcccacccccaactttacatatgacgaacctaaggcccagaaagggcaagagacttgtccagggtcattcagtaaatgagaacattggattctctgactgctagtccagtggttctactgttgcttttactgttaggaccaactcctgtacaagaccagcaaaaagatcctttaagaaaaggccgcaggcacggtagctcacacctgtaatcccagcactttgggaggttgaggcggtgagatcacctgaggttgggagttcaagaccagcctgaccaacattaagaaactccgtctctactaaaaatacaaaattagccgggcgtggtggcatgtgcttgtaatcccagctacttgggaggctgaggcaggagaatcgcttgaacctgggaggcggaggttgcggtgagtcaagattgtgccactgcactccagtctgggcaacaagagcaaaactctgtctcaaaaaaatagaaaaggaaaaatgccatattcagaaaatggactttgccttccgtattctctttggagaaagggaaggagttatgaacagatatgaggttgagatttctagatttctaggcaaagttaatgatactacagcttctggatttagttctgttctccagaaggatataagaagcatttactctgaaaggaagaattctcaaaaactagaatgtcctgatattccttagtcatcatggatgaactcagttgttgtagtgacagtggctcaccttcacctattcccccttgccttttcttttgctgttggtgcttttctgtccaaaaagatcaaccaaaatccagaaaaccagcccccagatgtttggttgcttagctgtttcatgtctgcccttggggagacttgggtcttttgaacagaaaatgagccaagtccacccagaaatactatctttgtagaaaccactagggtcctttaagccaaggtgagaatctgtttcttcaaacttggcccagaggggaggacctgtaggtgtggagctatgttaacatatctggccaggcgcagtggctcacgcctgtaatcccagcactttgggaggccgaggtaggtggatcacaaggtgaggagattaagaccatcctggacaacatggtgaaaccctgttttagtaaaatacaaaaaattagctgggtgtgggctgggtgcggtggctcacgcctgtaatcccagcagtttgggaggccaaggcgggcaaatcacctgaggtcaggagttcaaggctggccaatatggtaaaaccctatctctactaaataatataaaaataagctgggtgtggtggcaggcacctgtaataccagctacttgggaggctgaggctgaggcagggagagaattgcttgaacccgggaggcagaggttgcagtaagccaagatcgcgccactgcactccagcctggtgacagagtaagactccgtgtcaaaaaaacaaaacaaacaaacaaaaaaaacaacaccatacctgataaatcaagcgtagaattagccctattgtttttttctttgtgtctacgacatactagaaagctgtgatgaaatcgatatgtattctgttgccatccctctggggaccagtgcttggtctcctaatccccctactcgatggcctgaaagtgtttcatcttccctgcctgttatcagcatagaattggttggtattgtgacataatctgattgccttgaggcagagcttacctccaagctgctagcttccttcccatttgacctttcccaaagaagctaagaatccatgccttgttgaaggtgggaactaggggttgaaggcttaatcttgagagtcagcgaacctgtcccttaaggccagctttgatgtgggaagaatattgaatattgtttactgagatggagatgggtggaggtaatttttcctgacattttggggaaggtaagagaaaccaaatttagactgaaagggatcagtggccaggtgtggtggcttacacctgtaatcccagcagtgtgggaggctgaggcagtaggattgcttgaggccaggagctggagaccaccaccctgggcaacacagcaagatccccatctctaccaaaaaaaaaaaaaaaaatagttggccatggtggtgcatgcctgtagtcctggctacttgggaggctgaggcaggaggatcgcttgagcccaggagtttgaggctgcattgagctatgcttgcacgactgcactccagcctgggtgacagagcaagaccctatctgaaaaacaaacaaataatataggtcaatgttcagaggaaccattatcaagaatatttggatttttatccctcttattttctagaacttgattatagctcccttgtgttcagagttgttcttttcaaagtcctttgaggttgtattctggtttaagattctatccatttctcactctcagatctgtttgttccaccctctccccctaaatatttggattttatatagaccagtaggctaaggtagggaagaccactgacaagtataaatttaagagtttacaaaaccaaggaggccatccagcccctagttctaagccatgttcagcacagtgccaactttgccttccctggctgtccttgcttgctttctggttgctgtaattctgaggggcaaccaggcttgctgtagagaggagagccagatgatgtggaagcctaaggcaacaccccctccttattacacttctcatacccagaactctgcttgctttctgtgttcctttcctctcactcccctttcctgccctctttactcaagttctaagattatagctgatgatcttcataatagaacaaactctgtttggttgaccttcctaacagggaatgcttggctttgagaaagtagggggttcctaacttctttgccttctctagctttacagtgctcttacttcctgctgggattagaacagccctattccataaatatgcactgctcttggctgctgtaactcaggcccagctctgacccagattcttttttttttttttttttttgtcagatttgagtctattaactagtgaccctcaaaacacttcatacatttttggccaaaaagtggttactgactggataagacagaagcctttggggggcagggtgactggtcgggcaggtaacatggtattatacaggcctgatggggactgtgacaaactgaaaagcagggtttcaaccagttagcggcctatgggagttccagaatcatcatcatcatctttttttttatttttatttttggaaaactctcggccaggcgcagtggctcacgcctgtaatcccagcactttgggaggccgaggcaggcagatcacgaggtcaggagatggagaccatcctggctaacacggtgaaacctcatctctactaaaaaatacaaaaaattagctgggcatggtggcgggcacctgtagtcccagctactcgggaggctgaggcaggagaatggtgtgaacccgggaggcagagcttgcagtgagccaagatcgcgccactgcactccagcctcggtgacagagcgagactccgtctcaaaaaataataataataataattctctggggtctgtgggtctgtccctgcagtgtcttgtggactgccccgtgtagctttggctctctcttggatttactccctttgagctggtgcctagaatttctccgggggtaggggacagctgtgaggagcaccttctcatctatcctttgccagttctcattgtgtttggtgtttgttttatttgtttgttggggggcggcggggagcgacaggggaaatgttgagcagaagcactcgatgtgattaaacctccggctgagcagatctgtaggagtagaatatcgacccctggaaaatcaatggctgctgcagtgacccagccgctgtttgcaggggctaccaccacaggaatgcaagcagcccagcagtctttcttctccccacctttttacctcagcagtgccctcagcctccacccagagggtcagacctgcctcaagagattttgcagaggtgggttagaacagcacgttctcgtattttcacaattagattgaaatttctccagtgacacagagccctgcctctggcagcctcctttccagacattccttttctgcactgctgcagttctagcaacagctcttaccaagttgccaaaacccattcggggttgtacttctgagttttaaacaggagaatcaattctcttgataccagcacccaagagcccctcccttgtggaggtctagaattcaggtactggggtataggatgggggaatagagattaagggaaagaaagaggactaatagaggttgtgtctaaagaggatgcttttgagtagataattcattgagcaacatttatcaagcatcttgtcgtttgtgtgtctggcatctttctggtcactaatagcctgatcttgctctggtcccacaggctagtggagaaaaagggcggatagaacacagtgccatcagtcctgtaacactgcttctagaggagcctcagaggaactctgtgccctgcctatagggtgagagtagggaactagtcctgtgacttgggtcaaaatagatggtttaatagaatggctagcagatctctgcttggagcatggaggcttctgattcctcactgcctccacaaaactgttttcatcttggaagttcccaaggctaaaaaacaattttagcctttagttgttgtacctataatgccaattctactctggtggttgggaaaccagccagcctgatgtgtgtgaaaggagagctcagttgccctattgttggagcacctctgtggccagagggttgaagcttgcttggcttttaaagcctctagaaaggagccttcccgtcttgtagcttggagagtggggtccctaaacaaaacccaaacatcctgcagtttggaagggtggctgcagtgctgggtgaggaggaaagtgtgagggtttgaagtggcctaagaggaggccatctagaggccaggaatatcttgattttttttttctctgtgagccacacccttgtgattgataaaaggcttagaacatattcagtttgaatacccagcagagaccaggctcctaccttcatgggacttctaccttcatgggacttctgcttgtttccctacattcaaagtcaccctccccacagccctctgtcctcttacacattaagtaccctacagaaaacccaggggtgagaaaaagtactgtaccctttaatttagcatagaaaaattaggttgaagttgaaggttatcagtgaaagggctgatttgaaataaaggctgaaagttatagcaagagtaattaggaaagaggggggccgggcatggtggctcacacctgtaatcccagcactttgggaggccgaggcgggtggatcacttgaggtcaggagttcgagaccaacctgatcaacatggtgaaaccccgtctctactaaaaatacaaaaattagccgggcgtggtggcgagggtctgtaatcccagctactcgggaggctgaggcaggagaatcactagaacctgggaggcggagattgcagtgagctgagattgcaccactgcactccagcctggaggacagggcaaaactccgtctaaaaaaaaaaggacaggggaacacatagcatcacagatttgtagagtttgattatctagtgtaagtctttccttcaataaaggagttaagtgagcctcgtgaggttagccagttgagtcaagtagctaatcacgcagcatgtctggtgatataggttgttggccttacctctattggagcatggaacccagcctttgatcatgtcaagcttctattaataccttatggaaagagtgtaaagtaataatggatttgaacctcaggtctatttaatagctgtctgtccttgggcaagtcacttctgaacctgcttctttgttaaaatgggggtaatacctatatcagaagatgattgtgaaaattaaatgagagtcaaccactcaccttagggttgaatatgtgatagtcacatattcatgtcaattctgcttcctttcaaaaggaatatataaaggaactttattaactttatctaacatcctttgtatttggagatttggtctccagagctttctttatgaattctgatgtgtatatagggagtttcctcttggagacgggcccctgaaaagcattctggagacaagaagagtcttaacccttctctcctgtgtcttccccgtcaggtggccaaaaggtatcaggaagaatgaatcattatcttcagaacaatagcctatgtagaaaaagagaagagggagtttggtgggggatttcatcctatgcaatggtttctaagatacaaaccaagtttttggaaacttgacgggggcaagtaggaaacacatttttctaaacctttcctggagtagtttctgctgttccaaaccatggaggtagtccatgtaggtgatagggcttggtcctacactaaaagggtagtgtcaacctctgcatcttttcttcccgttccttagtacctgcttaattaacttctgacctggaattaccaccgggtgtgaaaggcagcctattctgtgtgttgattctttcttggcatttcagttaacatcagcaagcctgctctctatgcataggtggcagttaatctgttggattgagaccactccgtggaataatgtcacagcagttctgtaacttttggagtccctaccagtctggggtgggtcaaatttctctttcttacatttatagcaaagactaaggagaaaaaaagaacttatgactgaaactttattgtacaagtgttcagtagaggtagtcccttctcctctgctaccctcaacaagttgttgcttaaggaaggttttatgaaaagccaagtctcccaaaaacttatttgccttaagtaattaattttgtctcagtttttcttccttagagtttaaggctattgcctcctctcctaccttttccttttcttcatgggttatgtttcccagtctcttctgtgttcttcaggatttcctcccattcttcagcatgagagcagcctaggggcggggcggggataagggactgacaaattactagtgtagatttggtcattatggaattttttattcaagtattgtcatttaagtggggatggctgagctgcaaggttcccagtgcacacacttactacaggcatgtgcgtaggatttacctggttctcatgacgggtggtttacctgccagtatcagcacaactcagcaaaagcttttcccaactaaatgggtacaagaactccatctgggattccccaaggatttagccagatttatgggaaaaccctaaatctgagcattgccatgagcctattctttatacttaacctgttgccatttaacctgctcagcaaaatgaactgatgtcatcctcatgtggctctattgggagataatttaaacttccctcctctaaccctgatctggtgtcttcctgcttaaaaatattcttcagtgggcagccaattcatcttagaacttgcagttcttcctgtgagagtaccagcacccccaccgtccctaccccacaaaataaggtatggactgtgtgatttcaggcatggttttgttgtggtgtgaagagaaggtgtttagctgctgagttctgtttgttagcagagcctgacaaactcatgctggcactcactagggctgggcaaccaatcacagctgggacggttatcgtcatggagtccctatgggcttcctctatcaggtcacatcccaaaataacattgggcagtatttcaactgaagaaatgaaggctttcagggctgtagccagcctggagtgtgagattctgtgtgaaatagttggatctgctccagcgcttttgatctgcatggtagatgagcaataaaatgcacaaaacacattggaaacacgtgaggaaattctcctggccctgctgcttccttggaactggtagggcactgagtgggctgatcctcacctcccatctctcagcaggattatacttggaggagaacaaacccgggaaaagaaatcttcccattaaaggggcattgctacagttatttccgcagtccttccagaagatgcctgttaggtgtgctcttttgggagaattgagaacctgagagtcctgagatgccaagggcatccctcaccagggagaataggggcttggattgcagtggcgtgatctcggctcattgcaagctccgcctcctggattcatgccattctcctgcctcagcctcccgagtagctgggactacaggcacacgccaccacgcctggctaattttttgtattttttagtagagatggggtttcactgtgttagtcaggatggtctcagtctcctgaccttgtgatctgcctgcctcggcctcccaaagtgctgggattacaggcatgagccaccacacctggcccgactgaactttttattaatgataaatgtgttgtagaaaactgaactgttaggaacattgaggtctgactcaacaatcagacatctggctttttgtggaacaaaagacctgaaaaactggctttttgtagagtagaaagcagaggtgtgtcctgtgtaataaaaggatgtggagctgagagcaatatctgttcatgtagatagaggggcaggacatcttttggagacttctgcccttaccactccctcccatttcccaataaaaatatttactatgactagccactgggactggtgggtatgtcttagaacttatattgctggtatgttgttatatctctcattccagaatattgctgctggtcgtttgaccctgaccatatggtgctaggggggattcatgcatatgccccaggggtgtcatagacttagatttatccagccccctctgattgtatatgtgagaaaactgaagcctgacttgttgccagtttgcctaaggtcacaactgataagtaccaaaagctgggccttggtttcctaactcagaggcgtgacctttctcctcagttcatatagtgtcacaacataatggagagagaaagccagcatggcctatggggttcagcagtcccgggtttaaaatctggcttccaccacttgccagatgacctaagcatgtaatccaatctctttaggcatcagcttcctcatcttcaaattggtaatgtggctgggtacagtggctcacgcctgtgatcccagcactttgggaggccaaggtaggaggattgcttgagctcaggaatttgagaccagcctgggcaacatggtgaaaccccaccactacaaaaatacaaaaaaaattaaccaggtgtctgtagtcgcagctactctggaggttgaggtgggaggatggcttgaacccaggagacagaggttgcagtgagccaagattgtgccactgcactccagcctgggtaacagccagaccctgactcaaaaaaaaccaaaccaaaaccaaaatggtaatggtagtagtatctataaccaagacttgtagaaaattgggtaactttgctaagtgtctggcatatagtagatgcttaaatggtagctgtagttaatcgtaaatgatttacccctttctatgctaacattttggctcttaaaattatttgaaaccaactatctgatgctgaccagttgccatctaatgaaaatgacagtttgagaggttggcctcaagccaaccaaatcagagagataagaagattaatgctcttccttccctagtatttttctatacccaggcatcccagccaggtgggactactgttgacagtggtttatttagcactttttctccaagaagctcagggcactttaccaaaagtgacagctctcctgaagaaggggaagccacctctttgccagccacagatgcctccagagttctgagaccccagccccaagagctacagaggttttctttaggctcctaggatccctcaggtggaccaggggcattctccttttggatctatggtgagcctggttttttaactgaaagtgtggctgaaaggacctcctcagttcttgccctgagctgataggagtggttggtgggttttggttttttggttttttttttttgagatggagtctcgctctgttgcccaggctggagtgcagtggtgcgatctcggctcactgcaacctccgcctcccgggttcacgccattctcctgcctcagcctcccgagtaactgggactgcaggcacctgccaccacacctggctatttttttgtgtttttagtagagacagggtttcactatgttagccaggatggtctcgatctcctgacctcgtgatcctcctgcctcggcctcccaaagtgctgggattacagacgtgagccaccgcgcctggccaagttttggttttttgttttgtttcttgttgtttgtttttgtttttttttcttagcgcttcagtacatgtccaaagatacacaccaaggccaggggcagtggctcatgcctgtaatcccagaacgttaggaggctgaggagggcagatcgcttgagcccaggagttcgagacaagcctgagcaacatggcaaggccccatctctacaaaaaaatttaaaaattagccggggggccaggcgtggtggctcatgcctgtaataccggcattttgggaggccaaggtgggcggatcacctgaggtcaggagttcgagaccagcctggccaacatgttgaaaccccgtctctactaaaaatacaaaaattaactgggtgtggtggtgcacgcctgtaatcccagctactcaggaggctgaggcaggagaattacttgaaccaaggaggtggaagttgcagtgagccaagattataccactgccctccagcctgggtgacagacccagaccgagaccctgtctctttaaaaaaaaaaaaaacaaaaaaacacacacaaaaaaaaacccacaaagatacacaccaaattgaacagcggtttctctattgagggcaacagaaagacagccatggggcactttggcttcacctataatagctgaaatgtttttttttttcttttttgagacggagtctcgctctgtcgcccaggctggagtgcagtggcacaatctcggctcactgcaagctgcgccttccagattcacgccattctcctgcctcagcctcccgagtagctgggaccatgggtgcccgtcaccacgtctggctaattttttgtatttttagtaaagacggggtttcaccgtgttagccagtatggtctcgatttgctgaccttgtgatccgcccgcctcagcctcccaaagtgctgggattacaggtgtgagccactgcgcccggcccaatatctgaaatgtttttatcatgagaatgtttatgttttacttgtataacaagacacaaaaatgatcaaaacaaaacatttaatttttctaatcccagctactcaggaggctgaggcaggagaatcacttgaacctgggaggtggaggttgcagtgagctgagatcatgccactgcactccagcctaggcgacagacggagaccctgtctcttaaaaaaaaaaaaaaatgctgaggcgagcggatggaggtcaggagatccagaccatcctggctaacatggtgaaaccccgtctctactaaaaatacaaaaaaaaattagccgggcatggtggcgggtgcctgtagtcccagctactcaggaggctgaggcaggagaatggcgtgaacccaggaggcggaagtcacagtgagccgcgatagcgccactgcactccagcctgggcaacagagtgagactccgtctcaaaaaaaaaaaaaaaaggaaataaaaacgcacaaagatacgcaccaaataattgaacagtggtttctctgttgagggcaacagaaggacagctgtggggaactttggtgtcggagactttggcttcacctgtaatatctgaaatgtttttatcatgagaatgttcatgttttacttgtataaagacaaaaataatcaaaacttttttttttttcttgagacggagtctcactctgtcacccaggctggaatgcagtggtgctatcttggcacactgtaacctccacctcccgggttcaaggaattctccctgcctcagcctcctgagtacctgggattacaggtgcccaccaccacgcccgggttttgccatgttggccaggctggtcttgaactcctgacctcgtaatccgcctacctcggcctcctaaagtgctgggattacggacatgagctactgcgcctggccaacatataatttttcaaagcgatttgaactgaaccaagttctcgtctgatggatggatccctgattcctattctgttctgaaatacacttctttttcctgtaagcaggaaagttcttattaccagaagctggcagtttgataaggaatggagactgtaggaaggagtgggtgagggaaccttctggtccctaaaacagcattgagctgtggaatttgctatatagactgtagggcctaacgagtgcttcttgagaccctttctacttacagtggctctccttgtcatcttgctgcctcttttagtttgttcttggctcagaggctagatgtccatggtataacttagccatcaaaacagggatggggctgggcacagtgactcatgcttatcatatcaggagtttgggaggccaatgtgggaggattgagcccaagagtttgagaccaccctgggcaacatggcagaatcccttctctacacacacacaaacacagccagacatggtggcgcctgcctgtacacacacatacagagccagatgtggtggtgcgtgcctgtagtcccagctactcaggaggctgaggtaagaggatcacttgagttgggcaggttgaggctgtagggagctggcatcatgccaatgtactgcagcctggggtaacagagtgagaccctgtctcaaaaaaaaaaaaaaaagaagaagaagaaccaaggatgtaatccctctatcttgggattaacatggggctcttcatagctccaggtactttagtccttcgagaaaggaggatgtcctttgctgttaccttgtggttggcctcttgaaatcattctatgctggaacgaattctcattgcatttttaaagtatgctatggcatacctggcctacttcttaccaacaagaaagctagcattttctgacttctcagctaacatggaaagctggacacaggcacaaatgcacacctacctacctgccttcagagcaaactttgtctccaagagctcagcagaaatgctcccagcctaatgaggtacccaagtggtttgtggaaggtccacccagcttggatacttgaaggagagcctaaaagctgccctctgacctccagtgttactgtcagatctcagggtcaaagtcactttcagccgatctttcccgggtgagcttgtttgtgtgagcaggaatagactcaaatcaaaccaacttggatctcctcctccttgagatgtgtggtgttttcggttttgtttttgtgtgtttgtttgtttgtttttgagatggtgttttgctccgttacctatgctggagtgcagtggtacaatctcggctcactacagcctcctcctcctgggcttaagtgattctcccacctcagcctcccaagtagctgggactacagctgcacaccaccacacctggcttatttttgggggtatttttagtagagacagggtttttgccacgttgcccaggctggtctcgaactcctgggctcaagtgatctgcccgcctcggcctcccaaaaggctgggactacaggcatgagccactgcgcgtggcccagtgtgtttctttaagagaactctttatttaccatttaagtatcagggttttcatcctttcttcaattacagttagttcccagcctgaagtaatgttgctagagaatgaacatggggcaggggatggagttagggtacattttctggggtgaatatttttcatattgagctcctgtttgctaatactggagtttgttgacctagagtgaactctttattgattaactgaagacaagcaaagcctacaaacaaataccaagttctcactgaaaaacataaaagctgggaaaaaaacagaatttgttcaattggcaaacatttgttgattactgttatagaccaggtgttaggagtgtagtcccagaccttcttggcagttaagaaattgtctttctcatccaatgtctctctttcttacctcctaccccttatgttgcaaagtatggtgacttggagtgagtccttggcaaatggaggctgtgataatctatagtaataatcatcattgtaatatataatagaaggagaggggatctataaatgtttcccaaacttgttaacattctcttgtagctcctggtgccatcctggcagcattttgtaaagttttgctattagaaaagaactaaagcctcactgaaatagttgctttcttatgactgtagaagttatgactgggaaagaagacaaaagtgctagatctgcttctgaggggatagaataggagtcagcaaaactcagtcacaccattgtttgtatattgtctgactactgttgcactatagtgtcagagttgagtagttttgaaggaggctttatggcccacaaaggtctaatatatattccacctggtccttaacagagtttgccatatgtaagttatagtatgatgactagggccgggcgcggtggctcacgcctataatcccagcactttgggaggccaaggagggtggatcacctgaggtcgggagttcaagaccagcctgaccaacatggagaaaacccgtctctactaaaaatacaaaaatttagccgggcgtggtggtgcttgcctgtaatcccagccactcgggaggctgaggcaggagaattgcttgaacccaggagtcagaggttgcgatgagccgagacgtgccattgcactccagcctgggcaacgagtgaaacactgtctcaaaaaaaaaaatttttttttttaataaaaatagtatcatgactaaagaacgtgtgtgatgtatttgctcttggttgtttaaggaaaatgctaagcaagtagtaggattattgaaagtagaatctttctgcctaatattactaatccatgttcttatatatatgttctaggatctatctggttcaatagatgacctccccatggggacagaaggagctctgagtcctggagtgagcacatcagggatttccagcagccaaggagagcagagtaatccagctcagtctcctttctctcctcatacctcccctcacctgcctggcatccgaggcccttccccgtcccctgttggctctcccgccagtgttgctcagtctcgctcaggaccactctcgcctgctgcagtgccaggtaccctcaagtgctgggctttagggagagggaaaggtgactgcccccagtaatattaaggagccctagtcttccactggcagagaaagcatctctggctcatgcctgcatagtttccccttagcatttggagaaggagattggaacctgttggctggatctctttgtgtgtgatactgggaggtacttggcctcttcatgagccatttctagctctgaattaacttcctagttagaattcccaggcttagccatgatatgcttatgttgttctttgtctggagcaggcaaccagatgccacctcggccacccagtggccagtcggacagcatcatgcatccttccatgaaccaatcaagcattgcccaagatcgaggtgagagcctgggtgttggggaggggcagggagctagggcagacatttgagtgccctatgcagtagcttttggagagctgtttgaccatgaagcttaggacaatccctgcagcaaattgtttttatattctttaaaagttgacgtaataattgtactcatttatggggtacataatgatgtttcaatagaagtaacgtatagtgatcagatcagggtaattagcagatatataatctcaaacacttattacttctttgtgctgagacccagcagcaaattgtgaagttagagtgggcttggccgtgttaatgtctccatttcacagtacttgtctgtgttttgatggttgcccccttacattttgcctcatttggtcggcagttgctgaagactcaatgttcggtcttcactcatcaagtcattcattttggtttttgtcattgttctttgtcttttcaaacctccatttagtagaaacagctggcatgccctggttaatggttcatgtcactctgaaggtgcctaaaatgacacaccactatatagaaaatcagatagagactccatgcaagtggctgctaaagaaaatgtagatggtaaagtcccaggataaggatggagagcatttgttcgcattgtataaagctaataactatatggatgctacccacaaataggttatatgcagaggaacccccagatgccccagtacagttccccccagcccggctcagccttatctccgcgtcagccttccggaggacagatacacacaggcatgggctcctaccagcagaactccatggggagctatggtccccaggggggtcagtatggcccacaaggtcagtatactacccagttaggagtagatacgggtgagaggagaaaacagttccttgtctgatatgttgccatctagcttgtaaccttgtgagagaagggctgtcctttgcctttaatccacccagcccaggccctgaagtagggcaaggcaagattccatttgtctccacttattctgtcaccatgagaaagtctttcaatttcactgagcctctgtttcatttataaaaatggagattaggtgtttactccaccattgagcacagacaatttatacatggtagctcttggttattatttttttattaattatttttagtgaataagtcataatggaatagatctttgctcaaaattgcagccctaggctgatcaaaagttgagaatcttacacagagcatggaaatagaaaggaagttatcttcttctggaagttgaaatgcctgtgtggcagcaaagccagccttgctctgacctgcctttacatgcttctggaatccccccctttttctcatggcgataaaggctaccatgaagttgatctctttcctaaccaaaatattgaatgacattgtttggtgttctagagttgagagatattagtgagttgctagtgagtgactaaccaagtcttgtcttcctcccctcccaggtggctaccccaggcagccaaactataatgccttgcccaatgccaactaccccagtgcaggcatggctggaggcataaaccccatgggtgccggaggtcaaatgcatggacagcctggcatcccaccttatggcacactccctccagggaggatgagtcacgcctccatgggcaaccggccttatggccctaacatggccaatatgccacctcaggttgggtcagggatgtgtcccccaccagggggcatgaaccggaaaacccaagaaactgctgtcgccatgcatgttgctgccaactctatccaaaacaggtaaggcctgggaagcagagagggtgtcagtgcaagaaaatgtattatagacccactcagattattgagatgcttctggacctaaaccagggggggaaaatgggtgtgtgtgtatgaagtgttaattcttacataccttagatgggtctgaaatttcacgtgactaaacatcatatgtaatgagctttataaaagacaggtttttggccgggcgtggcggctcatgcctgtaatcctagcactttgggaggccaaggcgggcagatcatgaggtcagaaatcaagaccagcctgatcaacatggtgaaaccccgtctgtactaaaaatacaaaaattagctgggtgtggtggcgcacgcctgtaatcccggctatcgggaggctgaggcaggagaatcacttgaacccaggaggaagaggttgcagtgagccaagactgcgccaccacactccagcctgggcgacagagcgagactgtcgaaaaaaggggttttgtggggtgttttattttggggtcttttgagacaggaccctgctctgttccccaggctgaattgcagtggcatgaccacagttcactgcagcctcgacctcccaggctcaagtgatcctcccacctcagccttctgagtagttgggactacaggcacacaccaccacacccagctaattttttttattttttatatttatttatttatttagagactgtctcactctgttgcccaagctggagtgtaatggcacactttcagctcactgccacctctgctttccaggttcaaccaattgtcctgcctcagcctcccaagtagctggtgttacaggcacccgccaccatgccctgctaatttttatatttttagactgggtttcaccatgttagccaggctggtctcaaaatcctgacctccagtgagctgcctgccttggcctctgaaagtgctgggattacaggcatgatccaccatgcccggccttttttttttttttttaaatagagatggggtctcagtgtgttgccagggctaaagactgcttattttgatgtgcaaaataagtgttcagagtaggtggtttaacttctatcagtcaactttttggtttccaaaaggattcttaatgatacatatgtcttggatctttggtgttagaaatagcaaatggtaagcttgtggtttgccatttctcctactgttttatgtggtcctacgtgttgactctggtgctagagtacagaaggctcatgtgattaggtttaacaacttctttagccactaaatcttactgagttgttgttgatgaaccaaggtagaatagggcgattgactataaagaggtggatttggtagaacttcagaatgatggaagtgcaaagtttgcattgggcccctcaagaaataatgcaaagccacctctgggtgctatgctgagggttccagtctggttgggatttagcatgacaaaaagtggtacagttcagcatttcatctatgccttttgccacagacagggcccttaaatggaaatacaacttgactttggaggtggctttgaggaaggcagtacttaaaggacacagcagggctctgcttcaaagaattacaccctttgaaattgagctattgtggccgggtgcggtggctcactcctgtaatcctagcactttgggaggctgaggcaggtggatcacctgaggtcagaagttcaagaccagcctgcccagcatggcaaaaccccatctctactaaaaatacaaaaaaatagccaggcatggtggtgggcgcctgtaatcccagctactcacgaggctgaggcagaatggcttgaacctgggaggcggaggttgcagtgagccgagatcatgccattgcactccagcctgggagatgagtgaaactccatctcaaaaaaaaattggccgggcatggtggctcacccctgtaatcccagcattttgggaggctgaggcaggcggataacgaggtcaggacatcgagaccatcctggctaatacggtgaaaccctgtctctactaataaagtacaaaaaattagccgggcgtggtggcaggtgcctgtagtcccagctacttgggaggctgaggcaggagaatggcgtgaacccgggaggcggagcttgcagtgagctgagatcgcgccactgctctccagcctgggcaacagagcgagactccatctcaaaaaaaaaaaaaattgaactattgtttgctatctagagcttgaactctcttagtatctttcgtgggaggtagaagataagaaaatctgggtgttggccgggctcggtggctcatgcctgtaattccagcattttgggaagccgaggcaggtggatcacctgaagtcaggagttcgagaccagcctgaccaacatggagaaagcccatctctactaaaaatacaacattagccgggtgtggtggtacatgcctgtaatcccagctatttgggaggctgagaaaggagaattgcttgaacctgggaggctgagattgcagtgagccgagatttcaccattgcactccagcctgggcaacaagagtgaaactctgtctcaaaaaaaaaaaaaagaaaatctgggtgttagctggacatggtggtgcatgcctcatagtcttaggcactcaggaggctgaggaaggcagattgtttgagctcaggagattaaggctgcagtaagctatgatcacaccactgcattccagccagggtgccagagcaataccctgtctcaagaaaataaattaaagaaaaataatatctggatgttgcatagttctagttttggggacccataaatgttttccttttaatccttactagatgatcacacagcactatttggctccagttcaaatctaaaagctcagagtctaacctttgtctctctcactttccatcttcttccttaggccgccaggctaccccaatatgaatcaagggggcatgatgggaactggacctccttatggacaagggattaatagtatggctggcatgatcaaccctcagggacccccatattccatgggtggaaccatggccaacaattctgcaggtaagtgctagtcattctcactagggatttcttcaagagtcacatcacagctaaacttactggacttgagaatttttttctcttttacagggatggcagccagcccagagatgatgggccttggggatgtaaagttaactccagccaccaaaatgaacaacaaggcagatgggacacccaagacagaatccaaatccaaggtagtgatttttgtcttgactcctttcaactttgtgtcctatctttttcagtgataggaaggaaaaagaaaagagagtgacaagatcccagccttttatgacaccggactagatagtctctgaaaaagctgctgttgcctcctcttatcatgaaaggtcccagaataatagctcagtgagttgggtctgggttggtctaagggatcctggtaaataacataatattctcacagctgtttgttatgggggaaatgccagacactgcagcatcaaactctctgtactgtttggctggtgccctctgtgaaaccgtgcctcctatactcaagcattgatagatggggtgtgccatgggcaactagttgctcttctcttcctgaaccttactcatagcagcaggaatggtaccctgtgttctgtaaagaaggagataaggcagatgaggcttgagtccttggcttcccttaggttggtcctgggtgtactgttaggctgtgcggtagtaaagggtcctactcagcatttgggtcatttgtaatatttctgtccttggccatacctcactttccctatctgtatacatagggaaaataaaaatcatagctgttaattcctgtgagtcttcacctctggctcccagcccttttgaccacgttcctgtcttgtacaggataatatccaaagcccttcaaccaggtgggaaacctttcctttgtttagaagaggcaaagagtttcttttcattttagtccatcccattgcctcaagatcatgttgtgagtttttcgatttctctaaaacatagtacctaagtatgttcaggctcctgggtagtagtgtgggagcagtagtggctttgatgtcaggtggacaaggatttgatactcagcctgccacttaaaagctgtgagatcttaggctttgcctcctggtgcctgcttccttatctttacaaatggggataattttataatacctaatatataaaggcatctagcacagcacccagtacataacatatatttagtgttagcttccttcctttataggaaaaaaaaatttggttctcttttggcccttcaaccttatgaaggtaggacaggtgttagtaaccaccccagagtaagaagctttaacactgctccagtcaagagacttctgagacccttagcacaggctttgaatctgacccattcctatgaattttgacctgaaccttccagaaatccagttcttctactacaaccaatgagaagatcaccaagttgtatgagctgggtggtgagcctgagaggaagatgtgggtggaccgttatctggccttcactgaggagaaggccatgggcatgacaaatctgcctgctgtgggtaggaaacctctggacctctatcgcctctatgtgtctgtgaaggagattggtggattgactcaggtgagtgggcgcctgacacttgactgcccctgtggtttccacaaacccctttctaggtactcactggcttcatgtggtaccatgcatcccacagggacatcatcccctctcccgctttctgagtctaatattgatagaccggggagcacaggtttcccagaagataaggcaggaagcagagacctccctggtagtatgaggtattagcagtaagtttaccgtgtatctatggtcccactgaggtgtaaagctagggaaagtctgtgggcattctgattccatgggaggcaatttggcatagtagcaaagacaggatttggagagatggacctggttttgaatcccttcttggccacttataacatatatgaccttaaggtgtgtaaccactctgaaccttaatttcattatttgtaaaatacaaacagtatgtaacagtatataacccactagactgtcaaaagttagaaataactttggctttcagcaaggtttctgccacataaatcggcctgcaagatggtacagaggcagccagagtagaagtagatcttcccattcctggaagcttcccagtagagataggatttcaggaactgcttagtagaaatagtttataataaaggaagaagtagtaggaaattatgtgtttagttattctgtatgggaaacttaaatgaaaacctgaattggacaccacccagagcttgtgcctactctgataccttacaattttgtagactcagcccaggaagcaaacaggtgaggcagcacagacagacagcagactgtgccttgcagacttccctcctgtgtatgttctgtagtcaccagaccagaagcctgctgttggatcagtttgtggctgagctcggggaggtgtggcagggagggatttattccaaaccttctaaatcagaagaggaaaacagctgtcaccagcagaaaagaaagtggttggaatgaagccagccaacagtcagttatgaattccttctcccttcaggctttattcccctcccccacaaaggaaaacaaaacaaaataagacacgtgcatactgccacataactggcatgagaagcaaagccacggaaggcttttgaggtgactccatgcatattcctgccattctccctgatactcagatctcatagtcaagccttccctgtctatagggaaagggagcattgggttaggtttcgctcacttctgattgggtgggcttcagggttcactgaacctaggatgaggtacagagagaattctaatgcctgagcctgtcttccagattggaaaaggatgcaaacctttaaaatgccgtgattgtaactgaacttttataaaggcagtgataattcaggggcaaaagagtgctatttataagttagtttgtgaaggctccaagaaagcaaagctgaatcttgagcttatctaaaggattagtagggtttaggtggaagagtggccaatccagtagactggcctagatgccacggagatgggagagagtctagatatttcccaccaaggccatctccaaccatgaagacttagctcaggtgttacccactctaagaagtattcctagtcacctctgcccctctaggttgtccccctctgtgcctctttaaactcttctttctagtatcataggtatcatatcagcagacattacaacctattgaacttcctttgtgtatagggacttgaaaacccttgttcccaggccttgggggaacaggcttaccatatggtagatgaataagcataagaatacatgaagaaggagacctgtccagctagagcagaaagactaattgtagggagcatctggggaatgggcttggtcagtgtgccctgaagctgagggaaggaggcagaactgtaggttggctgctcgggaggtacaaaagtcataataaggccccgggccaggcgcagtggctcacacctgtaatcccagcactttgggaggccgagacgggcggatcatctgaggtcaggagtttgagaccagcctggccaacatggccaaaccttgtctctactaaaaatataaaaatcagtggggtgtggtgacaggcacctgtggtcccactacttgggaggctaaggcaggagaatcacttgaacacgggaggcggaggttgcagtgagccgaaatggcgtcactacactcgagcctgggtgacagagtgagactctgtctctaaataaataagaccctgaacacccggaccatcaggacagtgactggtaagggaaagggacctgtggttatttgtcaatgagatatgtaggggagcagtggcacaagaatgtcaaatttgcagggagccaccaccccaagaaaaaaatatgagtaaatcccaagtttgacaaagcaagtcaagcagggtggtcactgatattatcatgagtctccattttataaaatgttagtttttattagtgcatctaaaataggatttagggccaggcgcggtggctcacgcctgtaatcccaacactttgggaggctgaggcgggtagatgacttgacgccaggagtttgagaccagcctgatcaacatggtgaaaccccgtctctactaaaaatacaaaaattagccaggcgtggtggtgcacacctgtaatcccagctactcgggaggctgagataagagaatcgcttgagcccgggaggcagaggttacagcgagccaagatcacgccactgcactccagcctaggcgacagagcgagatttattttttctgtctcaaaaataaataaataaaataggatttagatatccagatgatttgtacaccactttttagcagcgtactaaaaaaccggactctgaattctgttccagtagtaatgtgaaatttgccctgttgtgaataagcacagtctgatagttgcagtggaacatcctgagggtaaaatgaagccagctgcagatttaacacttcttgtggactatccaccaagcaagattaactttttcaattacctaagaactgtggttctacaaagatgaataccttacagcctgatggggcttggggcttatgggcaggaaaaccaggcgggagatatacctcgactcctttggtttggttatacaggtcaacaagaacaaaaaatggcgggaacttgcaaccaacctcaatgtgggcacatcaagcagtgctgccagctccttgaaaaagcagtatatccagtgtctctatgcctttgaatgcaagattgaacggggagaagaccctcccccagacatctttgcagctgctgattccaagaagtcccagcccaagatccagcctccctctcctggtaaggatggggtcagcggccccaccaaggctgagagggcctgttgccctggcctcttattcaggatatgaataagaggcttatccaacaggatatgccaaggatctgtgctctgccttgccctaccacagggcttaacaggttggctgactagagagtgggcagtggaaactcccttgggaggtactctacggcagctcttaagttttaatttttgttgtgcagctgacaacttgccaaatgtttgtaaactggtgaatgggaggggcacaagaggagtcggtggaacttataaatggcagcaaggcagggccatctgggagctttggcctattgatgtcagcaccttagaatgcagctcagactagagccctgaattccccagggagctgagatggtaatgaatgggaaggagggagtggggaagggttatgaatggaactccctgatgggagtggctctgctcaccctcctttctgagaggaggctgaggcctagggtgagcctagagagggaagaaggccagggtgcctggaaggtgggtgtaaacacatgtgccctggtgttgacctctgagggtgtaatgagtgcctgagatgactcatcagctggggaggcctcagcagtgggatatctactgctgggaatggtaactattggaaacattaattactagtagttttgtactcatcagcttagaagaacatttgaagttgaggagtgacaccatgctggatgctttagaacaggagctcctagactcctaaaatgcatcccagatttgggacccccttcccacccaggacttgggaggctctgactggagctcatgcaccagcattacagggtttagtaggttagacaaggtcctttggcggagtgaagagaaatagccagggaagctggcaatgactcagggaatcaccagcatggtgatgtcatggccacatcactcctcttttctacacgtaaaacaaaaacaaagagctacaaaaccctcagattcccgtctttatgacctggccttgtagatcctctgctaagaagggtgatcaggctttaaaggccttaggaagaactttcccaaagagattctgggtcgttcgtgtgtttgtgtgagagttaaacactgtcatgccaagcaaactactcaacttgtatctctgtccacagcgggatcaggatctatgcaggggccccagactccccagtcaaccagcagttccatggcagaaggaggagacttaaagccaccaactccagcatccacaccacacagtcagatccccccattgccaggcatgaggtaaggccaagagcaggggcagatggttgggaggatggctgaagataagtgcatgggaactccttgcagcccaaggtggtccttgcctctgccttcccagccagtgactcctgcgtgtcctttgttatattggaggaattggtttatttgtggtttacttggttttcctcactctggagcaggagcaattcagttgggatccaggatgcctttaatgatggaagtgactccacattccagaagcggaattccatgactccaaaccctgggtatcagcccagtatgaatacctctgacatgatggggcgcatgtcctatgagccaaataaggatccttatggcagcatgaggaaaggtgactgatctgattgctatttgaacttgtgctcgtaaagacagggccagtgaaatggggggaaatcttgagaatggctcagggttcttgtggagccatcctctgagataatgcatttcctgccctaactacccctcttcatccttacctcctttcttgtcttctccttggcttcaccttgtcatcccttaataagtacatgcttttcgctggttggggcctctttagatctctgttttgaacttgtctggaaaacaatgagatcaaacctgaactctgaagagggcctgggtcaaagggtagattaccaggcttgtcaacttaccagtttgttcaccgcttgcctttctacgctcagctccagggagtgatcccttcatgtcctcagggcagggccccaacggcgggatgggtgacccctacagtcgtgctgccggccctgggctaggaaatgtggcgatgggaccacgacagcactatccctatggaggtccttatgacagagtgaggtaagcatgaccccagctcctgtccactcccccagcaccctgaagctatagtgggctcaatctgcctctccaattttgtttaggacggagcctggaatagggcctgagggaaacatgagcactggggccccacagccgaatctcatgccttccaacccagactcggggatgtattctcctagccgctaccccccgcagcagcagcagcagcagcagcaacggtgagtaaagcctggtctcggtgctgctatggatcaggcttcgccactgcccaccctaatcctgtgtttctttgcctcctatagacatgattcctatggcaatcagttctccacccaaggcaccccttctggcagccccttccccagccagcagactacaatgtatcaacagcaacagcaggtgaggagggtagctgggaatggactggcatgcaggttcgccttgaaaactagttagtaaactaatctaacgtgttgaagtctaagaagctcactttagatattttggcattcttctctcacctgactggccagtcctgcctgaagagccacgtcctcaatctcttctctatttggagttggaaggggctagaaatagaccttattttgatttttaggttttgtatatttttctacttaagcaagggaagggaagaaagagtggtggttgcttttggaaacaacttcaaaagacaatttgttaaggtgattcccatgttttcttggagtctgtgtccaccaagcatctggttgtagccatcttggcatctgtgggctttatgtccctgagtgcagagtattaacttcccctctgcttgtctctgccttagaattacaagcggccaatggatggcacatatggccctcctgccaagcggcacgaaggggagatgtacagcgtgccatacagcactgggcaggggcagcctcagcagcagcagttgcccccagcccagccccagcctgccagccagcaacaagctgcccagccttcccctcagcaagatgtatacaaccagtatggcaatgcctatcctgccactgccacagctgctactgagcgccgaccagcaggcggcccccagaaccaatttccattccagtttggccgagaccgtgtctctgcaccccctggcaccaatgcccagcaaaacatgccaccacaaatgatgggcggccccatacaggcatcagctgaggttgctcagcaaggcaccatgtggcaggggcgtaatgacatgacctataattatgccaacaggcagagcacgggctctgccccccagggccccgcctatcatggcgtgaaccgaacagatgaaatgctgcacacagatcagagggccaaccacgaaggctcgtggccttcccatggcacacgccagcccccatatggtccctctgcccctgtgccccccatgacaaggccccctccatctaactaccagcccccaccaagcatgcagaatcacattcctcaggtatccagccctgctcccctgccccggccaatggagaaccgcacctctcctagcaagtctccattcctgcactctgggatgaaaatgcagaaggcaggtcccccagtacctgcctcgcacatagcacctgcccctgtgcagccccccatgattcggcgggatatcaccttcccacctggctctgttgaagccacacagcctgtgttgaagcagaggaggcggctcacaatgaaagacattggtaaggagatcttcctcattcggttgcctaatctgcccctttccatcttgtccattgttccctccaccttactattctggatgaggttgaatctggtccagtgttgactaaaatagaaccaaagaactttggaaaaggaagaaataagctaactaaaggttctccttcattgccatgcaatgaagtcctagacagacagcttagaagccatgaggggctggtgtgtttcatctcccagacagaaactgccttccaccttgtgttatcttcagagtagcttcactgatggggcagccctaggggtgcctccagccaacctgggcttggtggatagacgacatggaggtttatttcaggaaccccggaggcatggcgggtaatgatgtccctcaagtctggtctcctggcagagagcacatgggcattagataccatcaacatcctgctgtatgatgacaacagcatcatgaccttcaacctcagtcaggtgagtatcagtgcctggggaagattgagagggtttgggatcttcttagtgtagacaatgggaatgtctcatctttagccaccttggtctttctctttctctcttgtagatatcttccatgccagtactttgcttcctttgcctctgggcacgggcccaggattttgacagcaataataatttgtttacatgataaccttaacacaggattgacttcaaaaggaatttgggagacactttgtggtattagtaagaattcagattcaatcgatgccagtggggacaccacattttctagaagaatctgtgtttttttgtttttttaatagagacgaggtctcactatgttgccgaggttcatgaactcctgagttcaagtgatcctcccaaagtgctaggattacaggcatgagccaccaggcccagcctgaatctgtggtcaaatttttatcagtgagcagagtatgttttttccatttttccctttcttctctgaacagtaggggcctttgttgatcccagttttccttagatgtagagtggatgggggatttgattgtttaacaatattcttttttttttttttttgactgagtctctctgtcgcccaggctggagtgcagtggcgctatcacagctcactgcaacttccgcctcctgggtacatgccattctcctgcctcagcctcccaagtagctgggactacaggcgcccgccaccacgctcggctaattttttgtatttttagtagagacggggtttcaccgtgttagccaggatggtctcgatctcctgacctcgtgatccagccgcctcagcctcccaaagtgctgggattacaggcgtgagcaaccgcgcccggccctacaatattcttacaaagctgattcttcagacccaccctccataggatgtgcacactagtggaggtgctggaaagagtttgtgctgcatcatcctactctttttcttttgatcatctttagtacctaccaacctgtatatcaaggagctgacttattaatagttaccatttatcgtgctcttattttgtgccaggtccttaatattttgtttcatgtcatcctagcaacagccctcagaggtaggaggtatggccatttagggatgagtaaataggctcagtcttatccttgttgaggttcacatagctgtcagtagaatctatctgattcctaagcctgattttatttccattgcataatattgcctaccatgagaaaggaaaaattttgatagagcaattttcatatgccaggtatttgacatctcccatttacacctcagaacaaccctgtaaagtttaggaatttttatcattttatacagctacttcctggaaaagccagaattttttttttaagagactctggcacctaggctggagtgtagtagtgccctcatggctcactgcagcctcaaactcctgggctcaagcgatcctcttgcctcagtctcctgagtagctgggactacaggcaaatgccaccatgtccagctatttatttattttgagacagggtctccattactcaagctagagtgcagtggtgcaatcacagctcactgcagtctcaacttccgaggctcaggtgatcctcccacctcagcttcccaagtggctgggactacaggtgcgtgcaaacatgctcatgctcagctaattttttttttttttttttttgagagatgaggcttcaccatgttgcccaggctgatttcaaactcctgggctcaagtgattgacctacctcagcctctcaaagtactaggattacaggtgtgagccaccgttccaggccccggataacttctttatttttttatagaggcagggtctcactgtgttgcccaggctggtctcaaactcctaggctcaagtgattctcccacttcaaccttccaaagtgttgggattactggctgggtgcagtggctcacgcctgtaatcccagcacttcaggaggccgaggcaggaggatcatttgaggtcaggagtttgaggccagctggccaacatggtgaaactccatctctactaaaactataaaaattaggctgggcgcagtggctcacgccagtaatcctagcactttgggaggccaaggtgggtggatcacttgaggttaggagttcaagaccatcctggccaatatggtgaaactccatctccaccaaaaatataaaaattagccgggcctggtggcacacacctctaatcccagctacttgggaggcagaggcagaagaatcactttgaacccaggaggcagaggttgcagtgagctgagatcgtgccactgcactccagcctgggcaacagagcgggactctgtctcaaaaaaaaaaaaaaaaaaatacacacacacacactctcacacactagcccgatgtggtggcaggcgcctgtaatcccagctacttgggaggctaaggcaggagaaaaatcgcttgaacccaggaggcggaggctgcagccaactgagatcacaccactgtactccagcctggatgacagagtgagacttcatctcaaaaaaaaaaaaaagtgttgggattacaggtgtgagccactgcttccagcccctagatctaattcgaaagcccttatttttttttccatctgctctactgttcagccaaagattgtgactggagaggagtgttttcttctagaggtaaataaatggcctatatattatccaaggtggaatttgggtctctgtagcaccagcttggaccagtgtttggagagctgaagcctcgtcccactccttatgctgcaagatccatggagttccagccccctggacttgtggggagcttggagaagagagccatgaacatctgcccacatggcattctcttctcttagcttaagtcaccatgcctaagcttgggttccacttggcagtgagatggagagagtgtcctaaaagagataatggcaatgaccaccaggttgaaaactggcctggtgaagaaaagcagaagattaattgggaaaagagaaggctaagagatgattggccctggtgggtgaggtgcaaagctgttggctagtgttcctggagataggcttacgtgaaggtaggttgggcagaagaaagaactttgtgttgggcatagaagagattaagatgaacaatttgctctgtggagaacctttgggaaaggagcaactctgcctctcccaactgatacagaagacttggggaggtctctcaagtcaataattctgttcttaggccacttttctcccttaatttatttcctgttctttctctttttagctcccagggttgctagagctccttgtagaatatttccgacgatgcctgattgagatctttggcattttaaaggagtatgaggtgggtgacccaggacagagaacgctactggatcctgggaggttcagcaaggtgtctagtccagctcccatggagggtggggaagaagaagaagaacttctaggtcctaaactagaagaggaagaagaagaggaagtagttgaaaatgatgaggagatagccttttcaggcaaggacaagccagcttcagagaatagtgaggagaagctgatcagtaagtttgacaagcttccagtaaagatcgtacagaagaatgatccatttgtggtggactgctcagataagcttgggcgtgtgcaggagtttgacagtggcctgctgcactggcggattggtgggggggacaccactgagcatatccagacccacttcgagagcaagacagagctgctgccttcccggcctcacgcaccctgcccaccagcccctcggaagcatgtgacaacagcagagggtacaccagggacaacagaccaggaggggcccccacctgatggacctccagaaaaacggatcacagccactatggatgacatgttgtctactcggtctagcaccttgaccgaggatggagctaagagttcagaggccatcaaggagagcagcaagtttccatttggcattagcccagcacagagccaccggaacatcaagatcctagaggacgaaccccacagtaaggatgagaccccactgtgtacccttctggactggcaggattctcttgccaagcgctgcgtctgtgtgtccaataccattcgaagcctgtcatttgtgccaggcaatgactttgagatgtccaaacacccagggctgctgctcatcctgggcaagctgatcctgctgcaccacaagcacccagaacggaagcaggcaccactaacttatgaaaaggaggaggaacaggaccaaggggtgagctgcaacaaagtggagtggtggtgggactgcttggagatgctccgggaaaacaccttggttacactcgccaacatctcggggcagttggacctatctccataccccgagagcatttgcctgcctgtcctggacggactcctacactgggcagtttgcccttcagctgaagcccaggaccccttttccaccctgggccccaatgccgtcctttccccgcagagactggtcttggaaaccctcagcaaactcagcatccaggacaacaatgtggacctgattctggccacaccccccttcagccgcctggagaagttgtatagcactatggtgcgcttcctcagtgaccgaaagaacccggtgtgccgggagatggctgtggtactgctggccaacctggctcagggggacagcctggcagctcgtgccattgcagtgcagaagggcagtatcggcaacctcctgggcttcctagaggacagccttgccgccacacagttccagcagagccaggccagcctcctccacatgcagaacccaccctttgagccaactagtgtggacatgatgcggcgggctgcccgcgcgctgcttgccttggccaaggtggacgagaaccactcagagtttactctgtacgaatcacggctgttggacatctcggtatcaccgttgatgaactcattggtttcacaagtcatttgtgatgtactgtttttgattggccagtcatgacagccgtgggacacctcccccccccgtgtgtgtgtgcgtgtgtggagaacttagaaactgactgttgccctttatttatgcaaaaccacctcagaatccagtttaccctgtgctgtccagcttctcccttgggaaaaagtctctcctgtttctctctcctccttccacctcccctccctccatcacctcacgcctttctgttccttgtcctcaccttactcccctcaggaccctaccccaccctctttgaaaagacaaagctctgcctacatagaagactttttttattttaaccaaagttactgttgtttacagtgagtttggggaaaaaaaataaaataaaaatggctttcccagtccttgcatcaacgggatgccacatttcataactgtttttaatggtaaaaaaaaaaaaaaaaaatacaaaaaaaaattctgaaggacaaaaaaggtgactgctgaactgtgtgtggtttattgttgtacattcacaatcttgcaggagccaagaagttcgcagttgtgaacagaccctgttcactggagaggcctgtgcagtagagtgtagaccctttcatgtactgtactgtacacctgatactgtaaacatactgtaataataatgtctcacatggaaacagaaaacgctgggtcagcagcaagctgtagtttttaaaaatgtttttagttaaacgttgaggagaaaaaaaaaaaaggcttttcccccaaagtatcatgtgtgaacctacaacaccctgacctctttctctcctccttgattgtatgaataaccctgagatcacctcttagaactggttttaacctttagctgcagcggctacgctgccacgtgtgtatatatatgacgttgtacattgcacatacccttggatccccacagtttggtcctcctcccagctacccctttatagtatgacgagttaacaagttggtgacctgcacaaagcgagacacagctatttaatctcttgccagatatcgcccctcttggtgcgatgctgtacaggtctctgtaaaaagtccttgctgtctcagcagccaatcaacttatagtttatttttttctgggtttttgttttgttttgttttctttctaatcgaggtgtgaaaaagttctaggttcagttgaagttctgatgaagaaacacaattgagattttttcagtgataaaatctgcatatttgtatttcaacaatgtagctaaaacttgatgtaaattcctcctttttttccttttttggcttaatgaatatcatttattcagtatgaaatctttatactatatgttccacgtgttaagaataaatgtacattaaatcttggtaagacttttgtgaagctttttattgttttcaaactaaaacttgaccttttgtcggggggcagggggatagtcctgtttttgcaaacctcccttagtgtgagatctcccctaaatagtggcattcctggaccctgtcatttatttactatattccaaaataagacaaccatttatctggaggcaatctccaacttaatcacttataatatctctggactggctcttttccctgactccagactagagcattcagccacctttcttgtcatccctgcttggaagtttactttgaacatgccaaagctaaaatgtcctgtcttcccccactagaaacctgcttctcccatagttttggtttttttgtttgtgttttccttttagtaaatggcaactccattctatcacttggctaaaaaaatccttgacttctttcacttccacatccaatctgttagcactcttcataaaataatcctcaatcccacactactgtagttcaagatactgtcatatcttggattcttgaaatacctccaaattggcctccctgcttctgctttgcctggttgaacctattctcaacagagcaaccaaaaggacccctataaaaggtaagtcagatcaaacgccttcagtgcttctgactcagtaagtaaaaatccagactcttaaaaagtggcctacaaggccctgagttatctagcttacctctacctttcctgcaccatctgtcttgcccgttgctcaccccactgtatagagatgtttccaccttggagtctttgtactttatactctctcaccaaataactgcatggctcaagtcctcgactgcttcaagtctttgtccaaatatataagtaaggcttttcatggtcaccttacttagaatagcaatctctgccccccactatgtttcccttgtctgccttatttttcctgtggcacttgttactgtctggcctgttgtgtgttgtacttacctgtcaccttccactgaaatgtaaactgagggtggtgggaggggtgttttgttcactgctgcatcctggtgctaacacatagactggcacatagcatctacttaagtagtagttgaatgatactgtcgatgttggctagatgcagttgcttttatgaggctaatgtcacaatatatagtttctctgttcacccccttccttagggaaacaatagagaagcctcaagttcctcaggagaaatcagaagcagaaagagaaaaaatgctatcattgtggacacttagaagtgaaatttgaaacaagaaacaacagttttctattgtgtacctacttatattctggacatagcacatcacaatcctacaacaatcctgtgcctgtgaagtcagtatgtggctcccattttacagttgaagaaagaggctaagaaaagtgaaaggctttttaagttcatacaccaagcaagttccacctgactccaaggatcatgcttttcttaatataccacactacctcctttctggatgagaacccaacccaggagtaagggatctagctgtggagctcagcaagcaagatttgtttttattgtctttagcacgaggtaaaattgtcctcagaatttcaatcaagtgttcatcagactaagtgtggctgttaatatttgggtcaggaacaggatttgaataattagtatttctcaattgagagaggaaaacctttgtcaaccaagatgcgttcctaggattcttctagaaaaaggtaaatgggaagcttttcatatctacaattttggtaagcaatattgctaatggctatttttgttctaggcctcgagctccgtttgctagtctagaaattgcatatctgggctgtgtgtggagcattacctaggagttcggtttcctgggttcctttcatctgctctcctgcaatgcagggagagcctagcctggtctccagtttctgactggagttaccatggccaagagaactgctggccagtgagctgtgagtaatttgcttttgagaagtaaatagaacctagccagcagagaacccaggggtgtggccagtagttcttttcccaggctcctccctccccaccccccaaatgaccttaaccttctttcatagctggagagcagccaagtccagcctaaacaatactctcaacctcattggctcttttgccttgcagccactgccacccccaagtggctaaggccttcccactaggcctctcagtggggtcaaggttttctaaccactgaaaggcaaacactgaaggaatggtgaaaaatacctagtgaccatgggctttaaatgatgagtgtttgggtactgcagttggaggcaaggcagagtctttgtccttgggtggatgggcatcttcaagtgatcgggcagaggccaaaaaggatgcttttggtatatgagacctgactggtgtcaccccaagtgtcaggatggatgtaaatgtcacccagcatcttggaaactgccaatgaatgccttttatcccacagcaaaaagaagtagcataaagttctggtaaagtacagcaggccagtatggtcactttcgccccacaatggcatgacatcagagccagcatcccagattaggatcagctattccaatcccataggactggggccatggaaagtttagcttctagaaactgaactgctgagagtagttgggctacttactgggctggtcctctgcccagcctggggccaaggccacttccagaagtggaggcaggagcaaggcaaggcagctacagagagaaatgtcagttgctccagggaagtgagtgttctgtgagaaccacctaacttccttctctacactttcagtgggaaaatcacttttttgttcagtgagttgtaatagcccatctttattgagcattgtatgccaagcactataaatcctatgaggtagatatcatctccaccagggcaaggattgtttctatcttgctcagtgttgcatcttcatcccatcacatagtaggcattcctgtactgttgaacaaatcaaacagataagataggaatttgatggaggaaagagtaggtcagagctgttaagacttggtgtgcccatcttagcatagcccgtaaagactcttacatatgggaaaaatggaagagagggaaagaggtaaatctgtgaaagattaaaatagtgtagagtgggagaaccagcctgggaggctggagacctgaattcaagtcccatcgctaccactagctatgtgacttcttgccagtcacttaccctttgtgatccttagctccctcatccataaaatataggtataggattaaagaaattgatttattgaccagatctttattgaagacacacagtgtgcaaggcactgttctaactggaaatacattggtgaacaaagcccttgctcctccattacactcagaagcttacattctagaatagggaaacagacattgaaacaagtaaaattcatggacaggacaagcagatagtgttaagtgctatgaagaaaacagaggccgggcgcagtggctcacacctgtaatcccagcattttgggaggccaaggtgggtggatcctttgagcctaggagttccagactagccttggcaatatagtgagacctcatctttaaaaaaaaaaaaaaaaaaaaaaaaaacagaacagactgatgggatagtacagggaaagcctctctaaggaggtgacttctctccggagacccaaacataatgggctagccaaagggtggtctggaagtagagtgcttcaagcagggaaaatagcaagagcagagccaggcaagttcaaagaacagaaatgatgtaaccctcttaaatcctaagcttctagaatagtaatgcattgcttgcattgttctggttagggatttgtatgtgatattgtttcttggtgatgtgggatatgtgcttcttaatggaaatggctgggaagtgtggagtctttctggagcctgggatatggctctttctcacttgctttccacagttctggtagctcagctggctccctgggtagatgcaggctccatcttagctgcagactctacaagaacactgagaggctgcctccgtcactactcaaagccttggagtcccagaatcccctcctatcccacctagccttcttccaatctgaaaccagggagtcagggctttgagagcacaagattcagcttccttgttttcctgtcagagcagaagtcagaaaatgaaacaggaaacagagcggaagaggagggggttgggtagcagagaaggaaaagagaaattgcaggaaagtacagctgaaaatctggataaagttctacctctacagggtgacagctgagcttttaaaaaacattctgacttgtcttgagagacccctggcctttttacaaatagatttttgagagaatttgatgtggacagagggaaccctgagaatgcatgtcttttttccccttgtgaatttacagagcaaggacagttcatttctcagttttgtctttgcagagagagtgctgcttggagcctcatggtggacttctagagattcaagtcacagccttaggccccagtcacaagtgtgtccccaggctttgccacgttactcacaggcctctggagctgagaacaagtgcgtggcactgaaaaacctgggggaagggccatgaaactccattttttcccccttctccaacacacaacgactaaatatgatttgccttttctccaccttgcacacaacagatatctgaaggcaatttaggtctcagggcctgaaatgagttacagagtcaagagatacagtcccaggcccccacagactgatgtgggctggtcttcgcctggagaggtagcaaccatctctttgttcccacccacatgagtagccgttgcagaagataaacccctccctgagccaggctgtggccagaggctaacccggcccctggcttcgtttggagggcagataactgaaaccacataaggctttggaatcctgagaaacaagaaatccaccaacggagaaggatttatcatctgtttcctttaaggagggtgcaaagttgttctaacagtttccgttacaagggtacaaactggccgctccccccaatagacggttttgttgagttcgcctctttttttttcttctttttttggccccacttcctatgagagaaactgcttgggtgagggaggtgaaaggagccctggagggtgttctctgaggttttcttcaccatcctcattagccacctgaggtggggctgaggactaaagtaggacagaaggtctctggtagatagaggaggggaaaatcagggggatcccccactttcttcacacccaggacgcagggtgccgctgccggccacagaaaccccaagaatgtttttctttggctattcagaggacatctattgtgtgtcaggccctgtgctgagctgttgttgcctgacagcaggaagagcgcggctctggtttctgtgaagaggctgcgggtcagcctccgactacaagagcctcggcccacaccgggaactcagtgaacgtcagcgggagctggggcaagagcactgactctgagacagcagcctccgctcactatttgaaggcggggtggcggggggccttgaaggagagcgaagtgcgagagaactcttcaggtgtcaccaaggtgggaaggtgctacgaggcgaggcgccgagcggcgacccccatcccgctcgcccggagtcaacatggccgccgcgcagggaggcggggctgctccaagtccgggcaggagcggggcggggacgccgtcggcggagccagcgcgcaggcgcgggccgcgtgggccccggatggaggagctgaggttcggtccccgccggggaggtcgggacgggcaggggctgaggaccccgcgccagcttgggagccctggagttctggcgggagggaagctgtcaaatggaagccggtagaaatgagacagacgcccggagaagcggggagccccgcccctccgccatagcagcctcgggcgccgcctcttcctttccagcctcccgccctcgtctgcttccggccctgtggcctggtggggctctgcaggctccctcgggagtggtccttgggccgtggcccctctggggtgagcgtggatgattagtacccagaagggactgtgtccaaaaggagccggccagaaacgggttgcggacacggctgggctgacagaaggcagcccccacgaggcctttggctctgaggaccctgggtcagagcgacttctccagcctgcgcagggggtgttagtcttacccagagggtccagagctgccgttcaacaggatgtcccagattctcagatagggcccaactaccctaagcatacctagcaagggcaggctgcggcatggaagtactgggctaggcgtttgggtgacctgggtcataatcctggctcggaaagggcgcgtaccctttggcgagggatgcgggctggtaccgtgaggtttaagaagcagaaaacatgacagcctctttaagtagccctgggtacgtcacttgaccccagtgagcctcagtttccatatccataaaatggcgatggtaattatactagcctcacagtgtctgatgagatctctggagcctatttatctcacgggaaaatttttgaagagtgaaactagttgatctgtaagtgtcctgccagttaagagtctgtgatttggcaaaggggttgttgggaagtgaggtgggcaattagctgagagggagaattgactagctttgtttttacttggtttacctgtaagcaaagtgtgggctacacacatctgtagtcgctgaggctagagcttgactcgagagaggaaaggaagaatgcaagcatggtcaagtggcagaggtgggttaggtgcttttctgatcccagcttctcttctgcatgcgcgtgggaagccaaggaagaggaaaaaagagtgaattcgccctaggatagggaaggagtagccgcgtgaggttgagtatgcccatttccgtgatttctctcgattcagcgagtcatacgttggaaacgtttagattcacaaactatcgttactgtctggggctttcagaagcttgcctttgaaccgaattttcgtgagccaaccggtgtggaattgggggcccctcccttcctccaggcctcctggcgatggagtaagcagcaggcgcccccttgtgccaaggaaagagtactgttgccattggccaacttggctccctttctggggaaattttattttcctgtggcttctgtgactttgtcgtcttgctcttgacatgagatatgatgggaagaatacttggggcactgatttcatatctagagtcagtgaactgctgatgctgtatcctgtccctaccacttccattcattcagaacacaggtttaagatgcctatttgtgttctaggccctgggatatagttgtgatgtaaagcccctgcccttagcaacttaaataagcaatagcaataacggcaatagggcagaatgtaatgagggcatagcacactgtctagtgaggatcagagaattccagaaacaagtgatacaggttttttaggtattcgccagataagagaagaaaaagagtcttccagccgtcctccttaaatttctcagttcaaattttttttttccttttaggcatagttcttcatcccaaattgatgagctgcctctgatgcttttgctttcctttcaaatttcccaggctggtgtttgaaagttcttgaggagcctttatgactccttttagctcaaggaattataaaagatgccttaaggtgcattccctgcctcggagtggctttgcgattgtttatacgttgctaccatcccaacaaagagatggcaaataacagttttctccatccctggtagtctactctgtcttcaccctcagtttgtttcagcagtgtgagctggctgaggtcctgctgagtggtggttttcttttccttccccacttaatttaacagaccagctgaacacacatcagagagctaagctagagtgtggagtcattatggtcttctagtatggttttatgccccactttggggactctggtttgggacctagtttattattctgggcaagaggaaaagggcacacgccaaataatagcaaccacaacacagatttgagtagaacttcacactttggtctgtttcaccatcatgacaattttgtgagataggaaaaaaaaaaagtctgctcccattttttatataaagaactgaggctcagagggactaatgagaacttgtaagtgacagagtcaggagttgaacccagatctttagttcctgcagaagtgcatccaataggctttaaaagatttctgtgaccttagctttccagctacttgcttagctgtatggaactttaccaacgacagttcagggcttcacagtgacacctactgaacccatttgctgtcaagatgctttcccctcatctgggaagttaggtggttggttaagtttgtcatagtaattctgagaggggaggttccagtgacgaatgctttcaagaatttgctttcactcgatgtgtgacattttcctcctttggggtttagaggcctgagggagctcaatcctggtagcaacacccctgaattcctggtggtgaaaggatgtggccccaggacccatcccggaaggaggtgctgaggtttgcagtcagctgccgtatcctgactctgatgctgcaggtcagtctcccatcctttgtcctgaatgtgctattgctacatgactggactaggcagtaagaagtgtccccatctcctttccacctctcaggtgtgcccctccatgtggttggaaccacagagacatagactttagagctgaaaagttgtcaggaatcttagaaacacggtctgttgatcttgttttacccatgaagcagcagaggcccagaaaggttaagtgacatccccaaagccacatagcaagatagagaagggctggagtttgaccccatgtttcctaactcctgagctagtggtctctccaacagactgtgatgttccgtaaccagagatgcttatagggtgggacagctcaaagtattgccctgtgtccccttactaggagactgagcattgtgtcagttgagtgggagaaacgtggcaatgtgcaagtcctaaaaccatctggatatgtaatagttcctcctattcccccgagtgcctgcccttcctgcctcacccacacacaactctcagtgcacttgcccgtttgcagctcccttttccctccgaggctccccttgatacacattttaataaaatatcacgtatatatgaattatttgctgcctagcacagtgcttggtgcctagctcagtatgttcataaatgaatgaatgttgttgaatgtatgtcaacaccctagggatgttagattcacataatgatgtgtaccttttatccctgtaccattctctctgaggctcataactggtccctttgtggaaactttcctctctcctttcccactacataaggcatggcagactctgctgggtttcgagattagttaaacgtgtccacctgcaggctagggctgtttatctgtgactgtcactcctatcctgtttgtttttactgtttgaagtggcctgataaggaaactgaccaaaaagttaaaaagccttaaaaatggtgctatgctcctgttgccaggctagggagacttactcagtgatgtctctcaaccagcatcagctgggttactggcagaaccaaaggagcaatgctgcaagtcagcatccaggatagggaaccaggacagctgggctctaattcgggtggtaattttggaaacagtatatttcctctaggcagttcattcaaccaccaaaaatttttaaagtacctattgcgttccaagaactgtgctaggtggtaagtgtaaaaagacatggtctcttttctcttaagtagctgatgatctaatagggcaaaaagactttttttttttgagacagagtctcgccctgtccccccaggctggagtgcaaaggcgcgatcttggctcactgtaacctctgcctcccaggtttaaatgattctccctcctcaggctctgaagtagctgaggcgcccgccaccacacccagctaatttttgtattttttttttttttttttgagacggagtctcgctctgtcgcccaggccggactgcggactgcagtggcgcaatctcggctcactgcaagctccgcttcccgggttcacgccattctcctgcctcagcctcccgagtagctgggactacaggcgcccgccaccgcgcccggctaattttttgtatttttagtagagaccgggtttcaccttgctggc

SEQ ID NO: 1516 - DNA, 7951 bp, Homo sapiens
cctcctcctccgccgccgccagcccggagcctgagccggcggggcgggggggagaggagcgagcgcagcgcagcagcggagccccgcgaggcccgcccgggcgggtggggagggcagcccgggggactgggccccggggcggggtgggagggggggagaagacgaagacagggccgggtctctccgcggacgagacagcggggatcatggccgcgcaggtcgcccccgccgccgccagcagcctgggcaacccgccgccgccgccgccctcggagctgaagaaagccgagcagcagcagcgggaggaggcggggggcgaggcggcggcggcggcagcggccgagcgcggggaaatgaaggcagccgccgggcaggaaagcgagggccccgccgtggggccgccgcagccgctgggaaaggagctgcaggacggggccgagagcaatgggggtggcggcggcggcggagccggcagcggcggcgggcccggcgcggagccggacctgaagaactcgaacgggaacgcgggccctaggcccgccctgaacaataacctcacggagccgcccggcggcggcggtggcggcagcagcgatggggtgggggcgcctcctcactcagccgcggccgccttgccgcccccagcctacggcttcgggcaaccctacggccggagcccgtctgccgtcgccgccgccgcggccgccgtcttccaccaacaacatggcggacaacaaagccctggcctggcagcgctgcagagcggcggcggcgggggcctggagccctacgcggggccccagcagaactctcacgaccacggcttccccaaccaccagtacaactcctactaccccaaccgcagcgcctaccccccgcccgccccggcctacgcgctgagctccccgagaggtggcactccgggctccggcgcggcggcggctgccggctccaagccgcctccctcctccagcgcctccgcctcctcgtcgtcttcgtccttcgctcagcagcgcttcggggccatggggggaggcggcccctccgcggccggcgggggaactccccagcccaccgccacccccaccctcaaccaactgctcacgtcgcccagctcggcccggggctaccagggctaccccgggggcgactacagtggcgggccccaggacgggggcgccggcaagggcccggcggacatggcctcgcagtgttggggggctgcggcggcggcagctgcggcggcggccgcctcgggaggggcccaacaaaggagccaccacgcgcccatgagccccgggagcagcggcggcggggggcagccgctcgcccggacccctcagccatccagtccaatggatcagatgggcaagatgagacctcagccatatggcgggactaacccatactcgcagcaacagggacctccgtcaggaccgcagcaaggacatgggtacccagggcagccatacgggtcccagaccccgcagcggtacccgatgaccatgcagggccgggcgcagagtgccatgggcggcctctcttatacacagcagattcctccttatggacaacaaggccccagcgggtatggtcaacagggccagactccatattacaaccagcaaagtcctcaccctcagcagcagcagccaccctactcccagcaaccaccgtcccagacccctcatgcccaaccttcgtatcagcagcagccacagtctcaaccaccacagctccagtcctctcagcctccatactcccagcagccatcccagcctccacatcagcagtccccggctccatacccctcccagcagtcgacgacacagcagcacccccagagccagcccccctactcacagccacaggctcagtctccttaccagcagcagcaacctcagcagccagcaccctcgacgctctcccagcaggctgcgtatcctcagccccagtctcagcagtcccagcaaactgcctattcccagcagcgcttccctccaccgcaggagctatctcaagattcatttgggtctcaggcatcctcagccccctcaatgacctccagtaagggagggcaagaagatatgaacctgagccttcagtcaagaccctccagcttgcctgatctatctggttcaatagatgacctccccatggggacagaaggagctctgagtcctggagtgagcacatcagggatttccagcagccaaggagagcagagtaatccagctcagtctcctttctctcctcatacctcccctcacctgcctggcatccgaggcccttccccgtcccctgttggctctcccgccagtgttgctcagtctcgctcaggaccactctcgcctgctgcagtgccaggcaaccagatgccacctcggccacccagtggccagtcggacagcatcatgcatccttccatgaaccaatcaagcattgcccaagatcgaggttatatgcagaggaacccccagatgccccagtacagttccccccagcccggctcagccttatctccgcgtcagccttccggaggacagatacacacaggcatgggctcctaccagcagaactccatggggagctatggtccccaggggggtcagtatggcccacaaggtggctaccccaggcagccaaactataatgccttgcccaatgccaactaccccagtgcaggcatggctggaggcataaaccccatgggtgccggaggtcaaatgcatggacagcctggcatcccaccttatggcacactccctccagggaggatgagtcacgcctccatgggcaaccggccttatggccctaacatggccaatatgccacctcaggttgggtcagggatgtgtcccccaccagggggcatgaaccggaaaacccaagaaactgctgtcgccatgcatgttgctgccaactctatccaaaacaggccgccaggctaccccaatatgaatcaagggggcatgatgggaactggacctccttatggacaagggattaatagtatggctggcatgatcaaccctcagggacccccatattccatgggtggaaccatggccaacaattctgcagggatggcagccagcccagagatgatgggccttggggatgtaaagttaactccagccaccaaaatgaacaacaaggcagatgggacacccaagacagaatccaaatccaagaaatccagttcttctactacaaccaatgagaagatcaccaagttgtatgagctgggtggtgagcctgagaggaagatgtgggtggaccgttatctggccttcactgaggagaaggccatgggcatgacaaatctgcctgctgtgggtaggaaacctctggacctctatcgcctctatgtgtctgtgaaggagattggtggattgactcaggtcaacaagaacaaaaaatggcgggaacttgcaaccaacctcaatgtgggcacatcaagcagtgctgccagctccttgaaaaagcagtatatccagtgtctctatgcctttgaatgcaagattgaacggggagaagaccctcccccagacatctttgcagctgctgattccaagaagtcccagcccaagatccagcctccctctcctgcgggatcaggatctatgcaggggccccagactccccagtcaaccagcagttccatggcagaaggaggagacttaaagccaccaactccagcatccacaccacacagtcagatccccccattgccaggcatgagcaggagcaattcagttgggatccaggatgcctttaatgatggaagtgactccacattccagaagcggaattccatgactccaaaccctgggtatcagcccagtatgaatacctctgacatgatggggcgcatgtcctatgagccaaataaggatccttatggcagcatgaggaaagctccagggagtgatcccttcatgtcctcagggcagggccccaacggcgggatgggtgacccctacagtcgtgctgccggccctgggctaggaaatgtggcgatgggaccacgacagcactatccctatggaggtccttatgacagagtgaggacggagcctggaatagggcctgagggaaacatgagcactggggccccacagccgaatctcatgccttccaacccagactcggggatgtattctcctagccgctaccccccgcagcagcagcagcagcagcagcaacgacatgattcctatggcaatcagttctccacccaaggcaccccttctggcagccccttccccagccagcagactacaatgtatcaacagcaacagcaggaaccccggaggcatggcgggtaatgatgtccctcaagtctggtctcctggcagagagcacatgggcattagataccatcaacatcctgctgtatgatgacaacagcatcatgaccttcaacctcagtcagctcccagggttgctagagctccttgtagaatatttccgacgatgcctgattgagatctttggcattttaaaggagtatgaggtgggtgacccaggacagagaacgctactggatcctgggaggttcagcaaggtgtctagtccagctcccatggagggtggggaagaagaagaagaacttctaggtcctaaactagaagaggaagaagaagaggaagtagttgaaaatgatgaggagatagccttttcaggcaaggacaagccagcttcagagaatagtgaggagaagctgatcagtaagtttgacaagcttccagtaaagatcgtacagaagaatgatccatttgtggtggactgctcagataagcttgggcgtgtgcaggagtttgacagtggcctgctgcactggcggattggtgggggggacaccactgagcatatccagacccacttcgagagcaagacagagctgctgccttcccggcctcacgcaccctgcccaccagcccctcggaagcatgtgacaacagcagagggtacaccagggacaacagaccaggaggggcccccacctgatggacctccagaaaaacggatcacagccactatggatgacatgttgtctactcggtctagcaccttgaccgaggatggagctaagagttcagaggccatcaaggagagcagcaagtttccatttggcattagcccagcacagagccaccggaacatcaagatcctagaggacgaaccccacagtaaggatgagaccccactgtgtacccttctggactggcaggattctcttgccaagcgctgcgtctgtgtgtccaataccattcgaagcctgtcatttgtgccaggcaatgactttgagatgtccaaacacccagggctgctgctcatcctgggcaagctgatcctgctgcaccacaagcacccagaacggaagcaggcaccactaacttatgaaaaggaggaggaacaggaccaaggggtgagctgcaacaaagtggagtggtggtgggactgcttggagatgctccgggaaaacaccttggttacactcgccaacatctcggggcagttggacctatctccataccccgagagcatttgcctgcctgtcctggacggactcctacactgggcagtttgcccttcagctgaagcccaggaccccttttccaccctgggccccaatgccgtcctttccccgcagagactggtcttggaaaccctcagcaaactcagcatccaggacaacaatgtggacctgattctggccacaccccccttcagccgcctggagaagttgtatagcactatggtgcgcttcctcagtgaccgaaagaacccggtgtgccgggagatggctgtggtactgctggccaacctggctcagggggacagcctggcagctcgtgccattgcagtgcagaagggcagtatcggcaacctcctgggcttcctagaggacagccttgccgccacacagttccagcagagccaggccagcctcctccacatgcagaacccaccctttgagccaactagtgtggacatgatgcggcgggctgcccgcgcgctgcttgccttggccaaggtggacgagaaccactcagagtttactctgtacgaatcacggctgttggacatctcggtatcaccgttgatgaactcattggtttcacaagtcatttgtgatgtactgtttttgattggccagtcatgacagccgtgggacacctcccccccccgtgtgtgtgtgcgtgtgtggagaacttagaaactgactgttgccctttatttatgcaaaaccacctcagaatccagtttaccctgtgctgtccagcttctcccttgggaaaaagtctctcctgtttctctctcctccttccacctcccctccctccatcacctcacgcctttctgttccttgtcctcaccttactcccctcaggaccctaccccaccctctttgaaaagacaaagctctgcctacatagaagactttttttattttaaccaaagttactgttgtttacagtgagtttggggaaaaaaaataaaataaaaatggctttcccagtccttgcatcaacgggatgccacatttcataactgtttttaatggtaaaaaaaaaaaaaaaaaatacaaaaaaaaattctgaaggacaaaaaaggtgactgctgaactgtgtgtggtttattgttgtacattcacaatcttgcaggagccaagaagttcgcagttgtgaacagaccctgttcactggagaggcctgtgcagtagagtgtagaccctttcatgtactgtactgtacacctgatactgtaaacatactgtaataataatgtctcacatggaaacagaaaacgctgggtcagcagcaagctgtagtttttaaaaatgtttttagttaaacgttgaggagaaaaaaaaaaaaggcttttcccccaaagtatcatgtgtgaacctacaacaccctgacctctttctctcctccttgattgtatgaataaccctgagatcacctcttagaactggttttaacctttagctgcagcggctacgctgccacgtgtgtatatatatgacgttgtacattgcacatacccttggatccccacagtttggtcctcctcccagctacccctttatagtatgacgagttaacaagttggtgacctgcacaaagcgagacacagctatttaatctcttgccagatatcgcccctcttggtgcgatgctgtacaggtctctgtaaaaagtccttgctgtctcagcagccaatcaacttatagtttatttttttctgggtttttgttttgttttgttttctttctaatcgaggtgtgaaaaagttctaggttcagttgaagttctgatgaagaaacacaattgagattttttcagtgataaaatctgcatatttgtatttcaacaatgtagctaaaacttgatgtaaattcctcctttttttccttttttggcttaatgaatatcatttattcagtatgaaatctttatactatatgttccacgtgttaagaataaatgtacattaaatcttggtaagacttttgtgaagctttttattgttttcaaactaaaacttgaccttttgtcggggggcagggggatagtcctgtttttgcaaacctcccttagtgtgagatctcccctaaatagtggcattcctggaccctgtcatttatttactatattccaaaataagacaaccatttatctggaggcaatctccaacttaatcacttataatatctctggactggctcttttccctgactccagactagagcattcagccacctttcttgtcatccctgcttggaagtttactttgaacatgccaaagctaaaatgtcctgtcttcccccactagaaacctgcttctcccatagttttggtttttttgtttgtgttttccttttagtaaatggcaactccattctatcacttggctaaaaaaatccttgacttctttc

SEQ ID NO: 1517 - protein, 1370 aa, Homo sapiens
MAAQVAPAAASSLGNPPPPPPSELKKAEQQQREEAGGEAAAAAAAERGEMKAAAGQESEGPAVGPPQPLGKELQDGAESNGGGGGGGAGSGGGPGAEPDLKNSNGNAGPRPALNNNLTEPPGGGGGGSSDGVGAPPHSAAAALPPPAYGFGQPYGRSPSAVAAAAAAVFHQQHGGQQSPGLAALQSGGGGGLEPYAGPQQNSHDHGFPNHQYNSYYPNRSAYPPPAPAYALSSPRGGTPGSGAAAAAGSKPPPSSSASASSSSSSFAQQRFGAMGGGGPSAAGGGTPQPTATPTLNQLLTSPSSRYQGYPGGDYSGGPQDGGAGKGPADMASQCWGAAAAAAAAAAASGGAQQRSHHAPMSPGSSGGGGQPLARTPQPSSPMDQMGKMRPQPYGGTNPYSQQQGPPSGPQQGHGYPGQPYGSQTPQRYPMTMQGRAQSAMGGLSYTQQIPPYGQQGPSGYGQQGQTPYYNQQSPHPQQQQPPYSQQPPSQTPHAQPSYQQQPQSQPPQLQSSQPPYSQQPSQPPHQQSPAPYPSQQSTTQQHPQSQPPYSQPQAQSPYQQQQPQQPAPSTLSQQAAYPQPQSQQSQQTAYSQQRFPPPQELSQDSFGSQASSAPSMTSSKGGQEDMNLSLQSRPSSLPDLSGSIDDLPMGTEGALSPGVSTSGISSSQGEQSNPAQSPFSPHTSPHLPGIRGPSPSPVGSPASVAQSRSGPLSPAAVPGNQMPPRPPSGQSDSIMHPSMNQSSIAQDRGYMQRNPQMPQYSSPQPGSALSPRQPSGGQIHTGMGSYQQNSMGSYGPQGGQYGPQGGYPRQPNYNALPNANYPSAGMAGGINPMGAGGQMHGQPGIPPYGTLPPGRMSHASMGNRPYGPNMANMPPQVGSGMCPPPGGMNRKTQETAVAMHVAANSIQNRPPGYPNMNQGGMMGTGPPYGQGINSMAGMINPQGPPYSMGGTMANNSAGMADEMMGLGDVKLTPATKMNNKADGTPKTESKSKKSSSSTTTNEKITKLYELGGEPERKMWVDRYLAFTEEKAMGMTNLPAVGRKPLDLYRLYVSVKEIGGLTQVNKNKKWRELATNLNVGTSSSAASSLKKQYIQCLYAFECKIERGEDPPPDIFAAADSKKSQPKIQPPSPAGSGSMQGPQTPQSTSSSMAEGGDLKPPTPASTPHSQIPPLPGMSRSNSVGIQDAFNDGSDSTFQKRNSMTPNPGYQPSMNTSDMMGRMSYEPNKDPYGSMRKAPGSDPFMSSGQGPNGGMGDPYSRAAGPGLGNVAMGPRQHYPYGGPYDRVRTEPGIGPEGNMSTGAPQPNLMPSNPDSGMYSPSRYPPQQQQQQQQRHDSYGNQFSTQGTPSGSPFPSQQTTMYQQQQQEPRRHGG

SEQ ID NO: 1518 - DNA, 8719 bp, Homo sapiens
cctcctcctccgccgccgccagcccggagcctgagccggcggggcgggggggagaggagcgagcgcagcgcagcagcggagccccgcgaggcccgcccgggcgggtggggagggcagcccgggggactgggccccggggcggggtgggagggggggagaagacgaagacagggccgggtctctccgcggacgagacagcggggatcatggccgcgcaggtcgcccccgccgccgccagcagcctgggcaacccgccgccgccgccgccctcggagctgaagaaagccgagcagcagcagcgggaggaggcggggggcgaggcggcggcggcggcagcggccgagcgcggggaaatgaaggcagccgccgggcaggaaagcgagggccccgccgtggggccgccgcagccgctgggaaaggagctgcaggacggggccgagagcaatgggggtggcggcggcggcggagccggcagcggcggcgggcccggcgcggagccggacctgaagaactcgaacgggaacgcgggccctaggcccgccctgaacaataacctcacggagccgcccggcggcggcggtggcggcagcagcgatggggtgggggcgcctcctcactcagccgcggccgccttgccgcccccagcctacggcttcgggcaaccctacggccggagcccgtctgccgtcgccgccgccgcggccgccgtcttccaccaacaacatggcggacaacaaagccctggcctggcagcgctgcagagcggcggcggcgggggcctggagccctacgcggggccccagcagaactctcacgaccacggcttccccaaccaccagtacaactcctactaccccaaccgcagcgcctaccccccgcccgccccggcctacgcgctgagctccccgagaggtggcactccgggctccggcgcggcggcggctgccggctccaagccgcctccctcctccagcgcctccgcctcctcgtcgtcttcgtccttcgctcagcagcgcttcggggccatggggggaggcggcccctccgcggccggcgggggaactccccagcccaccgccacccccaccctcaaccaactgctcacgtcgcccagctcggcccggggctaccagggctaccccgggggcgactacagtggcgggccccaggacgggggcgccggcaagggcccggcggacatggcctcgcagtgttggggggctgcggcggcggcagctgcggcggcggccgcctcgggaggggcccaacaaaggagccaccacgcgcccatgagccccgggagcagcggcggcggggggcagccgctcgcccggacccctcagccatccagtccaatggatcagatgggcaagatgagacctcagccatatggcgggactaacccatactcgcagcaacagggacctccgtcaggaccgcagcaaggacatgggtacccagggcagccatacgggtcccagaccccgcagcggtacccgatgaccatgcagggccgggcgcagagtgccatgggcggcctctcttatacacagcagattcctccttatggacaacaaggccccagcgggtatggtcaacagggccagactccatattacaaccagcaaagtcctcaccctcagcagcagcagccaccctactcccagcaaccaccgtcccagacccctcatgcccaaccttcgtatcagcagcagccacagtctcaaccaccacagctccagtcctctcagcctccatactcccagcagccatcccagcctccacatcagcagtccccggctccatacccctcccagcagtcgacgacacagcagcacccccagagccagcccccctactcacagccacaggctcagtctccttaccagcagcagcaacctcagcagccagcaccctcgacgctctcccagcaggctgcgtatcctcagccccagtctcagcagtcccagcaaactgcctattcccagcagcgcttccctccaccgcaggagctatctcaagattcatttgggtctcaggcatcctcagccccctcaatgacctccagtaagggagggcaagaagatatgaacctgagccttcagtcaagaccctccagcttgcctgatctatctggttcaatagatgacctccccatggggacagaaggagctctgagtcctggagtgagcacatcagggatttccagcagccaaggagagcagagtaatccagctcagtctcctttctctcctcatacctcccctcacctgcctggcatccgaggcccttccccgtcccctgttggctctcccgccagtgttgctcagtctcgctcaggaccactctcgcctgctgcagtgccaggcaaccagatgccacctcggccacccagtggccagtcggacagcatcatgcatccttccatgaaccaatcaagcattgcccaagatcgaggttatatgcagaggaacccccagatgccccagtacagttccccccagcccggctcagccttatctccgcgtcagccttccggaggacagatacacacaggcatgggctcctaccagcagaactccatggggagctatggtccccaggggggtcagtatggcccacaaggtggctaccccaggcagccaaactataatgccttgcccaatgccaactaccccagtgcaggcatggctggaggcataaaccccatgggtgccggaggtcaaatgcatggacagcctggcatcccaccttatggcacactccctccagggaggatgagtcacgcctccatgggcaaccggccttatggccctaacatggccaatatgccacctcaggttgggtcagggatgtgtcccccaccagggggcatgaaccggaaaacccaagaaactgctgtcgccatgcatgttgctgccaactctatccaaaacaggccgccaggctaccccaatatgaatcaagggggcatgatgggaactggacctccttatggacaagggattaatagtatggctggcatgatcaaccctcagggacccccatattccatgggtggaaccatggccaacaattctgcagggatggcagccagcccagagatgatgggccttggggatgtaaagttaactccagccaccaaaatgaacaacaaggcagatgggacacccaagacagaatccaaatccaagaaatccagttcttctactacaaccaatgagaagatcaccaagttgtatgagctgggtggtgagcctgagaggaagatgtgggtggaccgttatctggccttcactgaggagaaggccatgggcatgacaaatctgcctgctgtgggtaggaaacctctggacctctatcgcctctatgtgtctgtgaaggagattggtggattgactcaggtcaacaagaacaaaaaatggcgggaacttgcaaccaacctcaatgtgggcacatcaagcagtgctgccagctccttgaaaaagcagtatatccagtgtctctatgcctttgaatgcaagattgaacggggagaagaccctcccccagacatctttgcagctgctgattccaagaagtcccagcccaagatccagcctccctctcctgcgggatcaggatctatgcaggggccccagactccccagtcaaccagcagttccatggcagaaggaggagacttaaagccaccaactccagcatccacaccacacagtcagatccccccattgccaggcatgagcaggagcaattcagttgggatccaggatgcctttaatgatggaagtgactccacattccagaagcggaattccatgactccaaaccctgggtatcagcccagtatgaatacctctgacatgatggggcgcatgtcctatgagccaaataaggatccttatggcagcatgaggaaagctccagggagtgatcccttcatgtcctcagggcagggccccaacggcgggatgggtgacccctacagtcgtgctgccggccctgggctaggaaatgtggcgatgggaccacgacagcactatccctatggaggtccttatgacagagtgaggacggagcctggaatagggcctgagggaaacatgagcactggggccccacagccgaatctcatgccttccaacccagactcggggatgtattctcctagccgctaccccccgcagcagcagcagcagcagcagcaacgacatgattcctatggcaatcagttctccacccaaggcaccccttctggcagccccttccccagccagcagactacaatgtatcaacagcaacagcagaattacaagcggccaatggatggcacatatggccctcctgccaagcggcacgaaggggagatgtacagcgtgccatacagcactgggcaggggcagcctcagcagcagcagttgcccccagcccagccccagcctgccagccagcaacaagctgcccagccttcccctcagcaagatgtatacaaccagtatggcaatgcctatcctgccactgccacagctgctactgagcgccgaccagcaggcggcccccagaaccaatttccattccagtttggccgagaccgtgtctctgcaccccctggcaccaatgcccagcaaaacatgccaccacaaatgatgggcggccccatacaggcatcagctgaggttgctcagcaaggcaccatgtggcaggggcgtaatgacatgacctataattatgccaacaggcagagcacgggctctgccccccagggccccgcctatcatggcgtgaaccgaacagatgaaatgctgcacacagatcagagggccaaccacgaaggctcgtggccttcccatggcacacgccagcccccatatggtccctctgcccctgtgccccccatgacaaggccccctccatctaactaccagcccccaccaagcatgcagaatcacattcctcaggtatccagccctgctcccctgccccggccaatggagaaccgcacctctcctagcaagtctccattcctgcactctgggatgaaaatgcagaaggcaggtcccccagtacctgcctcgcacatagcacctgcccctgtgcagccccccatgattcggcgggatatcaccttcccacctggctctgttgaagccacacagcctgtgttgaagcagaggaggcggctcacaatgaaagacattggaaccccggaggcatggcgggtaatgatgtccctcaagtctggtctcctggcagagagcacatgggcattagataccatcaacatcctgctgtatgatgacaacagcatcatgaccttcaacctcagtcagggttgctagagctccttgtagaatatttccgacgatgcctgattgagatctttggcattttaaaggagtatgaggtgggtgacccaggacagagaacgctactggatcctgggaggttcagcaaggtgtctagtccagctcccatggagggtggggaagaagaagaagaacttctaggtcctaaactagaagaggaagaagaagaggaagtagttgaaaatgatgaggagatagccttttcaggcaaggacaagccagcttcagagaatagtgaggagaagctgatcagtaagtttgacaagcttccagtaaagatcgtacagaagaatgatccatttgtggtggactgctcagataagcttgggcgtgtgcaggagtttgacagtggcctgctgcactggcggattggtgggggggacaccactgagcatatccagacccacttcgagagcaagacagagctgctgccttcccggcctcacgcaccctgcccaccagcccctcggaagcatgtgacaacagcagagggtacaccagggacaacagaccaggaggggcccccacctgatggacctccagaaaaacggatcacagccactatggatgacatgttgtctactcggtctagcaccttgaccgaggatggagctaagagttcagaggccatcaaggagagcagcaagtttccatttggcattagcccagcacagagccaccggaacatcaagatcctagaggacgaaccccacagtaaggatgagaccccactgtgtacccttctggactggcaggattctcttgccaagcgctgcgtctgtgtgtccaataccattcgaagcctgtcatttgtgccaggcaatgactttgagatgtccaaacacccagggctgctgctcatcctgggcaagctgatcctgctgcaccacaagcacccagaacggaagcaggcaccactaacttatgaaaaggaggaggaacaggaccaaggggtgagctgcaacaaagtggagtggtggtgggactgcttggagatgctccgggaaaacaccttggttacactcgccaacatctcggggcagttggacctatctccataccccgagagcatttgcctgcctgtcctggacggactcccaccctgggccccaatgccgtcctttccccgcagagactggtcttggaaaccctcagcaaactcagcatccaggacaacaatgtggacctgattctggccacaccccccttcagccgcctggagaagttgtatagcactatggtgcgcttcctcagtgaccgaaagaacccggtgtgccgggagatggctgtggtactgctggccaacctggctcagggggacagcctggcagctcgtgccattgcagtgcagaagggcagtatcggcaacctcctgggcttcctagaggacagccttgccgccacacagttccagcagagccaggccagcctcctccacatgcagaacccaccctttgagccaactagtgtggacatgatgcggcgggctgcccgcgcgctgcttgccttggccaaggtggacgagaaccactcagagtttactctgtacgaatcacggctgttggacatctcggtatcaccgttgatgaactcattggtttcacaagtcatttgtgatgtactgtttttgattggccagtcatgacagccgtgggacacctcccccccccgtgtgtgtgtgcgtgtgtggagaacttagaaactgactgttgccctttatttatgcaaaaccacctcagaatccagtttaccctgtgctgtccagcttctcccttgggaaaaagtctctcctgtttctctctcctccttccacctcccctccctccatcacctcacgcctttctgttccttgtcctcaccttactcccctcaggaccctaccccaccctctttgaaaagacaaagctctgcctacatagaagactttttttattttaaccaaagttactgttgtttacagtgagtttggggaaaaaaaataaaataaaaatggctttcccagtccttgcatcaacgggatgccacatttcataactgtttttaatggtaaaaaaaaaaaaaaaaaatacaaaaaaaaattctgaaggacaaaaaaggtgactgctgaactgtgtgtggtttattgttgtacattcacaatcttgcaggagccaagaagttcgcagttgtgaacagaccctgttcactggagaggcctgtgcagtagagtgtagaccctttcatgtactgtactgtacacctgatactgtaaacatactgtaataataatgtctcacatggaaacagaaaacgctgggtcagcagcaagctgtagtttttaaaaatgtttttagttaaacgttgaggagaaaaaaaaaaaaggcttttcccccaaagtatcatgtgtgaacctacaacaccctgacctctttctctcctccttgattgtatgaataaccctgagatcacctcttagaactggttttaacctttagctgcagcggctacgctgccacgtgtgtatatatatgacgttttaacaagttggtgacctgcacaaagcgagacacagctatttaatctcttgccagatatcgcccctcttggtgcgatgctgtacaggtctctgtaaaaagtccttgctgtctcagcagccaatcaacttatagtttatttttttctgggtttttgttttgttttgttttctttctaatcgaggtgtgaaaaagttctaggttcagttgaagttctgatgaagaaacacaattgagattttttcagtgataaaatctgcatatttgtatttcaacaatgtagctaaaacttgatgtaaattcctcctttttttccttttttggcttaatgaatatcatttattcagtatgaaatctttatactatatgttccacgtgttaagaataaatgtacattaaatcttggtaagacttttgtgaagctttttattgttttcaaactaaaacttgaccttttgtcggggggcagggggatagtcctgtttttgcaaacctcccttagtgtgagatctcccctaaatagtggcattcctggaccctgtcatttatttactatattccaaaataagacaaccatttatctggaggcaatctccaacttaatcacttataatatctctggactggctcttttccctgactccagactagagcattcagccacctttcttgtcatccctgcttggaagtttactttgaacatgccaaagctaaaatgtcctgtcttcccccactagaaacctgcttctcccatagttttggtttttttgtttgtgttttccttttagtaaatggcaactccattctatcacttggctaaaaaaatccttgacttctttc

SEQ ID NO: 1519 - protein, 1704 aa, Homo sapiens
MAAQVAPAAASSLGNPPPPPPSELKKAEQQQREEAGGEAAAAAAAERGEMKAAAGQESEGPAVGPPQPLGKELQDGAESNGGGGGGGAGSGGGPGAEPDLKNSNGNAGPRPALNNNLTEPPGGGGGGSSDGVGAPPHSAAAALPPPAYGFGQPYGRSPSAVAAAAAAVFHQQHGGQQSPGLAALQSGGGGGLEPYAGPQQNSHDHGFPNHQYNSYYPNRSAYPPPAPAYALSSPRGGTPGSGAAAAAGSKPPPSSSASASSSSSSFAQQRFGAMGGGGPSAAGGGTPQPTATPTLNQLLTSPSSRYQGYPGGDYSGGPQDGGAGKGPADMASQCWGAAAAAAAAAAASGGAQQRSHHAPMSPGSSGGGGQPLARTPQPSSPMDQMGKMRPQPYGGTNPYSQQQGPPSGPQQGHGYPGQPYGSQTPQRYPMTMQGRAQSAMGGLSYTQQIPPYGQQGPSGYGQQGQTPYYNQQSPHPQQQQPPYSQQPPSQTPHAQPSYQQQPQSQPPQLQSSQPPYSQQPSQPPHQQSPAPYPSQQSTTQQHPQSQPPYSQPQAQSPYQQQQPQQPAPSTLSQQAAYPQPQSQQSQQTAYSQQRFPPPQELSQDSFGSQASSAPSMTSSKGGQEDMNLSLQSRPSSLPDLSGSIDDLPMGTEGALSPGVSTSGISSSQGEQSNPAQSPFSPHTSPHLPGIRGPSPSPVGSPASVAQSRSGPLSPAAVPGNQMPPRPPSGQSDSIMHPSMNQSSIAQDRGYMQRNPQMPQYSSPQPGSALSPRQPSGGQIHTGMGSYQQNSMGSYGPQGGQYGPQGGYPRQPNYNALPNANYPSAGMAGGINPMGAGGQMHGQPGIPPYGTLPPGRMSHASMGNRPYGPNMANMPPQVGSGMCPPPGGMNRKTQETAVAMHVAANSIQNRPPGYPNMNQGGMMGTGPPYGQGINSMAGMINPQGPPYSMGGTMANNSAGMADEMMGLGDVKLTPATKMNNKADGTPKTESKSKKSSSSTTTNEKITKLYELGGEPERKMWVDRYLAFTEEKAMGMTNLPAVGRKPLDLYRLYVSVKEIGGLTQVNKNKKWRELATNLNVGTSSSAASSLKKQYIQCLYAFECKIERGEDPPPDIFAAADSKKSQPKIQPPSPAGSGSMQGPQTPQSTSSSMAEGGDLKPPTPASTPHSQIPPLPGMSRSNSVGIQDAFNDGSDSTFQKRNSMTPNPGYQPSMNTSDMMGRMSYEPNKDPYGSMRKAPGSDPFMSSGQGPNGGMGDPYSRAAGPGLGNVAMGPRQHYPYGGPYDRVRTEPGIGPEGNMSTGAPQPNLMPSNPDSGMYSPSRYPPQQQQQQQQRHDSYGNQFSTQGTPSGSPFPSQQTTMYQQQQQNYKRPMDGTYGPPAKRHEGEMYSVPYSTGQGQPQQQQLPPAQPQPASQQQAAQPSPQQDVYNQYGNAYPATATAATERRPAGGPQNQFPFQFGRDRVSAPPGTNAQQNMPPQMMGGPIQASAEVAQQGTMWQGRNDMTYNYANRQSTGSAPQGPAYHGVNRTDEMLHTDQRANHEGSWPSHGTRQPPYGPSAPVPPMWPPSNYQPPPSMQNHIPQVSSPAPLPRPMENRTSPSKSPFLHSGMKMQKAGPPVPASHIAPAPVQPPMIRRDITFPPGSVEATQPVLKQRRRLTMKDIGTPEAWRVMMSLKSGLLAESTWALDTINILLYDDNSIMTFNLSQGC

SEQ ID NO: 1520 - DNA, 8033 bp, Homo sapiens
cctcctcctccgccgccgccagcccggagcctgagccggcggggcgggggggagaggagcgagcgcagcgcagcagcggagccccgcgaggcccgcccgggcgggtggggagggcagcccgggggactgggccccggggcggggtgggagggggggagaagacgaagacagggccgggtctctccgcggacgagacagcggggatcatggccgcgcaggtcgcccccgccgccgccagcagcctgggcaacccgccgccgccgccgccctcggagctgaagaaagccgagcagcagcagcgggaggaggcggggggcgaggcggcggcggcggcagcggccgagcgcggggaaatgaaggcagccgccgggcaggaaagcgagggccccgccgtggggccgccgcagccgctgggaaaggagctgcaggacggggccgagagcaatgggggtggcggcggcggcggagccggcagcggcggcgggcccggcgcggagccggacctgaagaactcgaacgggaacgcgggccctaggcccgccctgaacaataacctcacggagccgcccggcggcggcggtggcggcagcagcgatggggtgggggcgcctcctcactcagccgcggccgccttgccgcccccagcctacggcttcgggcaaccctacggccggagcccgtctgccgtcgccgccgccgcggccgccgtcttccaccaacaacatggcggacaacaaagccctggcctggcagcgctgcagagcggcggcggcgggggcctggagccctacgcggggccccagcagaactctcacgaccacggcttccccaaccaccagtacaactcctactaccccaaccgcagcgcctaccccccgcccgccccggcctacgcgctgagctccccgagaggtggcactccgggctccggcgcggcggcggctgccggctccaagccgcctccctcctccagcgcctccgcctcctcgtcgtcttcgtccttcgctcagcagcgcttcggggccatggggggaggcggcccctccgcggccggcgggggaactccccagcccaccgccacccccaccctcaaccaactgctcacgtcgcccagctcggcccggggctaccagggctaccccgggggcgactacagtggcgggccccaggacgggggcgccggcaagggcccggcggacatggcctcgcagtgttggggggctgcggcggcggcagctgcggcggcggccgcctcgggaggggcccaacaaaggagccaccacgcgcccatgagccccgggagcagcggcggcggggggcagccgctcgcccggacccctcagccatccagtccaatggatcagatgggcaagatgagacctcagccatatggcgggactaacccatactcgcagcaacagggacctccgtcaggaccgcagcaaggacatgggtacccagggcagccatacgggtcccagaccccgcagcggtacccgatgaccatgcagggccgggcgcagagtgccatgggcggcctctcttatacacagcagattcctccttatggacaacaaggccccagcgggtatggtcaacagggccagactccatattacaaccagcaaagtcctcaccctcagcagcagcagccaccctactcccagcaaccaccgtcccagacccctcatgcccaaccttcgtatcagcagcagccacagtctcaaccaccacagctccagtcctctcagcctccatactcccagcagccatcccagcctccacatcagcagtccccggctccatacccctcccagcagtcgacgacacagcagcacccccagagccagcccccctactcacagccacaggctcagtctccttaccagcagcagcaacctcagcagccagcaccctcgacgctctcccagcaggctgcgtatcctcagccccagtctcagcagtcccagcaaactgcctattcccagcagcgcttccctccaccgcaggagctatctcaagattcatttgggtctcaggcatcctcagccccctcaatgacctccagtaagggagggcaagaagatatgaacctgagccttcagtcaagaccctccagcttgcctgatctatctggttcaatagatgacctccccatggggacagaaggagctctgagtcctggagtgagcacatcagggatttccagcagccaaggagagcagagtaatccagctcagtctcctttctctcctcatacctcccctcacctgcctggcatccgaggcccttccccgtcccctgttggctctcccgccagtgttgctcagtctcgctcaggaccactctcgcctgctgcagtgccaggcaaccagatgccacctcggccacccagtggccagtcggacagcatcatgcatccttccatgaaccaatcaagcattgcccaagatcgaggttatatgcagaggaacccccagatgccccagtacagttccccccagcccggctcagccttatctccgcgtcagccttccggaggacagatacacacaggcatgggctcctaccagcagaactccatggggagctatggtccccaggggggtcagtatggcccacaaggtggctaccccaggcagccaaactataatgccttgcccaatgccaactaccccagtgcaggcatggctggaggcataaaccccatgggtgccggaggtcaaatgcatggacagcctggcatcccaccttatggcacactccctccagggaggatgagtcacgcctccatgggcaaccggccttatggccctaacatggccaatatgccacctcaggttgggtcagggatgtgtcccccaccagggggcatgaaccggaaaacccaagaaactgctgtcgccatgcatgttgctgccaactctatccaaaacaggccgccaggctaccccaatatgaatcaagggggcatgatgggaactggacctccttatggacaagggattaatagtatggctggcatgatcaaccctcagggacccccatattccatgggtggaaccatggccaacaattctgcagggatggcagccagcccagagatgatgggccttggggatgtaaagttaactccagccaccaaaatgaacaacaaggcagatgggacacccaagacagaatccaaatccaagaaatccagttcttctactacaaccaatgagaagatcaccaagttgtatgagctgggtggtgagcctgagaggaagatgtgggtggaccgttatctggccttcactgaggagaaggccatgggcatgacaaatctgcctgctgtgggtaggaaacctctggacctctatcgcctctatgtgtctgtgaaggagattggtggattgactcaggtcaacaagaacaaaaaatggcgggaacttgcaaccaacctcaatgtgggcacatcaagcagtgctgccagctccttgaaaaagcagtatatccagtgtctctatgcctttgaatgcaagattgaacggggagaagaccctcccccagacatctttgcagctgctgattccaagaagtcccagcccaagatccagcctccctctcctgcgggatcaggatctatgcaggggccccagactccccagtcaaccagcagttccatggcagaaggaggagacttaaagccaccaactccagcatccacaccacacagtcagatccccccattgccaggcatgagcaggagcaattcagttgggatccaggatgcctttaatgatggaagtgactccacattccagaagcggaattccatgactccaaaccctgggtatcagcccagtatgaatacctctgacatgatggggcgcatgtcctatgagccaaataaggatccttatggcagcatgaggaaagctccagggagtgatcccttcatgtcctcagggcagggccccaacggcgggatgggtgacccctacagtcgtgctgccggccctgggctaggaaatgtggcgatgggaccacgacagcactatccctatggaggtccttatgacagagtgaggacggagcctggaatagggcctgagggaaacatgagcactggggccccacagccgaatctcatgccttccaacccagactcggggatgtattctcctagccgctaccccccgcagcagcagcagcagcagcagcaacgacatgattcctatggcaatcagttctccacccaaggcaccccttctggcagccccttccccagccagcagactacaatgtatcaacagcaacagcaggtatccagccctgctcccctgccccggccaatggagaaccgcacctctcctagcaagtctccattcctgcactctgggatgaaaatgcagaaggcaggtcccccagtacctgcctcgcacatagcacctgcccctgtgcagccccccatgattcggcgggatatcaccttcccacctggctctgttgaagccacacagcctgtgttgaagcagaggaggcggctcacaatgaaagacattggaaccccggaggcatggcgggtaatgatgtccctcaagtctggtctcctggcagagagcacatgggcattagataccatcaacatcctgctgtatgatgacaacagcatcatgaccttcaacctcagtcagctcccagggttgctagagctccttgtagaatatttccgacgatgcctgattgagatctttggcattttaaaggagtatgaggtgggtgacccaggacagagaacgctactggatcctgggaggttcagcaaggtgtctagtccagctcccatggagggtggggaagaagaagaagaacttctaggtcctaaactagaagaggaagaagaagaggaagtagttgaaaatgatgaggagatagccttttcaggcaaggacaagccagcttcagagaatagtgaggagaagctgatcagtaagtttgacaagcttccagtaaagatcgtacagaagaatgatccatttgtggtggactgctcagataagcttgggcgtgtgcaggagtttgacagtggcctgctgcactggcggattggtgggggggacaccactgagcatatccagacccacttcgagagcaagacagagctgctgccttcccggcctcacgcaccctgcccaccagcccctcggaagcatgtgacaacagcagagggtacaccagggacaacagaccaggaggggcccccacctgatggacctccagaaaaacggatcacagccactatggatgacatgttgtctactcggtctagcaccttgaccgaggatggagctaagagttcagaggccatcaaggagagcagcaagtttccatttggcattagcccagcacagagccaccggaacatcaagatcctagaggacgaaccccacagtaaggatgagaccccactgtgtacccttctggactggcaggattctcttgccaagcgctgcgtctgtgtgtccaataccattcgaagcctgtcatttgtgccaggcaatgactttgagatgtccaaacacccagggctgctgctcatcctgggcaagctgatcctgctgcaccacaagcacccagaacggaagcaggcaccactaacttatgaaaaggaggaggaacaggaccaaggggtgagctgcaacaaagtggagtggtggtgggactgcttggagatgctccgggaaaacaccttggttacactcgccaacatctcggggcagttggacctatctccataccccgagagcatttgcctgcctgtcctggacggactcctacactgggcagtttgcccttcagctgaagcccaggaccccttttccaccctgggccccaatgccgtcctttccccgcagagactggtcttggaaaccctcagcaaactcagcatccaggacaacaatgtggacctgattctggccacaccccccttcagccgcctggagaagttgtatagcactatggtgcgcttcctcagtgaccgaaagaacccggtgtgccgggagatggctgtggtactgctggccaacctggctcagggggacagcctggcagctcgtgccattgcagtgcagaagggcagtatcggcaacctcctgggcttcctagaggacagccttgccgccacacagttccagcagagccaggccagcctcctccacatgcagaacccaccctttgagccaactagtgtggacatgatgcggcgggctgcccgcgcgctgcttgccttggccaaggtggacgagaaccactcagagtttactctgtacgaatcacggctgttggacatctcggtatcaccgttgatgaactcattggtttcacaagtcatttgtgatgtactgtttttgattggccagtcatgacagccgtgggacacctcccccccccgtgtgtgtgtgcgtgtgtggagaacttagaaactgactgttgccctttatttatgcaaaaccacctcagaatccagtttaccctgtgctgtccagcttctcccttgggaaaaagtctctcctgtttctctctcctccttccacctcccctccctccatcacctcacgcctttctgttccttgtcctcaccttactcccctcaggaccctaccccaccctctttgaaaagacaaagctctgcctacatagaagactttttttattttaaccaaagttactgttgtttacagtgagtttggggaaaaaaaataaaataaaaatggctttcccagtccttgcatcaacgggatgccacatttcataactgtttttaatggtaaaaaaaaaaaaaaaaaatacaaaaaaaaattctgaaggacaaaaaaggttggagaggcctgtgcagtagagtgtagaccctttcatgtactgtactgtacacctgatactgtaaacatactgtaataataatgtctcacatggaaacagaaaacgctgggtcagcagcaagctgtagtttttaaaaatgtttttagttaaacgttgaggagaaaaaaaaaaaaggcttttcccccaaagtatcatgtgtgaacctacaacaccctgacctctttctctcctccttgattgtatgaataaccctgagatcacctcttagaactggttttaacctttagctgcagcggctacgctgccacgtgtgtatatatatgacgttttaacaagttggtgacctgcacaaagcgagacacagctatttaatctcttgccagatatcgcccctcttggtgcgatgctgtacaggtctctgtaaaaagtccttgctgtctcagcagccaatcaacttatagtttatttttttctgggtttttgttttgttttgttttctttctaatcgaggtgtgaaaaagttctaggttcagttgaagttctgatgaagaaacacaattgagattttttcagtgataaaatctgcatatttgtatttcaacaatgtagctaaaacttgatgtaaattcctcctttttttccttttttggcttaatgaatatcatttattcagtatgaaatctttatactatatgttccacgtgttaagaataaatgtacattaaatcttggtaagacttttgtgaagctttttattgttttcaaactaaaacttgaccttttgtcggggggcagggggatagtcctgtttttgcaaacctcccttagtgtgagatctcccctaaatagtggcattcctggaccctgtcatttatttactatattccaaaataagacaaccatttatctggaggcaatctccaacttaatcacttataatatctctggactggctcttttccctgactccagactagagcattcagccacctttcttgtcatccctgcttggaagtttactttgaacatgccaaagctaaaatgtcctgtcttcccccactagaaacctgcttctcccatagttttggtttttttgtttgtgttttccttttagtaaatggcaactccattctatcacttggctaaaaaaatccttgacttctttc

SEQ ID NO: 1521 - protein, 2058 aa, Homo sapiens
MAAQVAPAAASSLGNPPPPPPSELKKAEQQQREEAGGEAAAAAAAERGEMKAAAGQESEGPAVGPPQPLGKELQDGAESNGGGGGGGAGSGGGPGAEPDLKNSNGNAGPRPALNNNLTEPPGGGGGGSSDGVGAPPHSAAAALPPPAYGFGQPYGRSPSAVAAAAAAVFHQQHGGQQSPGLAALQSGGGGGLEPYAGPQQNSHDHGFPNHQYNSYYPNRSAYPPPAPAYALSSPRGGTPGSGAAAAAGSKPPPSSSASASSSSSSFAQQRFGAMGGGGPSAAGGGTPQPTATPTLNQLLTSPSSRYQGYPGGDYSGGPQDGGAGKGPADMASQCWGAAAAAAAAAAASGGAQQRSHHAPMSPGSSGGGGQPLARTPQPSSPMDQMGKMRPQPYGGTNPYSQQQGPPSGPQQGHGYPGQPYGSQTPQRYPMTMQGRAQSAMGGLSYTQQIPPYGQQGPSGYGQQGQTPYYNQQSPHPQQQQPPYSQQPPSQTPHAQPSYQQQPQSQPPQLQSSQPPYSQQPSQPPHQQSPAPYPSQQSTTQQHPQSQPPYSQPQAQSPYQQQQPQQPAPSTLSQQAAYPQPQSQQSQQTAYSQQRFPPPQELSQDSFGSQASSAPSMTSSKGGQEDMNLSLQSRPSSLPDLSGSIDDLPMGTEGALSPGVSTSGISSSQGEQSNPAQSPFSPHTSPHLPGIRGPSPSPVGSPASVAQSRSGPLSPAAVPGNQMPPRPPSGQSDSIMHPSMNQSSIAQDRGYMQRNPQMPQYSSPQPGSALSPRQPSGGQIHTGMGSYQQNSMGSYGPQGGQYGPQGGYPRQPNYNALPNANYPSAGMAGGINPMGAGGQMHGQPGIPPYGTLPPGRMSHASMGNRPYGPNMANMPPQVGSGMCPPPGGMNRKTQETAVAMHVAANSIQNRPPGYPNMNQGGMMGTGPPYGQGINSMAGMINPQGPPYSMGGTMANNSAGMADEMMGLGDVKLTPATKMNNKADGTPKTESKSKKSSSSTTTNEKITKLYELGGEPERKMWVDRYLAFTEEKAMGMTNLPAVGRKPLDLYRLYVSVKEIGGLTQVNKNKKWRELATNLNVGTSSSAASSLKKQYIQCLYAFECKIERGEDPPPDIFAAADSKKSQPKIQPPSPAGSGSMQGPQTPQSTSSSMAEGGDLKPPTPASTPHSQIPPLPGMSRSNSVGIQDAFNDGSDSTFQKRNSMTPNPGYQPSMNTSDMMGRMSYEPNKDPYGSMRKAPGSDPFMSSGQGPNGGMGDPYSRAAGPGLGNVAMGPRQHYPYGGPYDRVRTEPGIGPEGNMSTGAPQPNLMPSNPDSGMYSPSRYPPQQQQQQQQRHDSYGNQFSTQGTPSGSPFPSQQTTMYQQQQQVSSPAPLPRPMENRTSPSKSPFLHSGMKMQKAGPPVPASHIAPAPVQPPMIRRDITFPPGSVEATQPVLKQRRRLTMKDIGTPEAWRVMMSLKSGLLAESTWALDTINILLYDDNSIMTFNLSQLPGLLELLVEYFRRCLIEIFGILKEYEVGDPGQRTLLDPGRFSKVSSPAPMEGGEEEEELLGPKLEEEEEEEVVENDEEIAFSGKDKPASENSEEKLISKFDKLPVKIVQKNDPFVVDCSDKLGRVQEFDSGLLHWRIGGGDTTEHIQTHFESKTELLPSRPHAPCPPAPRKHVTTAEGTPGTTDQEGPPPDGPPEKRITATMDDMLSTRSSTLTEDGAKSSEAIKESSKFPFGISPAQSHRNIKIDEPHSKDETPLCTLLDWQDSLAKRCVCVSNTIRSLSFVPGNDFEMSKHPGLLLILGKLILLHHKHPERKQAPLTYEKEEEQDQGVSCNKVEWWWDCLEMLRENTLVTLANISGQLDLSPYPESICLPVLDGLLHWAVCPSAEAQDPFSTLGPNAVLSPQRLVLETLSKLSIQDNNVDLILATPPFSRLEKKTMVRFLSDRKNPVCREMAVVLLANLAQGDSLAARAIAVQKGSIGNLLGFLEDSLAATQFQQSQASLLHMQNPPFEPTSVDMMRRAARALLAKVDENHSEFTLYESRLLDISVSPLMNSLVSQVICDVLFLIGQS

SEQ ID NO: 1522 - DNA, 8684 bp, Homo sapiens
cctcctcctccgccgccgccagcccggagcctgagccggcggggcgggggggagaggagcgagcgcagcgcagcagcggagccccgcgaggcccgcccgggcgggtggggagggcagcccgggggactgggccccggggcggggtgggagggggggagaagacgaagacagggccgggtctctccgcggacgagacagcggggatcatggccgcgcaggtcgcccccgccgccgccagcagcctgggcaacccgccgccgccgccgccctcggagctgaagaaagccgagcagcagcagcgggaggaggcggggggcgaggcggcggcggcggcagcggccgagcgcggggaaatgaaggcagccgccgggcaggaaagcgagggccccgccgtggggccgccgcagccgctgggaaaggagctgcaggacggggccgagagcaatgggggtggcggcggcggcggagccggcagcggcggcgggcccggcgcggagccggacctgaagaactcgaacgggaacgcgggccctaggcccgccctgaacaataacctcacggagccgcccggcggcggcggtggcggcagcagcgatggggtgggggcgcctcctcactcagccgcggccgccttgccgcccccagcctacggcttcgggcaaccctacggccggagcccgtctgccgtcgccgccgccgcggccgccgtcttccaccaacaacatggcggacaacaaagccctggcctggcagcgctgcagagcggcggcggcgggggcctggagccctacgcggggccccagcagaactctcacgaccacggcttccccaaccaccagtacaactcctactaccccaaccgcagcgcctaccccccgcccgccccggcctacgcgctgagctccccgagaggtggcactccgggctccggcgcggcggcggctgccggctccaagccgcctccctcctccagcgcctccgcctcctcgtcgtcttcgtccttcgctcagcagcgcttcggggccatggggggaggcggcccctccgcggccggcgggggaactccccagcccaccgccacccccaccctcaaccaactgctcacgtcgcccagctcggcccggggctaccagggctaccccgggggcgactacagtggcgggccccaggacgggggcgccggcaagggcccggcggacatggcctcgcagtgttggggggctgcggcggcggcagctgcggcggcggccgcctcgggaggggcccaacaaaggagccaccacgcgcccatgagccccgggagcagcggcggcggggggcagccgctcgcccggacccctcagccatccagtccaatggatcagatgggcaagatgagacctcagccatatggcgggactaacccatactcgcagcaacagggacctccgtcaggaccgcagcaaggacatgggtacccagggcagccatacgggtcccagaccccgcagcggtacccgatgaccatgcagggccgggcgcagagtgccatgggcggcctctcttatacacagcagattcctccttatggacaacaaggccccagcgggtatggtcaacagggccagactccatattacaaccagcaaagtcctcaccctcagcagcagcagccaccctactcccagcaaccaccgtcccagacccctcatgcccaaccttcgtatcagcagcagccacagtctcaaccaccacagctccagtcctctcagcctccatactcccagcagccatcccagcctccacatcagcagtccccggctccatacccctcccagcagtcgacgacacagcagcacccccagagccagcccccctactcacagccacaggctcagtctccttaccagcagcagcaacctcagcagccagcaccctcgacgctctcccagcaggctgcgtatcctcagccccagtctcagcagtcccagcaaactgcctattcccagcagcgcttccctccaccgcaggagctatctcaagattcatttgggtctcaggcatcctcagccccctcaatgacctccagtaagggagggcaagaagatatgaacctgagccttcagtcaagaccctccagcttgcctgatctatctggttcaatagatgacctccccatggggacagaaggagctctgagtcctggagtgagcacatcagggatttccagcagccaaggagagcagagtaatccagctcagtctcctttctctcctcatacctcccctcacctgcctggcatccgaggcccttccccgtcccctgttggctctcccgccagtgttgctcagtctcgctcaggaccactctcgcctgctgcagtgccaggcaaccagatgccacctcggccacccagtggccagtcggacagcatcatgcatccttccatgaaccaatcaagcattgcccaagatcgaggttatatgcagaggaacccccagatgccccagtacagttccccccagcccggctcagccttatctccgcgtcagccttccggaggacagatacacacaggcatgggctcctaccagcagaactccatggggagctatggtccccaggggggtcagtatggcccacaaggtggctaccccaggcagccaaactataatgccttgcccaatgccaactaccccagtgcaggcatggctggaggcataaaccccatgggtgccggaggtcaaatgcatggacagcctggcatcccaccttatggcacactccctccagggaggatgagtcacgcctccatgggcaaccggccttatggccctaacatggccaatatgccacctcaggttgggtcagggatgtgtcccccaccagggggcatgaaccggaaaacccaagaaactgctgtcgccatgcatgttgctgccaactctatccaaaacaggccgccaggctaccccaatatgaatcaagggggcatgatgggaactggacctccttatggacaagggattaatagtatggctggcatgatcaaccctcagggacccccatattccatgggtggaaccatggccaacaattctgcagggatggcagccagcccagagatgatgggccttggggatgtaaagttaactccagccaccaaaatgaacaacaaggcagatgggacacccaagacagaatccaaatccaagaaatccagttcttctactacaaccaatgagaagatcaccaagttgtatgagctgggtggtgagcctgagaggaagatgtgggtggaccgttatctggccttcactgaggagaaggccatgggcatgacaaatctgcctgctgtgggtaggaaacctctggacctctatcgcctctatgtgtctgtgaaggagattggtggattgactcaggtcaacaagaacaaaaaatggcgggaacttgcaaccaacctcaatgtgggcacatcaagcagtgctgccagctccttgaaaaagcagtatatccagtgtctctatgcctttgaatgcaagattgaacggggagaagaccctcccccagacatctttgcagctgctgattccaagaagtcccagcccaagatccagcctccctctcctgcgggatcaggatctatgcaggggccccagactccccagtcaaccagcagttccatggcagaaggaggagacttaaagccaccaactccagcatccacaccacacagtcagatccccccattgccaggcatgagcaggagcaattcagttgggatccaggatgcctttaatgatggaagtgactccacattccagaagcggaattccatgactccaaaccctgggtatcagcccagtatgaatacctctgacatgatggggcgcatgtcctatgagccaaataaggatccttatggcagcatgaggaaagctccagggagtgatcccttcatgtcctcagggcagggccccaacggcgggatgggtgacccctacagtcgtgctgccggccctgggctaggaaatgtggcgatgggaccacgacagcactatccctatggaggtccttatgacagagtgaggacggagcctggaatagggcctgagggaaacatgagcactggggccccacagccgaatctcatgccttccaacccagactcggggatgtattctcctagccgctaccccccgcagcagcagcagcagcagcagcaacgacatgattcctatggcaatcagttctccacccaaggcaccccttctggcagccccttccccagccagcagactacaatgtatcaacagcaacagcagaattacaagcggccaatggatggcacatatggccctcctgccaagcggcacgaaggggagatgtacagcgtgccatacagcactgggcaggggcagcctcagcagcagcagttgcccccagcccagccccagcctgccagccagcaacaagctgcccagccttcccctcagcaagatgtatacaaccagtatggcaatgcctatcctgccactgccacagctgctactgagcgccgaccagcaggcggcccccagaaccaatttccattccagtttggccgagaccgtgtctctgcaccccctggcaccaatgcccagcaaaacatgccaccacaaatgatgggcggccccatacaggcatcagctgaggttgctcagcaaggcaccatgtggcaggggcgtaatgacatgacctataattatgccaacaggcagagcacgggctctgccccccagggccccgcctatcatggcgtgaaccgaacagatgaaatgctgcacacagatcagagggccaaccacgaaggctcgtggccttcccatggcacacgccagcccccatatggtccctctgcccctgtgccccccatgacaaggccccctccatctaactaccagcccccaccaagcatgcagaatcacattcctcaggtatccagccctgctcccctgccccggccaatggagaaccgcacctctcctagcaagtctccattcctgcactctgggatgaaaatgcagaaggcaggtcccccagtacctgcctcgcacatagcacctgcccctgtgcagccccccatgattcggcgggatatcaccttcccacctggctctgttgaagccacacagcctgtgttgaagcagaggaggcggctcacaatgaaagacattggaaccccggaggcatggcgggtaatgatgtccctcaagtctggtctcctggcagagagcacatgggcattagataccatcaacatcctgctgtatgatgacaacagcatcatgaccttcaacctcagtcagctcccagggttgctagagctccttgtagaatatttccgacgatgcctgattgagatctttggcattttaaaggagtatgaggtgggtgacccaggacagagaacgctactggatcctgggaggttcagcaaggtgtctagtccagctcccatggagggtggggaagaagaagaagaacttctaggtcctaaactagaagaggaagaagaagaggaagtagttgaaaatgatgaggagatagccttttcaggcaaggacaagccagcttcagagaatagtgaggagaagctgatcagtaagtttgacaagcttccagtaaagatcgtacagaagaatgatccatttgtggtggactgctcagataagcttgggcgtgtgcaggagtttgacagtggcctgctgcactggcggattggtgggggggacaccactgagcatatccagacccacttcgagagcaagacagagctgctgccttcccggcctcacgcaccctgcccaccagcccctcggaagcatgtgacaacagcagagggtacaccagggacaacagaccaggaggggcccccacctgatggacctccagaaaaacggatcacagccactatggatgacatgttgtctactcggtctagcaccttgaccgaggatggagctaagagttcagaggccatcaaggagagcagcaagtttccatttggcattagcccagcacagagccaccggaacatcaagatcctagaggacgaaccccacagtaaggatgagaccccactgtgtacccttctggactggcaggattctcttgccaagcgctgcgtctgtgtgtccaataccattcgaagcctgtcatttgtgccaggcaatgactttgagatgtccaaacacccagggctgctgctcatcctgggcaagctgatcctgctgcaccacaagcacccagaacggaagcaggcaccactaacttatgaaaaggaggaggaacaggaccaaggggtgagctgcaacaaagtggagtggtggtgggactgcttggagatgctccgggaaaacaccttggttacactcgccaacatctcggggcagttggacctatctccataccccgagagcatttgcctgcctgtcctggacggactcctacactgggcagtttgcccttcagctgaagcccaggaccccttttccaccctgggccccaatgccgtcctttccccgcagagactggtcttggaaaccctcagcaaactcagcatccaggacaacaatgtggacctgattctggccacaccccccttcagccgcctggagaagttgtatagcactatggtgcgcttcctcagtgaccgaaagaacccggtgtgccgggagatggctgtggtactgctggccaacctggctcagggggacagcctggcagctcgtgccattgcagtgcagaagggcagtatcggcaacctcctgggcttcctagaggacagccttgccgccacacagttccagcagagccaggccagcctcctccacatgcagaacccaccctttgagccaactagtgtggacatgatgcggcgggctgcccgcgcgctgcttgccttggccaaggtggacgagaaccactcagagtttactctgtacgaatcacggctgttggacatctcggtatcaccgttgatgaactcattggtttcacaagtcatttgtgatgtactgtttttgattggccagtcatgacagccgtgggacacctcccccccccgtgtgtgtgtgcgtgtgtggagaacttagaaactgactgttgccctttatttatgcaaaaccacctcagaatccagtttaccctgtgctgtccagcttctcccttgggaaaaagtctctcctgtttctctctcctccttccacctcccctccctccatcacctcacgcctttctgttccttgtcctcaccttactcccctcaggaccctaccccaccctctttgaaaagacaaagctctgcctacatagaagactttttttattttaaccaaagttactgttgtttacagtgagtttggggaaaaaaaataaaataaaaatggctttcccagtccttgcatcaacgggatgccacatttcataactgtttttaatggtaaaaaaaaaaaaaaaaaatacaaaaaaaaattctgaaggacaaaaaaggttggagaggcctgtgcagtagagtgtagaccctttcatgtactgtactgtacacctgatactgtaaacatactgtaataataatgtctcacatggaaacagaaaacgctgggtcagcagcaagctgtagtttttaaaaatgtttttagttaaacgttgaggagaaaaaaaaaaaaggcttttcccccaaagtatcatgtgtgaacctacaacaccctgacctctttctctcctccttgattgtatgaataaccctgagatcacctcttagaactggttttaacctttagctgcagcggctacgctgccacgtgtgtatatatatgacgttttaacaagttggtgacctgcacaaagcgagacacagctatttaatctcttgccagatatcgcccctcttggtgcgatgctgtacaggtctctgtaaaaagtccttgctgtctcagcagccaatcaacttatagtttatttttttctgggtttttgttttgttttgttttctttctaatcgaggtgtgaaaaagttctaggttcagttgaagttctgatgaagaaacacaattgagattttttcagtgataaaatctgcatatttgtatttcaacaatgtagctaaaacttgatgtaaattcctcctttttttccttttttggcttaatgaatatcatttattcagtatgaaatctttatactatatgttccacgtgttaagaataaatgtacattaaatcttggtaagacttttgtgaagctttttattgttttcaaactaaaacttgaccttttgtcggggggcagggggatagtcctgtttttgcaaacctcccttagtgtgagatctcccctaaatagtggcattcctggaccctgtcatttatttactatattccaaaataagacaaccatttatctggaggcaatctccaacttaatcacttataatatctctggactggctcttttccctgactccagactagagcattcagccacctttcttgtcatccctgcttggaagtttactttgaacatgccaaagctaaaatgtcctgtcttcccccactagaaacctgcttctcccatagttttggtttttttgtttgtgttttccttttagtaaatggcaactccattctatcacttggctaaaaaaatccttgacttctttc

SEQ ID NO: 1523 - protein, 2273 aa, Homo sapiens
MAAQVAPAAASSLGNPPPPPPSELKKAEQQQREEAGGEAAAAAAAERGEMKAAAGQESEGPAVGPPQPLGKELQDGAESNGGGGGGGAGSGGGPGAEPDLKNSNGNAGPRPALNNNLTEPPGGGGGGSSDGVGAPPHSAAAALPPPAYGFGQPYGRSPSAVAAAAAAVFHQQHGGQQSPGLAALQSGGGGGLEPYAGPQQNSHDHGFPNHQYNSYYPNRSAYPPPAPAYALSSPRGGTPGSGAAAAAGSKPPPSSSASASSSSSSFAQQRFGAMGGGGPSAAGGGTPQPTATPTLNQLLTSPSSRYQGYPGGDYSGGPQDGGAGKGPADMASQCWGAAAAAAAAAAASGGAQQRSHHAPMSPGSSGGGGQPLARTPQPSSPMDQMGKMRPQPYGGTNPYSQQQGPPSGPQQGHGYPGQPYGSQTPQRYPMTMQGRAQSAMGGLSYTQQIPPYGQQGPSGYGQQGQTPYYNQQSPHPQQQQPPYSQQPPSQTPHAQPSYQQQPQSQPPQLQSSQPPYSQQPSQPPHQQSPAPYPSQQSTTQQHPQSQPPYSQPQAQSPYQQQQPQQPAPSTLSQQAAYPQPQSQQSQQTAYSQQRFPPPQELSQDSFGSQASSAPSMTSSKGGQEDMNLSLQSRPSSLPDLSGSIDDLPMGTEGALSPGVSTSGISSSQGEQSNPAQSPFSPHTSPHLPGIRGPSPSPVGSPASVAQSRSGPLSPAAVPGNQMPPRPPSGQSDSIMHPSMNQSSIAQDRGYMQRNPQMPQYSSPQPGSALSPRQPSGGQIHTGMGSYQQNSMGSYGPQGGQYGPQGGYPRQPNYNALPNANYPSAGMAGGINPMGAGGQMHGQPGIPPYGTLPPGRMSHASMGNRPYGPNMANMPPQVGSGMCPPPGGMNRKTQETAVAMHVAANSIQNRPPGYPNMNQGGMMGTGPPYGQGINSMAGMINPQGPPYSMGGTMANNSAGMADEMMGLGDVKLTPATKMNNKADGTPKTESKSKKSSSSTTTNEKITKLYELGGEPERKMWVDRYLAFTEEKAMGMTNLPAVGRKPLDLYRLYVSVKEIGGLTQVNKNKKWRELATNLNVGTSSSAASSLKKQYIQCLYAFECKIERGEDPPPDIFAAADSKKSQPKIQPPSPAGSGSMQGPQTPQSTSSSMAEGGDLKPPTPASTPHSQIPPLPGMSRSNSVGIQDAFNDGSDSTFQKRNSMTPNPGYQPSMNTSDMMGRMSYEPNKDPYGSMRKAPGSDPFMSSGQGPNGGMGDPYSRAAGPGLGNVAMGPRQHYPYGGPYDRVRTEPGIGPEGNMSTGAPQPNLMPSNPDSGMYSPSRYPPQQQQQQQQRHDSYGNQFSTQGTPSGSPFPSQQTTMYQQQQQNYKRPMDGTYGPPAKRHEGEMYSVPYSTGQGQPQQQQLPPAQPQPASQQQAAQPSPQQDVYNQYGNAYPATATAATERRPAGGPQNQFPFQFGRDRVSAPPGTNAQQNMPPQMMGGPIQASAEVAQQGTMWQGRNDMTYNYANRQSTGSAPQGPAYHGVNRTDEMLHTDQRANHEGSWPSHGTRQPPYGPSAPVPPMWPPSNYQPPPSMQNHIPQVSSPAPLPRPMENRTSPSKSPFLHSGMKMQKAGPPVPASHIAPAPVQPPMIRRDITFPPGSVEATQPVLKQRRRLTMKDIGTPEAWRVMMSLKSGLLAESTWALDTINILLYDDNSIMTFNLSQLPGLLELLVEYFRRCLIEIFGILKEYEVGDPGQRTLLDPGRFSKVSSPAPMEGGEEEEELLGPKLEEEEEEEVVENDEEIAFSGKDKPASENSEEKLISKFDKLPVKIVQKNDPFVVDCSDKLGRVQEFDSGLLHWRIGGGDTTEHIQTHFESKTELLPSRPHAPCPPAPRKHVTTAEGTPGTTDQEGPPPDGPPEKRITATMDDMLSTRSSTLTEDGAKSSEAIKESSKFPFGISPAQSHRNIKIDEPHSKDETPLCTLLDWQDSLAKRCVCVSNTIRSLSFVPGNDFEMSKHPGLLLILGKLILLHHKHPERKQAPLTYEKEEEQDQGVSCNKVEWWWDCLEMLRENTLVTLANISGQLDLSPYPESICLPVLDGLLHWAVCPSAEAQDPFSTLGPNAVLSPQRLVLETLSKLSIQDNNVDLILATPPFSRLEKKTMVRFLSDRKNPVCREMAVVLLANLAQGDSLAARAIAVQKGSIGNLLGFLEDSLAATQFQQSQASLLHMQNPPFEPTSVDMMRRAARALLAKVDENHSEFTLYESRLLDISVSPLMNSLVSQVICDVLFLIGQS

SEQ ID NO: 1524 - DNA, 8843 bp, Homo sapiens
cctcctcctccgccgccgccagcccggagcctgagccggcggggcgggggggagaggagcgagcgcagcgcagcagcggagccccgcgaggcccgcccgggcgggtggggagggcagcccgggggactgggccccggggcggggtgggagggggggagaagacgaagacagggccgggtctctccgcggacgagacagcggggatcatggccgcgcaggtcgcccccgccgccgccagcagcctgggcaacccgccgccgccgccgccctcggagctgaagaaagccgagcagcagcagcgggaggaggcggggggcgaggcggcggcggcggcagcggccgagcgcggggaaatgaaggcagccgccgggcaggaaagcgagggccccgccgtggggccgccgcagccgctgggaaaggagctgcaggacggggccgagagcaatgggggtggcggcggcggcggagccggcagcggcggcgggcccggcgcggagccggacctgaagaactcgaacgggaacgcgggccctaggcccgccctgaacaataacctcacggagccgcccggcggcggcggtggcggcagcagcgatggggtgggggcgcctcctcactcagccgcggccgccttgccgcccccagcctacggcttcgggcaaccctacggccggagcccgtctgccgtcgccgccgccgcggccgccgtcttccaccaacaacatggcggacaacaaagccctggcctggcagcgctgcagagcggcggcggcgggggcctggagccctacgcggggccccagcagaactctcacgaccacggcttccccaaccaccagtacaactcctactaccccaaccgcagcgcctaccccccgcccgccccggcctacgcgctgagctccccgagaggtggcactccgggctccggcgcggcggcggctgccggctccaagccgcctccctcctccagcgcctccgcctcctcgtcgtcttcgtccttcgctcagcagcgcttcggggccatggggggaggcggcccctccgcggccggcgggggaactccccagcccaccgccacccccaccctcaaccaactgctcacgtcgcccagctcggcccggggctaccagggctaccccgggggcgactacagtggcgggccccaggacgggggcgccggcaagggcccggcggacatggcctcgcagtgttggggggctgcggcggcggcagctgcggcggcggccgcctcgggaggggcccaacaaaggagccaccacgcgcccatgagccccgggagcagcggcggcggggggcagccgctcgcccggacccctcagccatccagtccaatggatcagatgggcaagatgagacctcagccatatggcgggactaacccatactcgcagcaacagggacctccgtcaggaccgcagcaaggacatgggtacccagggcagccatacgggtcccagaccccgcagcggtacccgatgaccatgcagggccgggcgcagagtgccatgggcggcctctcttatacacagcagattcctccttatggacaacaaggccccagcgggtatggtcaacagggccagactccatattacaaccagcaaagtcctcaccctcagcagcagcagccaccctactcccagcaaccaccgtcccagacccctcatgcccaaccttcgtatcagcagcagccacagtctcaaccaccacagctccagtcctctcagcctccatactcccagcagccatcccagcctccacatcagcagtccccggctccatacccctcccagcagtcgacgacacagcagcacccccagagccagcccccctactcacagccacaggctcagtctccttaccagcagcagcaacctcagcagccagcaccctcgacgctctcccagcaggctgcgtatcctcagccccagtctcagcagtcccagcaaactgcctattcccagcagcgcttccctccaccgcaggagctatctcaagattcatttgggtctcaggcatcctcagccccctcaatgacctccagtaagggagggcaagaagatatgaacctgagccttcagtcaagaccctccagcttgcctgatctatctggttcaatagatgacctccccatggggacagaaggagctctgagtcctggagtgagcacatcagggatttccagcagccaaggagagcagagtaatccagctcagtctcctttctctcctcatacctcccctcacctgcctggcatccgaggcccttccccgtcccctgttggctctcccgccagtgttgctcagtctcgctcaggaccactctcgcctgctgcagtgccaggcaaccagatgccacctcggccacccagtggccagtcggacagcatcatgcatccttccatgaaccaatcaagcattgcccaagatcgaggttatatgcagaggaacccccagatgccccagtacagttccccccagcccggctcagccttatctccgcgtcagccttccggaggacagatacacacaggcatgggctcctaccagcagaactccatggggagctatggtccccaggggggtcagtatggcccacaaggtggctaccccaggcagccaaactataatgccttgcccaatgccaactaccccagtgcaggcatggctggaggcataaaccccatgggtgccggaggtcaaatgcatggacagcctggcatcccaccttatggcacactccctccagggaggatgagtcacgcctccatgggcaaccggccttatggccctaacatggccaatatgccacctcaggttgggtcagggatgtgtcccccaccagggggcatgaaccggaaaacccaagaaactgctgtcgccatgcatgttgctgccaactctatccaaaacaggccgccaggctaccccaatatgaatcaagggggcatgatgggaactggacctccttatggacaagggattaatagtatggctggcatgatcaaccctcagggacccccatattccatgggtggaaccatggccaacaattctgcagggatggcagccagcccagagatgatgggccttggggatgtaaagttaactccagccaccaaaatgaacaacaaggcagatgggacacccaagacagaatccaaatccaagaaatccagttcttctactacaaccaatgagaagatcaccaagttgtatgagctgggtggtgagcctgagaggaagatgtgggtggaccgttatctggccttcactgaggagaaggccatgggcatgacaaatctgcctgctgtgggtaggaaacctctggacctctatcgcctctatgtgtctgtgaaggagattggtggattgactcaggtcaacaagaacaaaaaatggcgggaacttgcaaccaacctcaatgtgggcacatcaagcagtgctgccagctccttgaaaaagcagtatatccagtgtctctatgcctttgaatgcaagattgaacggggagaagaccctcccccagacatctttgcagctgctgattccaagaagtcccagcccaagatccagcctccctctcctgcgggatcaggatctatgcaggggccccagactccccagtcaaccagcagttccatggcagaaggaggagacttaaagccaccaactccagcatccacaccacacagtcagatccccccattgccaggcatgagcaggagcaattcagttgggatccaggatgcctttaatgatggaagtgactccacattccagaagcggaattccatgactccaaaccctgggtatcagcccagtatgaatacctctgacatgatggggcgcatgtcctatgagccaaataaggatccttatggcagcatgaggaaagctccagggagtgatcccttcatgtcctcagggcagggccccaacggcgggatgggtgacccctacagtcgtgctgccggccctgggctaggaaatgtggcgatgggaccacgacagcactatccctatggaggtccttatgacagagtgaggacggagcctggaatagggcctgagggaaacatgagcactggggccccacagccgaatctcatgccttccaacccagactcggggatgtattctcctagccgctaccccccgcagcagcagcagcagcagcagcaacgacatgattcctatggcaatcagttctccacccaaggcaccccttctggcagccccttccccagccagcagactacaatgtatcaacagcaacagcagaattacaagcggccaatggatggcacatatggccctcctgccaagcggcacgaaggggagatgtacagcgtgccatacagcactgggcaggggcagcctcagcagcagcagttgcccccagcccagccccagcctgccagccagcaacaagctgcccagccttcccctcagcaagatgtatacaaccagtatggcaatgcctatcctgccactgccacagctgctactgagcgccgaccagcaggcggcccccagaaccaatttccattccagtttggccgagaccgtgtctctgcaccccctggcaccaatgcccagcaaaacatgccaccacaaatgatgggcggccccatacaggcatcagctgaggttgctcagcaaggcaccatgtggcaggggcgtaatgacatgacctataattatgccaacaggcagagcacgggctctgccccccagggccccgcctatcatggcgtgaaccgaacagatgaaatgctgcacacagatcagagggccaaccacgaaggctcgtggccttcccatggcacacgccagcccccatatggtccctctgcccctgtgccccccatgacaaggccccctccatctaactaccagcccccaccaagcatgcagaatcacattcctcaggtatccagccctgctcccctgccccggccaatggagaaccgcacctctcctagcaagtctccattcctgcactctgggatgaaaatgcagaaggcaggtcccccagtacctgcctcgcacatagcacctgcccctgtgcagccccccatgattcggcgggatatcaccttcccacctggctctgttgaagccacacagcctgtgttgaagcagaggaggcggctcacaatgaaagacattggaaccccggaggcatggcgggtaatgatgtccctcaagtctggtctcctggcagagagcacatgggcattagataccatcaacatcctgctgtatgatgacaacagcatcatgaccttcaacctcagtcagctcccagggttgctagagctccttgtagaatatttccgacgatgcctgattgagatctttggcattttaaaggagtatgaggtgggtgacccaggacagagaacgctactggatcctgggaggttcagcaaggtgtctagtccagctcccatggagggtggggaagaagaagaagaacttctaggtcctaaactagaagaggaagaagaagaggaagtagttgaaaatgatgaggagatagccttttcaggcaaggacaagccagcttcagagaatagtgaggagaagctgatcagtaagtttgacaagcttccagtaaagatcgtacagaagaatgatccatttgtggtggactgctcagataagcttgggcgtgtgcaggagtttgacagtggcctgctgcactggcggattggtgggggggacaccactgagcatatccagacccacttcgagagcaagacagagctgctgccttcccggcctcacgcaccctgcccaccagcccctcggaagcatgtgacaacagcagagggtacaccagggacaacagaccaggaggggcccccacctgatggacctccagaaaaacggatcacagccactatggatgacatgttgtctactcggtctagcaccttgaccgaggatggagctaagagttcagaggccatcaaggagagcagcaagtttccatttggcattagcccagcacagagccaccggaacatcaagatcctagaggacgaaccccacagtaaggatgagaccccactgtgtacccttctggactggcaggattctcttgccaagcgctgcgtctgtgtgtccaataccattcgaagcctgtcatttgtgccaggcaatgactttgagatgtccaaacacccagggctgctgctcatcctgggcaagctgatcctgctgcaccacaagcacccagaacggaagcaggcaccactaacttatgaaaaggaggaggaacaggaccaaggggtgagctgcaacaaagtggagtggtggtgggactgcttggagatgctccgggaaaacaccttggttacactcgccaacatctcggggcagttggacctatctccataccccgagagcatttgcctgcctgtcctggacggactcctacactgggcagtttgcccttcagctgaagcccaggaccccttttccaccctgggccccaatgccgtcctttccccgcagagactggtcttggaaaccctcagcaaactcagcatccaggacaacaatgtggacctgattctggccacaccccccttcagccgcctggagaagttgtatagcactatggtgcgcttcctcagtgaccgaaagaacccggtgtgccgggagatggctgtggtactgctggccaacctggctcagggggacagcctggcagctcgtgccattgcagtgcagaagggcagtatcggcaacctcctgggcttcctagaggacagccttgccgccacacagttccagcagagccaggccagcctcctccacatgcagaacccaccctttgagccaactagtgtggacatgatgcggcgggctgcccgcgcgctgcttgccttggccaaggtggacgagaaccactcagagtttactctgtacgaatcacggctgttggacatctcggtatcaccgttgatgaactcattggtttcacaagtcatttgtgatgtactgtttttgattggccagtcatgacagccgtgggacacctcccccccccgtgtgtgtgtgcgtgtgtggagaacttagaaactgactgttgccctttatttatgcaaaaccacctcagaatccagtttaccctgtgctgtccagcttctcccttgggaaaaagtctctcctgtttctctctcctccttccacctcccctccctccatcacctcacgcctttctgttccttgtcctcaccttactcccctcaggaccctaccccaccctctttgaaaagacaaagctctgcctacatagaagactttttttattttaaccaaagttactgttgtttacagtgagtttggggaaaaaaaataaaataaaaatggctttcccagtccttgcatcaacgggatgccacatttcataactgtttttaatggtaaaaaaaaaaaaaaaaaatacaaaaaaaaattctgaaggacaaaaaaggtgactgctgaactgtgtgtggtttattgttgtacattcacaatcttgcaggagccaagaagttcgcagttgtgaacagaccctgttcactggagaggcctgtgcagtagagtgtagaccctttcatgtactgtactgtacacctgatactgtaaacatactgtaataataatgtctcacatggaaacagaaaacgctgggtcagcagcaagctgtagtttttaaaaatgtttttagttaaacgttgaggagaaaaaaaaaaaaggcttttcccccaaagtatcatgtgtgaacctacaacaccctgacctctttctctcctccttgattgtatgaataaccctgagatcacctcttagaactggttttaacctttagctgcagcggctacgctgccacgtgtgtatatatatgacgttgtacattgcacatacccttggatccccacagtttggtcctcctcccagctacccctttatagtatgacgagttaacaagttggtgacctgcacaaagcgagacacagctatttaatctcttgccagatatcgcccctcttggtgcgatgctgtacaggtctctgtaaaaagtccttgctgtctcagcagccaatcaacttatagtttatttttttctgggtttttgttttgttttgttttctttctaatcgaggtgtgaaaaagttctaggttcagttgaagttctgatgaagaaacacaattgagattttttcagtgataaaatctgcatatttgtatttcaacaatgtagctaaaacttgatgtaaattcctcctttttttccttttttggcttaatgaatatcatttattcagtatgaaatctttatactatatgttccacgtgttaagaataaatgtacattaaatcttggtaagacttttgtgaagctttttattgttttcaaactaaaacttgaccttttgtcggggggcagggggatagtcctgtttttgcaaacctcccttagtgtgagatctcccctaaatagtggcattcctggaccctgtcatttatttactatattccaaaataagacaaccatttatctggaggcaatctccaacttaatcacttataatatctctggactggctcttttccctgactccagactagagcattcagccacctttcttgtcatccctgcttggaagtttactttgaacatgccaaagctaaaatgtcctgtcttcccccactagaaacctgcttctcccatagttttggtttttttgtttgtgttttccttttagtaaatggcaactccattctatcacttggctaaaaaaatccttgacttctttc

SEQ ID NO: 1525 - protein, 2273 aa, Homo sapiens; identical to SEQ ID NO: 1523

SEQ ID NO: 1526 - DNA, 21565 bp, Mus musculus
  misc_feature (1)...(21565): n = A, C, G or T/U
tgtggttcatatgtggacaggggatgtttcctgtgcacttgtagaggtcagaggacaatctttaggaatcttttctcttcctccatcacatgagtcctggaagccaccttgccagccgccagcagcccgccgtatttcttacattttaatgtctgttgccttgagtgcttgtatctggcactaggctcaccacactcccgtggggtggatgttgtgactatcttttctttacagagaaggaaatccaagggagagggtgacctggccgaggtcacagattccagtttcaagcctaagctgcctgactccaaagcctatcttgtcccgtggagccttgctgcccaggttactagcccgggtgtctagctggagtggacttgccctttagattagaccagctaagagtgataatgggtcgtgttaatcggagcccaaacggaatgcctgtctttcatacagacaaaatgagaaaacagattaatataacaacacatttgctatctattgactcttgggatatgtgtgtaaaataaaaagctgagtgcccccgatctaagcaagcatcccatatcccatattgcaagtgtggagactgatgcccagggaggggggcggctttaccaagggctctgctacgctggcagtcctgggagttctgtttgcagaattccgggctgagattccttggggacatcagttctttactggaaatgtttctgccctcaaccacctagaagtccttgtcttgagccagtccccctttcttctgcttaaggactagtgaagggcacaacccacttcccaccagggtcctaaagtcaccatccggtgctggcccaggaattcctttcagagacttaaacacagccagagataaagccttggaggtcttcaagggccctctgctctgtttctctctcgacgtagcaggcttggtctccctaagtgtctttcccgaggttgtcctagcctttccagctctgccccgatctgctctcactcatggtgaggaggtgttgaaacaaccacccacctccctctgtgccctcttcccagccctggccaatgaagcaggagaaaccgcaacagagacacgctgaatccatcaaacccccgaacccaggaaaccacaggcagaggctgagaaggcgccactgaaatagaggcgcggaaacaaaggctcagaaagaatgtccgggacaaagagggagggaaaacaaaaatggatgtgcagactcgggaaaaggcctggggagagcgacgaattggggccaggaatgagggaatctagagatgagagaaccagaagagaaagtagaagggaagatggaaaagtcagagtttgagaaaaggggcggacgatggagagagcgctggcaggagacccaggcgcgcggggccgggcgcgggtcccaggtccccgggggcggaccctgctggcggcgcctggccccgctgtggccgtcggagcagccacattcctccgggtttcccacacattcgccatcaaagcgtccccaaagccccagcttttcccgcgcccctcccccgccactggctggagaagctatttttcaccccctcctggtctttaatctgttgtgggaaaagaaagcggcttttgttgaacgaggggctgcgcggggggcggggaggaggcgcgggcgattgtgtgtcccgcagctgcgcgccaacgctggggtgggggctgccggggtgcaggccgagctagggtgcccgggaaggtgggccagggcggtagggacagcccggtcgcgtggtacaggccaagttgggactgcccatgaaggtgtgctagggctataggttgtaggaacagcctgggtgcggtttgcgctcagggagggtggcagtggggagggaatggaggaaaaggctaccagagtgccgttggccaagagactgcaagaagacgactcacattgggctgggcacatagaagtctgcccccaggctggggctgcagctctgcagagggctgggcgccattaatttgttaggtttttatggtgctggggatagcgctacgggtcgcttgtgtgctggacaagcattcctctctcaaccagcatcttgcatctaatccggcttgcgtgcaatcttcccctgaagcccagacacacaactaacactcaggaggtctcacaccagagaatgcttgaccccaaacgttctgtgaggcttcaaagggggcttcctttagaattccatgcccacagcatatcttcgcaaccctcaccgtttggactcctgacagacagctgtgcggttccctcacctctcggagcctcagtcaatgtgaggattgatccatgctgatctgtgtaaactgtctgctcagttaggtttggagggacacggcctataatcagagcacttacaaggctggagcagaaagatggaaaacttaaggacagcctggactacatagcaagactctgtctcataaaacatggagaaacaaatgagctgtcagctcatggctggcactcagcagaagccttcaacacagaagtcagcttggtggcgcactattatcctggagcactgtggcctgcaggaggctccctgtgagctgtggctcagcctctgccttttggcaccccagtctttccagccctctgcagagctggattaggggctagggggaggagggggagggttaggggttggggggtctctttcctctctggcagggttaaccctgtcaccaggcccattcctccctcccctcccatctccttcccctggcagcttttgaactggtgctgggcctcaggccaaagcaggacaatgtctgggcagggtggacactgctctnnnnnnnnnnnnnnnnnnnnnnnnnnnnnnnnnnnnnnnnnnnnnnnnnnnnnnnnnnnnnnnnnnnnnnnnnnnnnnnnnnnnnnnnnnnnnnnnnnnnnnnnnnnnnnnnnnnnnnnnnnnnnnnnnnnnnnnnnnnnnnnnnntgcccaacccccacctcccaggccccgcatttttaatttaaccccgcaggccaggacctggtggtgtatacatacaatctcagcactcagggagcagaggcaggaggatctccacaagttataggctaggctggtctacatatgagttccaagccagccggggtttggggagggagcggcgcacagaaaggcctgactcaaaagaacaccagaatgaaaacaagtcctgtctctaagtggtggtgtatcccaaagctgctggtgattgctgggactgaattgaactcagttgtcattcatgtgtgtgtgtgtgtgtgtgtgtgtgttttcacatgtgtgtgcgtgtgttcccatgtgtgtgtatgtgtattcccatgtgtgtgaattcccatgtcagtgtgtgttcacatgtgtatgtgtattcccatgtgtgtgaattcccatgtgtgtattcacatgtgtgttcacatgtgtatgtgtattcccatgtgtgtgttcccatgtgtgtgtgttcccatgtgtgtgtgttccatgggtgtgtatgtgcattcccatgtgtgtgaatttccatgtgtgtgttcccatatgtgtgtgtcccatgtgtgtgaattcccatgtgtgtgttcccatgtgtgtgtgttccatgtgtgtgtatgtgtgttctcatgtgtgtgtgtgtgtgtgtatgtgtgtgtgttcgatttggtagcacagatactaaagttggaacaatacagagaagacaggtttggcctctgagcaagaccctcgagttagtgaagcatgctgtattaagatttcttttctgttggcatgtgcatatgtgatgtatataaggatatacatgtcacggcacgagtgtggcattcagagggcgactttgtagaattaattttcttattgcagcttgacgtgtgttacagattgaacttgcctcacccggtttgctcagcaagcgcctttatccctggaagggtttcactacactcccttgtcaaacatcctcctgcctctgcctcctgagtgctgagactgttaagtatcggccacctggccctggcctgaaagatttcaagctgccagtacttataagggacaccgatgaatgcaaggccacactgggctacagagttagagtccaactcaaaaacacctacagcttcccctcaacaaaacaaatatctcacatggggttgatgctcagaaaatacctccttctggcttacccgatggcagaagcagagacagccctggggcatcccatgactcattgtttggtgaagtaagagtaaggggttaactttagggtggtattgcctgactcagtgtggccaaaagatgaagaaggcagtcagctccaaaactgacccctaaatttaacagcagtcactgtgtaacttctgaagaagtgtctccctggaaggatggatggaatggtaatagtggtggagatttggggtgtgtatgtgtgcaaggctcttgagttctgtcccaagcacctaaataaacacaccttatctgtcaccctacctaatgggtccaatttgcttttctctatctgggggaacacgaccttctcaggggctggtgaaatggctcatcaagcaaaattgcttgtcaccaagcctgaggacccgggcttggttccactggagtcacacagtgaaggaagagaccaccacacattcaccatacatgcacgaatacacatacatgaatacatgcaataacaataattcccaagtgtacctttggaaaggtggaagaaaatgaatacacacagaaggatgaatgctttgcagacaggatggacaccttgggtttatcacctagtagctatgaggcctgcacacaagcacactcgccttttagagcctctctctattcgtccagaaaatgagtcaataaagccagacatggtggagcacatttgtaatctcagcagtgagcggctgaggtgagagaattttaaagtttgaggaccacttaggctacactgtgagactctgtctcagaacagtcgcagagagaatgcagggctggggctaaggttgagcgttgtgaggggcttgcctctcactcacaaggccaggagttccatccccagcgctgtaaaaacaaaaccaaccaaccaacccaccaaacaaacaaacaaaaaaccaacaaagattaggtaaacagtccttggcaagcaggactcagcagtgaggtagtgacagctctgagtgtgtctgaagtgtttaagaggccacttaacaccccccccccctccaatctccacctctattaagaacttaggtccctccattccctcattgttccttatactgtctttcttagtaatgcctacatttctggcaactacttccagaggaagactaacttccagggcaccctaaatcccaccgaacacatcatattacagaaaggtttccacttcccatcttctgtcccctctggtcctctcagctgtcaggtggtaaatacaattttcttcccaattctacggagctaataagtaaggagtaactgaggtgagacaaggttatcagtgagggtggatagtcgggccaacgccaggatctcgtgtgccttccttgaatcctttggttcttgggttgtactttgggattcaaatttgctgaggggagcagggacaggtttccaggtacagttggagagcttccagaacatctcaaaggccgctctctgaaaaaaatgggtagatgtcagaaaacgcatgggctggcaagatggctcagtataaaggtgctcgccctggagccctgaaggtctgcatttgatccctggacccagagtcgaaggaaacatctcgatttccaaaagttgtactatgatgttctcgaatattctgtggcatgtacacattgtggcatatgtgtgaccacacttatatacacataggtcactcacactttttttttttttaaatacagcttctgtgaaccttgaacccacatagagcattaacatttatgagaactagggccagagcggtcagggagtcaggggagcagaagggctggatctcggccacagggcagccatagacattcgacatgaccttggacaatgacggcaggtcacctggatccctgcgtctacacatggaggaaagataaccagctaggttgacagaagcccagtttaagcaagacatctgcaatcctcatcatcatgacattgactttgaaattcacagcggagagaccccactaccaccacgtcttaaatttctaaagccgaaacagtaatagcttacagttctgccagctcaaaaaaaaaaaaaatcagaaagcacaacattggctttttttctcccccttttataattttggcagaggaagatgcagttcctggaaatgcttacaaaatgattcctgacactaggaggagatagttaaaagaggggaaaaggaaaaagaaaagttatctgtgttcagatagaaaggaggaaggtggaaagaaaagagagaaacaaaagaactaaaagagaaaggggggctttaaagggccccaattcaggggacgttatcaaggtctcagcatctgctattcacaagccgctcgccggctggggtggcgcaggccccgcccctatctcgggtgtccggcgctcattggtgggagaggcagtcgccggccggtgactgcccgaggaaaggttgcctgggacacgcatccctgtgtgaacgcatgacgtcccaccctggcgccaggctgtctggggctgagtcttagatcaacacagctgtgggacccggacccacagctgggcaaaggagcggattcctcaacaaaaaataggattgtgggaaaagttctgaaacaaaaacagcgcagacaaaagccttaatgacatcctttcataaaaataaaaaatgcaagaggggggaaaaagctggtaaaaggagcagaactgggaacagaaagttcagaggcgtttggagtaagaggctgaggccccgccaccactaaacaagttgcagaaggccggggcgagccgaccagtctgctgtgcaggcaagagagagtctttggggtttaaactctattcactgatcccaacccgactaaaacccactcctttcagacttagactcttaggtcagaaaagacccttaaaggccatttactcctcccctccccctcccccaaagtaaggttctggaaaaaaggatttgtgtccaaaggtaagttattggcgtggaaaggactgaatgcggcttgataaccccttctgacctatctccacacagcctatggccatttcagcctgggagcatcatgaggaaataataaatgctgtgaaggtactttgcaaattgtaaaaccagagaatctgctatccaaccccgaggcaacagaggctgtagtggaggactggagaagagagagcggacctgggtgggcgaagcacctaccgcacatctggccccatgatgaactaatgcagaccagggagtgtgcccttctcacagaagaggtgtttaaaattctttccttttttgagacagggtctcactagtcatcccctggctgtcctgaaactcactatgtagaccaggctggccaggaactcaagctgtcttctgccttctgagtgctgggagcaaaggcttttttttttttttttttaaagataaattaggtcagagccaggtgtagtggtggatcctttattaccagcactagggaggcagatcatctcagagttcgaggcctgttttttctacacagagagttccaggacagccagggttacatagagaaacactgtctcaaaaatagatagatagatagatagatagataaatgtaaggtaaataaataaacgaggtcattttcattagctccacttaacaggcctgaaaattgaggctcagagaataatttattccaaattcacaccgttagtgaaataaaacaagttaagttttgaacataggtctgccaggcactgaaggccatgattttttctagacgctcctgacttgactgttttgcacacacatacagaagtcttcacgagagccaaagaaaggctcctctgttcagttttcgggagtccacacagccacggaggagatttctcttcccgtgaccaaatagctggcatttaacttcttcagcatagagactgccttgtgctttctcaggttagaccttcttctgtcttctaccgaaatagctgtccttgagaacttgaatattcccaggagaaaacttttcagagacttctttcttgggacacaggggcctgtggtatgatggaaaagaatgaggctccgagactggcttacctgtgatgtgatacaggactcgttttatatgccctgtccccggccctgtgctggtccacactccttgtccaactgtcacacaagcatctggtgttctgagtcagaaagtatttataacaatccctcagtgccctttctctctgtctgtctcctcatacagctgatcaaagccgtggtatctgggtttgctcaagattatgtgtcgataaccagtaaatagcagagctgtccggattgaacccagggctttggctccctagaccgatgtccttccaattattggaactgtcccagctcagaggtcccattgtcctgttgatcagtgccacacactactgaacacttaattgtttcctgtgttaatcttgtccccagacattgtgagattcttgagagcaggagcctctgtttcatgtgaagcaactccataaatatttaccaggctgattgattaagaaagcaatctcgtggctgcaaaaccccacctgttctctcccaagatggaaaccagaattttggaactgctgaggcttcggggtctgggaagcagagccaggcaaagaatagagtgcactgtccttttgcaatatgggattgcctgcctgctggctgctctcctgctctctcagatgggtggctggggctacttcagcaggacgaggaataatcatgtccaggtggctgcccttccacaacagaaagggacagacaacgcggcgatgaaattgttattgttttctacagagtgtgcaaagtgtgcaaagggagggaggctgtgcagaacgaggaagcaaacgctagacagctgacccatttggttctatgtatgcccgtggaggggaccttctaaaagggtttatgcagcaagcacccccatatttgaaaccttgtccaaaatcctaatcaaattcacttccaaagcacaaccgggcatacatttagttcctaaaggagttctcggtggaaacggtccatgccttttctttctccgtggaaaaggactgggtccagactgctcttatcctctttcccctggtgctcaaataaatagtgttctctgcttagacctccctttccctccttcttctgcaatctcagcgcctagcccaaatctgttttcttcattgtaacctcagcttcaccgcaattaattttttccccctctggtcacaagataattcctgacgccagtgagtctggaggtcagacgagcagcaaattggggaacaaggcggcactaattccttacaagtttcccttgaaaattcttgagagagagaggagagagagatctttagttgttcaagggatttatgacctcagagctgtgggttcgaaccagtattggggggaggggacctcagagaacttgggcgcctccagaaaaggcatattcttaaaagttaatggttttaagtgattttttttttttttcaaatctgtgctggctcaagagccccgcctctcctcggtatcagcgcttcctcattcctcgcatccgaggctccgctgtcctcggcgtcagaccagcctaaggaagcctgttagcaatttaaacccactgtgaacgcccaggaccggggaggcggtgcccagggcgggcgggggtggacccttggcggtctgttttgaataagggggtgtgtcctagagaggactctataagagtcggccgctgcaggcgtgcgcgcactgtttgctgctttaggtgtctcttttcctccctctctatctctactctccaacatgaaggcgctgagcccggtgcgcggctgctacgaggcggtgtgctgcctgtcggaacgtagcctggccattgcgcgaggccgcggtaagagcccgtcgaccgaggagcctcttagcctcttggacgacatgaaccactgctactcgcgcctgcgggaactggtgccgggagtcccgcgaggcactcagcttagccaggtggaaatcctgcagcgtgtcatagactacatcctcgaccttcaggtggtcctggcagagccggcgcctggacccccggacggtccgcatctcccgatccaggtgcgagagggagccagaccaggctgctctgagcgtgcgggcagggatgctgcgggtcttccctatcgcgtccccgagtcccttggctaactcgtctcctaaccttctttcacagacagctgagctcactccggaacttgtgatctccaaggacaagaggagcttttgccactgacccggtcgtcctggcacctcccggtaagctttctcctggcgcgggcgaggagggaggcttgcatgggaaatcctgcctttgacagaacattgtaaggcttagggttcagtcggtttagggaaaaagccaagccactgaaaggcaaaagccttatctataatcagttagaataaacgacagaacctatgtcaatatcacgtgcattccttagacacgctgtcccttctcatcccgggtggccagagcccagggcaagtgggcgcgcgggtcgcaccaaatgagccttggagtaaaggaagccctcccccctttccactagtgttatttctaagcgggagggggagtggtgactccgcctgtggtcctttggcgccaactgggtggaggcagtgtggggagcggagttatcagctggaggtagagaccgagtttcctccctggcgccggccagtctgcggcatcctccgcctgggcgcgctcggcggaaactgacggctccctcgctcttctctcctcccccgcccagaacgcaggtgctggcgcccgttccgcttgggaccctgggactctgggaccctctctccagccggaagcctgagggcatggatgagcttcgatcttaacccagccctcttcacttaccctgaactcaacgcctcgaggctggacctggagcccgagagaaggactgaacttgggtggcctgaagagctagcacacgctggtcagcagctgggcaacgtcactctgtccccaccctgactcaagtctaaaagactggcttttccgagaatggggtgtcgagagggtgtggggggatgcgagtggctgccctgctcactctgccaaggcagcataagagctgttcttctggtttccttggagaaaagctctgctgccctgattatgaactctataatagagtatatagcttttgtaccttttttacaggaaggtgactttctgtaatcatgtgatgtatattaaactttttataaaagttaacattttgcataataaaccatttttgaacactttgtgtatgacatcttgcgccacctcctaggagcttggggcgggcagatttgcatacccttttagggacgagaaagttcccagctgaagctgagggctagggtggcttggttagtaggaagggctggggttgggaatccccaaaaacattggaggttgaaagcaaggatctatgatcctactctcaattacaggagcctctcctacagccggcaagtctgagaccgaatctttttatttcttcaattccttgaaacttggcagcagctcttagatggatgccgcaaatgattgggcgaaccttcctggcggctcggggtcaagtgtggggatgaactatttcgtatttaaataaactgcctccattaacttcatgctttctggtctgccttccccccagacttccaaacttggagaaaggaaccctgcgggtgaggtggggggtatagtgatttgtactttaatcccagcactcatgaggcagaggcacacaatctcttgagtttgaaacctggaactcactatatatatattgctatgtatagtgagttccaggatggtcagctacgcgggaagaccctgtatataggaaaaccaaacccagggtcttgcctcaggtctgcagccacttttcagggtgtaggcttgctgggaaactcaagttcccttaatgtttggtaaactttgacctggggtttgagaataatgagtatagtattgcggttggcaggaaagggaccttagactggccatttctggggcaggcctgggagttgggtaaaaggcaaggtggcaacccatgccccatctctccaccccaacatggttcctccccaggtgggctgcatcaggcccccatcgtcacaggattcctatttatatgatctcatctgtgtcggccttggcatgtgctacttgtatttcataacaaacatttcattaccctttgtgcattaaccatagtgagctttctggggtgaaacagggtcgtggcagaaggggaggagaggggagcaacctccttgccagttgtccttccagtctgattaatggtttttaacctgtctggtttcttctgatgaaccaatgggagatatgaccatctttcagaaatcacacatgaaatttcgcagaataatggcaggccccccacctctggaggtcctgtttctacataagaaaacttttgccttaaatttaatactctagtgacatccatcttggactgtgtgttaaggtatgctgtgttctctgaagagagcccgtcaaacatgacaatcctgcatcggctgaatacagcaggctacaggctatgcctccagcgagccagtttccacattcgtaccaggtgacagttctgagggggtctgccttctgttcacttagaggttatgaccaaggagggattgaaagctttagtggagcaagccgcttctctctgagcccagctgcctccaaggactgaagataatgatgggaaacttctttgaaatgcatcacacacctacgaggcattattaagctaattccaaggaaattgcttgtcaggactcccagggctgagcagttcaggtggcccggacaaaagcttagaccatctagccaatccattagtcattagaaactgaaagcactttagccctaggtcagaaacctctgagttagtctgctgttgtaatcatttatgggcgtgcctaccaggtgccccggtccatttcattacatcctaatctttttttctaatcagcaaggtgtgtaccttgaataagttgatcaaggtcacagcaaggaagtgggagaaggtatttaggaaagccagcttcctgtagaatctaagtctgggttctcattctctactttagacagctttcccgagtcaacggcttcgtgaatggggcacaaattagaagcccagtaagagcttgttgggggaaaaaaaaaaaaaaaaaaaaaaaagaaaaacaaaacaaatcttagttctgcatgaaatgggatgatagtacatcccttaaaattgtatggttcggatataaaagaccacacgtgaaatattttcctggctctctttgaactatgcaatttagaggccctaactgatctcgaagctctgaagcacacacacgcttgcacgcacacacatatatgttagcacatggccacatatttctaagtgacaaagcagggattcaaattcatgtctgcgacacttggtaatggtggccttccaagaaggcagtgcaccaccttagtacacagaacgggacgctcctcctcaattttaagtcttccgagtagttacggcagtccgtggttaccactctttcccagggcccccaccctcaccccccggctgcacccttaaaacttctctctctggctttcccgcaaaactgcagctctacccactagcccgcctccaggcaagaagcggctccgcggcgccagggccgggccgattctcggcccacgtggcccagtggctgggaaggcggagctccgggccccgcctccctgctcggccccgcccccggcccgctgcccgcgctcccccgccccccgcgggccctgagggccgctcgcaggtgttcgctggcgcccggatgtctgagctctggctccactctggctccggctccctccgcagcctgcgggcggggctcgcagcccatccggagcctcgcggcgcccccgctgctctgccagcagcaagggcttgcagcttccaactcggcctgggggagcccacaccccccctcaccccacacacacacaccgggccgagtcactgaccccactgctctcgtgcacacacacacacacacacacacacacacacacacacatacacacacgaccgagtcactgaccccactgctctcgtgcacacacacacacacacacacacacacacacacacacacatacacacccggccgagtcactgaccccactgctctcgtgcacacacacacacacacacacacatacacacacgaccgagtcactgaccccactgctctcgtgctgcccccatcggcgctcaggccgctgcagcatcagccgcaccccaactcgggtttcctgactcggcccggaggcggcctgcatcgcaccctgctccttccttccttcattctttcaggcagcgcacattcctcgggcgcctgcgacatgccctgcacgaggctttgccgaccttccgagagtggcctctggccaccaggcttccctgtcctccctccccaaccccgcccgaagccggccgtgacaccctacttcatgccagagttctcagatcattttccctccagttaggattcaatccgagccaagtctaaggggtcgttgttgtaattatgatgggggggggggtcagtctgcaagcccactgatgggtcagagggtgggccgaactggggttccaactgactttggtaatagtttgtggtctgacctcatggactaggtgtggggtcagaataagggcatccggaggccaagatttgggggttgcctttgacaagctacataaggaggggcaactttccgtaagctcctcccctagctcagagttccatccctcccgggtgcgggctcaccatcactttagccacccttaccttcctgctggagacacctctctcctcacaggcatcttgctattctgagccagatgtcacaggccgaagcctccttgggcctgaagccctattgtcaatagaaccccatgttgtccaaggtacaagggataccacccaagagccatgtgtgtttagcagcaagctgctgtccctcccaataccttttcttacttgttcacaagtctaaaacctgttaggaatggaaagactcacagaattgacatatgtggcctgctcagagacattcagagagttagaggtgaagacaagactcttaaattgtggtgtcatgggctggagagatggttcagaggttgggcgcactggctgctcttccagaggtcctgagttcaattcccagcaaccacatggtggctcacaaccatttacaatgggatccaatgctctcttctggtgtatctgaagacagctacagtgtactcatacatgaaatgaattaaaaaaaaaaagtggtgtcatgtgcctagcatcaggaggttgagcctggaggatcctgagtttaaagtcagtctaggatatgaagcaagaattaatcttaaaaataaagataagccgagcagtggtggcgcgcgattttaatcccagtacttgagaggcagaggcaggtggatttctgagtttaaggccagcctggtctatagagtgagttccaggacagccagggctacacagagaaatcctgtctcgaaataaataaataaataatgaataataaataataaataaataaataaataaataaataaataaataaataaataaagataaggggttggagaggtggcccaccggtttaaaaaaaaaaaaaaaaagaccatcctggtttgccagaaagccagagtttggttcccagcacatactgcctatccagggatccagcgccctcttgtggcagccatgggcatgagcacacatattacacagataatgaaaataaacctctaaaataaacaacagataagtggagtcagctgtggcagtgaatacctgttatgcctatacttgcaagacagaggtagaaagatcaaaaattcaagctgggggctggagagatggctcagcagtcaagagcactgattgttcttccagaggtcctgagttcaattcccagcacccacaatggcagctcacgaccatccataactccagttccaggggatccaacactcacacacagtcattcattcaggcagaacactaatgcacataaaacaaactgttttaaaacaagaacagcggacaggaaaaactgaatggtctaagtataaaagacaaagtctgagtgtaagagaggcaggaagatctctgagtttgacaccagcctggctcactgagtcagttccaggatagccagggctacacagagaaaccctgactcaaaaagctaaaagaagaaaaagaaaacacttaacctagaccttgtagattggattcttctcctaggtctctttccaaccacagaggtgtccctcagccagcaggggtcgttattattattcctgcttcggggatggggtgggctggagtctcgccaagccaaggacttcacccacagctcttatatagcaactgctagggcctactggagggcacagcccctcagaggctctggaagagggtggtcaggaaggcacttgtcttctgtccctggccagccccttccctgcctcccttgccaggaacaaccagaggaagggagaccacagaggacctcagagctgggaggggggggaaggctgtgagaacgctcgctcaggcagctgagctgagttcttatagacacatgcggaactcattaccctacatcaaggtggtcgctggccagctggcagtggatgggtttggggctagaagtgtgtattgtagggcaagagaatgcttatggcccagctgagtccccagggtcacacagccagccactccatgaccttgttcttactgagccctgtttggtttgcagcctgtgctctttaaagcaccccaacaaaaggcctctgtaccccgtgccaagcccctctaggttatgtgggagacttggggggccaccaatacagacaaatacactctccccgactcacaccctgatcctcatgtatgggtctgcgagtgcatccagatgtgtgacaggcttcactcttccagatctcttggttgtctccagggacttatcctggtggggggtcctacaacctgccaatcacctccttcactgcagaagcatctgcatagaccagaacagcgggatattgttcaaaagagcctgttcggagagcacagcaccttacagtccaacacaatctgaaagaagggcgtgtctccctcccatcttgctccatgaggtttcgggatcctaagtaaaccattggtgtatacttggagtgaccagtgtgtttgtcacctgcagtgctttggaattttttgcacagcttggagacccagatgagcagtagccggttgacccttaacaccgtccccagcatcttcaagtaaaaagggaaggagctttgagctaaaactttaagactgggaagatggctcaggtaggaaagagccttaacactcacataagaagctggtacaacagcctatgcctgtaatattagtaccagggaaggaagagacaggaagaccctgggtgtttactggtaagccattctataccagtccctgagttccaggttcattgagaggctctgtctcaaaatataagttggtcatcaatggaagaagatgcctgattccgacctctggcttctgcacatacatgttcttatacacacacccgtgcacatacacgtacgcacacacacaaaacccacaaaagtccataccaggcctggcagtgggtggcgcacacctttgatcctagcacttgggaggcagagccaggcagatttctgagtttgaggccagcctggtctacagagtgagttccaggacagccagggctacacagagaaaccgtctggaagaaaaaaacannnnnnnnnnnnnnnnnnnnnnnnnnnnnnnnnnnnnnnnnnnnnnnnnnnnnnnnnnnnnnnnnnnnnnnnnnnnnnnnnnnnnnnnnnnnnnnnnnnnnnnnnnnnnnnnnnnnnnnnnnnnnnnnnnnnnnnnnnnnnnnnnnnnnnnnnnnnnnnnnnnnnnnnnnnnnnnnnnnnnnnnnnnnnnnnnnnnnnnnnnnnnnnnnnnnnnnnnnnnnnnnnnnnnnnnnnnnnnnnnnnnnnnnnnnnnnnnnnnnnnnnnnnnnnnnnnnnnnnnnnnnnnnnnnnnnnnnnnnnnnnnnnnnnnnnnnnnnnnnnnnnnnnnnnnnnnnnnnnnnnnnnnnnnnnnnnnnnnnnnnnnnnnnnnnnnnnnnnnnnnnnnnnnnnnnnnnnnnnnnnnnnnnnnnnnnnnnnnnnnnnnnnnnnnnnnnnnnnnnnnnnnnnnnnnnnnnnnnnnnnnnnnnnnnnnnnnnnnnnnnnnnnnnnnnnnnnnnnnnnnnnnnnnnnnnnnnnnnnnnnnnnnnnnnnnnnnnnnnnnnnnnnnnnnnnnnnnnnnnnnnnnnnnnnnnnnnnnnnnnnnnnnnnnnnnnnnnnnnnnnnnnnnnnnnnnnnnnnnnnnnnnnnnntgagaagaaacagagtcccagggtagatgatgacttaggcaaggacatatggaagaggaataagtacagacctggaactaaactgctggactctagggtcagggatcagaagggcctggttccgtgacctgttcactgtgagcagcctctatcctacccaaaacacagtccaggaaagactacttctcctcctccatgctctgtcctccccttccccctgtcctttctaccctgcccccccctttcctcctttccaggctcctctccaactctctatatagccaaaaatgaccttgaacttttttttttaaaagatgtgtttatttttactataagtgtgtataagttgttctgccagcagtgtgcctgtgcaacacatgcatgcagtacccgagaaggccacaagagagcatcggatcccctggaactggagttacagacagctacgagctgccatgtgggtgctgggaattgaacctgtgtcctctggaatagcagccagtgttctaccagctaagccatctctccagtcctgaccttgaacttctggctcctgcctccacctcctaagtgctaaatcacaaacatgtaccatcgtacccaactttttctcctcctccttttccttcttttttaaagatttatttattttatgcatgcaagtacattgtcactgttctcagacacaccagaagagggcgtcagatctcattacagatggttgtgagccaccatgtggttgctgggaattgaactcaggacttctggaagaacagtcagtgctcttatcctctgaacctcttgcccacttttctttctttcttcttcttcttcttcttcttcttcttcttcttcttcttcttcttcttcttcttcttcttcttcttcttcttcttcttcttcttcttcttcttcttcttctcctcctcctcctcctcctcctcctcctccttttcttcttcttcttcttttcttcttcttcctcttcctcctcctcctcttcctccttctcttttcctttccttccttcccctcttccttttttccctcttcttcctcttccccttcctcctccttttcctcttcttcctcctcttcttcaccatgcaccaccactacatcatcatcacnnnnnnnnnnnnnnnnnnnnttccttccttcccctcttccttttttccctcctcttcttcttcctcctccttttcctcttcttcctcctccttttcctcttcttcctcctcttcttcaccatacaccaccactatcatcatcatcatcaccaacaaaggtttgggccgtgtttgtgcacatgtaggccacagcgtgtgaatagacgtcagagaacaacttgcaggagtcagttctcttcttccaccaagtgagtcccagggaatgaactcaagtcattgggtttggtggcagacacctttacctggtgagccatcctaccggcccatgcctggtctgcatgctggcctttgctaggtcagcactttagcacgagtcccaccctaacctgcttatcaccctcatatgtgagtctgttaaaactcctgtttgaacacgtgatgcttaacacagatactcaggttttttttggttgtttttgtttgttgttttttgagacagggtttctttgtgcatccctgggagtcctggaatttactcagtagaccaggctggccttgaactcacagagatctgccttccttcctatgcctcaaaagtgctgggatcaaaggcatgtaccactgtggcctggcagatattctaatatgtgtgtattaaatacctgtgtgctgtagactttcccatttactggctatgtgcatatgggtgcatggcttaactgtttccgtcctcagtatctacatctttacaatgggagcaatagtactttctctcactgacagctgtgaggaccagttagcatatggtacctaagaagtgtcttccctccctctctccctccctccctccctctcctctacctggctgtcatccactatctcagacgccaggaggggtctctgttctcaaacattctgtagccatctgtgttgtgtcttcgtgtaaaaaaaaaaaaatgtggcctctcttttctctttaagttaaattgacatctcaggaagataatccagatttttatcacatggtttttgtgagacccggcaccaggccagcttcacacggccacacatgtgcctgcatgatacagccctgcggacacacatgctctgagaagtctgagccatgctaagcgcctttccaaatgggctggaacaggccatgacggagctgcaggcaggctgagcaggcaaggccgtcacgcccagccctgcctctgtccctccttgctgtgcaatctgtgcagagagcatcgtctctcttagacttagcttcctcatctcacctagaaaaagagtatagtctccccatttggggttcttttgtgtattgttggggactgaacccacagtctggtgtgtgctaagcaagcattcttccatcgggacacatctccagtccctttctggtgcttgcaaggtctacagaaaacgtagagttcctgagccagctattaccatgtgcccagcagtgagggctcctaggcatcaggcttgttttcagttgagtaaaaattacttgaagaaaatgggactaaggtctgtgtgccttatgtagtatgtccaccttatcaccttacctctcagcatcccagttaa

SEQ ID NO: 1527 - DNA, 728 bp, Mus musculus
tctctactctccaacatgaaggcgctgagcccggtgcgcggctgctacgaggcggtgtgctgcctgtcggaacgtagcctggccattgcgcgaggccgcggtaagagcccgtcgaccgaggagcctcttagcctcttggacgacatgaaccactgctactcgcgcctgcgggaactggtgccgggagtcccgcgaggcactcagcttagccaggtggaaatcctgcagcgtgtcatagactacatcctcgaccttcaggtggtcctggcagagccggcgcctggacccccggacggtccgcatctcccgatccagacagctgagctcactccggaacttgtgatctccaaggacaagaggagcttttgccactgacccggtcgtcctggcacctcccggtaagctttctcctggcgcgggcgaggagggaggcttgcatgggaaatcctgcctttgacagaacattgtaaggcttagggttcagtcggtttagggaaaaagccaagccactgaaaggcaaaagccttatctataatcagttagaataaacgacagaacctatgtcaatatcacgtgcattccttagacacgctgtcccttctcatcccgggtggccagagcccagggcaagtgggcgcgcgggtcgcaccaaatgagccttggagtaaaggaagccctcccccctttccactagtgttatttctaagcgggagggggagtggtgactc

SEQ ID NO: 1528 - protein, 113 aa, Mus musculus
MKALSPVRGCYEAVCCLSSLAIRRGKSPSTEEPLSLLDDMNHCRLRELVPGVPRGTQLSQVEILQRVIDYILDLQVVLAEPAPGPPDGPHLPIQTAELTPELVISKDKRSFCH

SEQ ID NO: 1529 - DNA, 947 bp, Mus musculus
gcactgtttgctgctttaggtgtctcttttcctccctctctatctctactctccaacatgaaggcgctgagcccggtgcgcggctgctacgaggcggtgtgctgcctgtcggaacgtagcctggccattgcgcgaggccgcggtaagagcccgtcgaccgaggagcctcttagcctcttggacgacatgaaccactgctactcgcgcctgcgggaactggtgccgggagtcccgcgaggcactcagcttagccaggtggaaatcctgcagcgtgtcatagactacatcctcgaccttcaggtggtcctggcagagccggcgcctggacccccggacggtccgcatctcccgatccagacagctgagctcactccggaacttgtgatctccaaggacaagaggagcttttgccactgacccggtcgtcctggcacctcccgaacgcaggtgctggcgcccgttccgcttgggaccctgggactctgggaccctctctccagccggaagcctgagggcatggatgagcttcgatcttaacccagccctcttcacttaccctgaactcaacgcctcgaggctggacctggagcccgagagaaggactgaacttgggtggcctgaagagctagcacacgctggtcagcagctgggcaacgtcactctgtccccaccctgactcaagtctaaaagactggcttttccgagaatggggtgtcgagagggtgtggggggatgcgagtggctgccctgctcactctgccaaggcagcataagagctgttcttctggtttccttggagaaaagctctgctgccctgattatgaactctataatagagtatatagcttttgtaccttttttacaggaaggtgactttctgtaatcatgtgatgtatattaaactttttataaaagttaacattttgcataataaaccatttttgaac

SEQ ID NO: 1530 - protein, 113 aa, Mus musculus; identical to SEQ ID NO: 1528

SEQ ID NO: 1531 - DNA, 681 bp, Mus musculus
tctctactctccaacatgaaggcgctgagcccggtgcgcggctgctacgaggcggtgtgctgcctgtcggaacgtagcctggccattgcgcgaggccgcggtaagagcccgtcgaccgaggagcctcttagcctcttggacgacatgaaccactgctactcgcgcctgcgggaactggtgccgggagtcccgcgaggcactcagcttagccaggtggaaatcctgcagcgtgtcatagactacatcctcgaccttcaggtggtcctggcagagccggcgcctggacccccggacggtccgcatctcccgatccagacagctgagctcactccggaacttgtgatctccaaggacaagaggagcttttgccactgacccggtcgtcctggcacctcccggtaagctttctcctggcgcgggcgaggagggaggcttgcatgggaaatggaaaaagccaagccactgaaaggcaaaagccttatctataatcagttagaataaacgacagaacctatgtcaatatcacgtgcattccttagacacgctgtcccttctcatcccgggtggccagagcccagggcaagtgggcgcgcgggtcgcaccaaatgagccttggagtaaaggaagccctcccccctttccactagtgttatttctaagcgggagggggagtggtgactc

SEQ ID NO: 1532 - protein, 113 aa, Mus musculus; identical to SEQ ID NO: 1528

SEQ ID NO: 1533 - DNA, 21541 bp, Homo sapiens
ccttctgtctttgagaaattcagcctagtgagagaaaacgggctgcaaaaaaaatgatctcttacttcctggacacacatataccatctcgttaaattctccaaacaaccttgtgaggaaggttttttctttctctcattttagaaataaggaaactgaggttcagtgggcttcattgacttgcccagacattgtaaaatatgaataaaatatgaaataaaatagtgttagaagacaaacacctttattggattaacagatacatcaaaaagcaataaagtctattaattacgtaaggcacatagaccatagcccattttatttattattattattattttttgagacaagagtctcactctgtcgcccaggctggagtgcagtggtgtgatcttggctcactgcaatctccgcctcctgggctcacgccattctcctgcttcagcttcctgagtagctgggactacaggcgcctgccaccacacccggctaatttttttgtattttttttagtagagatggggtttcaccatgttatccaggatggtctcgatctcctgacctcgtgatccacccacctcagcctcccaaagtgctgggattacaggcgtgagccaccacgcccggccagccccattttattaaagactatgaaagatagcttttactgagctaaaaaatgagccagacttttgagagctctcatttatggagcaacaacgaagtgccaggcactttccatgtgtctgtcaaatcctcataaccctgagaggtaggaacagttagctccctttcacaaatgacaaagctggggctcagagaggtgaagttacatggccagggttgcacagcaaaagagggcatcgagccagtgctgggacccaggctctgacacttgggctaggagctggagccaggcctttctcccaagtcaggtttagtaagagctatgctgctgctgtgagccaatcaccctttcctgcctcactccacggagcgcgatgagtgggcgggagaggggacaggcggttcttcagggcaagaggacttgtttcagcccatttgggaagcagcccggcgtagcatggccttctcaaagtgtgtgtgtctgcatgcatgtgtgctcatgcatgcacacatgtgactgtgtgtgatgttggctggctgtcgggtctcacaaagccatgtgataaaaatctggtacatctttctgaaatgtccgttttactcaaaaaatacaaataaaagaaagagagacatcacaattttatattaaaacacagagggctatagaatgtaagagaacacaaccttcacatggtatgttaagataatgaatgacaactagcatttgggggctgtggttattattatgtgccaggcactaatctaagaattttgtatggtaactaagcctcacaacaaccatctgtgtagggactgttagcagacacggagaagagaagttaagtcacttgtccaagttcacacagctagtatgtggaagagcctgggaacacaaagcatttcattagacaaatcttagaacatctctattatccattgtttgttcaattaaaagtttgtaacaagggtcaggcgcagtggctcatactcctgtaatcccagcactttgggagaccaaggtgggtggatcacttgaggtcaggagttcaagaccagcctggacaacatggagaaaccctgtctctattaaaaatacaaaaccccatctctactaaaaatacaaatcatggtgatgggtgcctgtaatcccagctacttgggaggctgaggcaggagaattgcttgaacctcagaggtggaggttgcagtgagccgagatcgcgccactgcacttcagcctggacgacagagcaagacaccacctcaaaaaaaaaaaaagtttacaaggacgggtgaggtggctcatacctgtaatcctagcactttgggaggccaaggcaagtggattgcttcagcccaggagttagagaccagcctgggcaatatggcaaaaccttgtctccattaaaaatataaaaattagccaggtgtgatgatgggtacctgtagtcccagctacttgggaggctgaggtgggaggatcacttgagcctggaaggccgaggtcacagtgagttgtgatcatgccactgcattctagcctggatgacagagagagaccctgtctcaaatataaacaataaaaataaaacaaaaaattgtttaaaagtttacaacaagatttatacacaagaatgaggataagaagtagctggctccggccaggcacggtggctcacacccataatcccagcactttgggaggccgaggcaggtggatcacttgaggtcaggagttcaagaccagcctggccaacatggtgaaaccccgtctctactaaaaatacaaaaattagcctggcatggtggtgtccacctgtaatcccagctattcaggaggctgaagcacaagaatcgctggaacccaggaggcagaggttgcagcaagccgagatcacactaccaccctccagcctgagtgacagaaagaggctctgtctcaaaaaaaaaaaaaaaaggtagctggctccccttttgcttcctcttcatgaaattataagggctgccagttgggagcaggtactctacctctgttgtcttatttaattcctacaacaaccctatgggagaggtagcattgaaagtttacagatgaaaacctgaggctcagggaggtggtgtcatgtagctggtcacacagctaagaagtggcagagaaggatttaaatgcaggtctggctgatcacgaagctgctgctcttacctacacagttacaccaaccctggcctccacgttctctggcctctgggttatgttcttcctccccacaactcctattctcttcaagagagggtagtttcatgagtgagctggttctgggtcaggctgagccaggggaggctcacaacctctgaagctctgtccctccagcagccaaaagcacacttgtcatgaaataattacaaattccaagaatgagaaagtagtaattaggcactgactgggagcttgaagatctggatttttatccccagttctgtgagggaatctttgcctgagtcactttcccactctgggactcagtttctccatgtgtgaaatgaatctagtaatgcttcttgagtgcctgccacgtcctggcaggcttttaggtgctttacattcagtatatcggcacacaactgtggacagggttcttacagtattacagggaggagactgaggctcagagaggggaaggagcttgtccagggtggcagagcttgggagtagatgtgctggaccagagctctgcttttagtctctgcactgtttatatttattcctcaagccactgggcttcgacgctgatcagatgctgccaggctgagtgaaagggctctgcatatagagcgccaatgctggacaagagtcccggggtgctgtgactgggtcatgccaaccacattgccactctggaaagaagaagaaggaataaggctaggaatctgacaccaagcccagcaaactctgtggtgggggtcatctggagcctaccaagtaccagatgctttacatatgtcatctaatttaatcatcaattcaaccatgtgaggctcagagacgacaaataacttacctgtggcccggttcggtggttcagacctgtaatcccagcactttgggaagccaatgtgggagaactgcttgagcccaggagtttcagaccagcctaggcaacatacaaaaaaaaaaaattagccaggcatgctggcgcacacctgtagtcccaattacttagaaggctgaggtggaaggatcactcgagcccgggaggtcagggctgcagtaagagcagcgatcatgtcactgcagtcctgcatgggtaacagattgagaccctgtctcaaaaaaacaaaaagaaaacaaaaaacttacctgtgatagcacagctggtaaatgacaaagctgaagtttcaaccagtgtctgtatgtttcccagactcacagagagaacgtaacaggattactgctgtggctggaagaggccaattctgcagcacccaccggtttgcatgaagtttcaaaacagctgcagacatccaaagcactgggtaaggaggccatcctgtagactgtggctctgacagttactccagggtgacctttagcaggtcccctaacacctatgagccctgaggggggtgaaatggaagcaccccccaaccagtccacgttaccacatagactgtaaaatgccgcccactagtgaatggcctcttttgaaacactttcttgctgttctctttgtatatggagttgaacctgcagtggaaaatgtgattgacagggattaacatctaggccccttggggcccacctggatgaaccctcagtggaagctgggatcatgaacaatggatatggaaccactgtaagaccaggtggcccctggccctgatgaagagagtcagggtgtatgtggggtggggaatggagcaatatggttgtctgtcctgatggtcctgaatctctcatctcttccctgcataacctacagtggcatgtcttgaaacccccttttttttttggagatggaatctcactctgttgcccagatgctcagctcactgtaacctctgcctcctgggttcaagtgattctcctgcctcaaccttcccttcccagtagctgggattacaggcacgtggcaccatgtccagctaatgtttgtatttttagtagagacgaggtttatcatgttggccaggctcgtcttgaactcctcccctcaggtgatgtgccccccttggcctcccaaagtgctggaattacaggtgtgagccaccggcccggccttgaaaccctttttttgatgctagaaatggcataggtataggaggccgggcgcggtggctcacgcctgtaatcccagctctttgggaggccgaggagggcggatcacgaggtcaggagatcgagaccatcctggctaacatggcaaaaccccgtctctactaaaaatacaaaaaaaatagccaggcgtggtggtgggtgcctgtggtctcagctactcgggaggctgaggcaggagaatggcgtgaaccagggaggcggaggttgcagtgagctgagatcgcgccactgcactacagcctgggcgacagtacgagactcggttaaaaaaaaaaaaaaagacgaaaaaaagaaatggcacaggcataggaaacaaaccagtattcagaaataacttggatcggtgagtggggaggttattctggggagtctgccgtgccttgggtaccctcattgccacacaaggcacatttttagccccaaagggaccaactgccagctggccagcgaccacctcaactccgggtaatgagttccatatgtttccataagagcccagctaagcttttccccagcagttcttacagtgttctctccctccctgcctcatctcgatgcttggccacccttgttctatttgctcctaacgagggtggcagggagggggctaggtgggcaatgccaagagacaatgctttgggaagtcacccttccctgacttcatttttgcagatcctcaagctaagaggcagtctctcggcctctccaggcttccgctgccccatctctatagtgggaaaaacaacccttactcagggtagggagagcatcacgaaaagagccctggatagtaaagtgggaggctggtgttccaatcccgacgtgaacactaacttgctgtgtgtccctgagcaggttcctgcccctctctgggctacatttgtgacctctaagggcccgcccttccatccctgacaagcttcagaattacaacaaatgacttaaacagcaaggaagaacatctgctttcctgggtggcttcagggtaggggtccccaggaagcctaaggcctccctaccctggccaccctcactctaagcccaggctccctttgacaagtctggccgggtgagagcttctgcctgcagcatcgggcacaaagtagaagcagggtagcagtgaggagaggcgtcccccgatggaagcacagctccacagctcagaaggcggaggcgggggggcgcctatggtcagcccccaacgacggcgagaggtgaatatgagttcaggggacttcagagaactcctccctccttaatctggtttgtcaaaggcaacccccaaagtcccggtctcaaggtgtctcactaccctgatcccgactgcccaccgaccctacccaaacacggactcactaaccttggcttttgacactgcccacagacggacccccacagcctgactacccacatttatccctaaagcctgccccaggctggcgaaaccccaaatccggccacgctctgacccccgatctcagccacaaagagactccgtgaccttgccactgactgacccctaagaggagaactaatcagagaacaattaaattgctcgactctcagcgaagcacctcatggaacagaggggcggaggtggggaaggacttcgagagggcagaggcttcccggaggagcccagcgggcctggggccacactcggaaggccgggaaggccctgtgcagggcacgtcgcaggcgctcgaggaatgcgagttgcctgaaagaacgaaggaaggaaggaaccgggtgcgatccagggcggcctcgcggacggggcaggaagcgggtgggggtgcgcagaggctgcagcggcccgagcgcagctgggggcagcgggagaggagtggggtcagcgactccgctgggtggggggccccccaggccgcgaggctgggaaccgggaggccgcgctgctggcagagcggcgggggcgccgcgaggctccggatgggctgcgagccccgcccgcaggctgcggagggagccggagccagagcggagccagagctcagacatccgggcgccagcgaacacctgcgagcggcccccagggcccgcggggggagcgtggggcgccgggaggggcggggcggggaggaggcggggccggctcggctccgccctgccgggctccaggccacgtgggccgaggctctgccccagcccgggcgccgcagcgccgccggtggggagcggctgtctccggggaggtctgggagtgggcagagtggagcccttggaagcagcgctgcgggaaagagcgcggcaggaggttctcaggtttagcctggggcatggggaagagtcgtggccacgaggggtgatgaggccgggaagacagataattgaaggttgtccggcgcgtccacagctagagagctataactggctttctgaaaagggcaccatttctggtgtcacagacatgaatttgaattctggctttgttacttagaagccgtgtggccaccggcaagttacttcgcctgttctgagctagttcatttataaaataaagacacctcccaaatgtctgtatttcacagccgatgcgatcagctctgaatccgatcgcatgcgacaatttgcacaagacactcagcagtgaatcttgtagttaaggaagcctcgtggatactttatgcgccttatagtttatccgaacaacacacatggaagggaggtaccgacatccccctttcacagatgagggggagtcctaggtctttcattccacaagcgctccctgggacaagcaccccctggggaccaagcatgtgccaggctttgggaatggcgagggaaaagagccaatttgaagagaaggcaagaacatgagctttgaagctagaggaagctggggttcctaaactctgctctgctactttcttgctgtgtgaactgtttcttgctgtgtgccactttcttgctgggtgatcaagttattcagcctgagtcttttttctataaaccaaggaatgttacccatcacggtggtttgtgaggattagaacaaaaatggaagataaaatagtctggaacctggcaggcacttccataggtgattatgacagaagacactatcctctctgggagttatctgacctagggccaaattgctttcactctctaatgactaatggattggcatgctggtctttcttttgtcctggccacctgaacaactcagtcctgggagtcctgacaggcaatttccttggaattagcttaataatacctcgtaggtgtgtgatgcatttcaaagaactttcccaccattatcttctgtcctgggaggcagcagggcacagaaggagcatggctcagagaggtggaatgcttgctcaaggtcactcggcagatgaccaccgcagccctttttagccttccacggtactgaaacttccgagcaaacgggaggcaacatgctgtggcagaaaagggtataagacgttgagctcaatgcctggctctactgcagttcatggtgtaatgtggggcctaggacctcagaaccgctgccttagaatcagcttcctttacagatgcagaaactggggctcaagagaggcaaagtccctagcctgaagttatacaggtaagaggtgacagagcagggatttatgtccctttatggtcgtctctaaagccagcacagcacacctaaaaaacaatccaagatagacccaacccaggccttgtaggtggtttggggcaagggttcctcacatgaggattgaagtctgctattgctctgcactgtgtgtgtatttttttaagagagtgttcatatcttccttcagatcagagtgaccaggacacagaacaggttaagaaccactgatcaggctgggagtttggttggcaatgccagaggttctcctcctcccccatgcccctgttcaccccagcaagctcaccagggttaaggcactaaaggtgatgacgtgacctgtttgttatgaaatattgaagtaattcatgccagggaccaacacacagatgagatcataccataaacaggaatctctagtaaggccaggcacctggtgaagcccacctggggagccaccaggggtgtgggggaaggcatgggttgggatcttgctctctgccccactgccaggcctggcctcaaggaatggccagtccccagccctgctcctgttcaccacaatcaagtcacggttcaaatcccatctctacctctcaaaggctgtgaaaacctggttcagaagcattacccacagaggttccctttccccatttctgaaatagggatagggatgcttacagaataggttcccaatggaggtgatgtagaaataccagcagaaatgaggactgtggagtctctgcctcacattccttgttcagggtcggactccacaaccacctagcattaaagaagggattactatcagtacttcccaaccagcatccaaatctttatccatttcaggagacctccctcttttttccaactttggaagcccgcaaggaagccagcccagagagcaagaaggaaatgaaaccaggcccagttatcagtttattcatttttggaattggtctatcaaccaccacccatgcctgggcaccaggtgaagcaaacttgaggctctcctcttaccacatcccctgctagaaaggcatagtcaatagtaacaataaagaggaaagctactgctagatctcaagggacatgaaaactcagttttcaagttgcctgagccaccaactttcaagttgcctgagccaccaacttgctgggcaagcttgcaccagtctctggtttcatctctgaaataatgaggcagagcccagaacttttctctgcacccatccctcaatggacatgagactcccatcatgaacccttctctctccaccccatcccctctcaaccaggcagtttttcatttccctctcgtagaataagcaagttcactttcccaaagctcccaaaattcggccatgtgcgagaaagcatcattagtacttaatggagacgggtgtcatcatatacacaagtgtttaaaaatcgtttattatgcaaaatgttaacttttataaaaagtttaatatacatcgcattgttacagaaagtcaccttcctgtaaaaaaggtacaaaacctatatactctattatagagttcataaatcagggcaacagaacctttctccaaggagaccagaagaccagctctgccgccgccttggcatagtttggagagcagccactccttccacacctccacgctctgaagagaccttagaacttgggggtggggtgggagcagggtgacgtcgcccagctggtggccagagctagctctggctcttcaggccacaagttcacagtccttcgctcctgagcaccaggtttagtctccaggaagggatttggtgaagtcaagtgggcagggcgaagttggggcccatccctgccgtccggcttccggcaggagaggttcccggggtcccaggcagaacgggcgccagcacctgcgttctgggcgggggaggaaagaagaccaaggagcagtcagtttccgccgagcgtgccgaggcgggggccgtccgcagactggccggcgccagggaggaaacttggtctgtacctccagctgataactccgcgccccacgctgcccccacccagttggcgccaaagaccacaggcggagcttgcgctacccctcctacttggaattgacactagctgggagggggctgccgaagacagctccctatacaacatggaacagaaagacttgtatttagtcggacccatgtctactttgccagaccctcggccactgcgggagggcaggggccaggcgcatttaaggcttaaatgcacatcacatggaaactgactctgccattcatttgatgcaaccatgggcaagtcacttgtccctctctggcctcagtttccctaaaccgagtgagtggcaatttttcaaaacgtctgccaactccaggacttgccgtttaaacctccctctccaagagaggagatactcacctggaggtgtcaggacacggccgagtcagtggcaaaagctccttttgtcgttggagatgacaagttccggagcgagctcggctgtctgattagaggaaaagagggaagagttacgcgaggcaatcgggagctccgagggtcccgcagcatccttgcctgggtgttcagccctgccccgacttcgaggcttacctggatgggaaggtgggggccatcagggggtccaggggctggctcggccaggactacctgcaggtcgagaatgtagtcgatgacgcgctgtaggatttccacctggctaagctgagtgcctctcgggactccgggtaccagttcccgcaggcgggagtagcagtggttcatgtcgtccagcaagctcagcggctcctcagctgccgggcccttccctcggccccgggcgatggccagactgcgttccgacaggcagcacaccgcctcgtagcagccgcgcaccgggctcagcgccttcatgctggggagtgagtccagaggtgccccaaagagaaagaaaaccaaaagaagtcccgctacagtgacctgcaacgcgcgcacgctcgccgcggcggtcacttatagagcctgcctggaaggcacgcctctttattcaaaatggcccgcctcggccctgcccccgccggccctgggcgttcacagcccgcttaaattgcaaacaggcttcctccggctggtctgacgccgaagaccgcggagccgcggattcaaagaatgaggaagcgctgataccggggagaggcgggcctctccgccagcaaggatttaaaaatcactcaaaaccattaacttccagaatttgctttttcctggcagcaccccagatctttgagcttccctgccccctgccagtccgcctttagcccaacactggttcgagccacagctcctccgaggtcataaatccctgaacagcaaagaagctccccccaccccccgttttttttaagcgaaagatttttcaagggaaacttgtaaggaattagtgccgccttgttccccaatttgctgttcgtctgacctccagactcactggcgtcaggaattatcttgtgaccagagggaaaaaaaattaattgcggtgaagctgaggttacaatgaagaaaacagatttgcgctaggcgctgagattgcagaaggaggagggaaagggggtttgagcaaagaacactatttatttgagcaacaggggaaaagaagaaagcttgagcccatgctttttgcatggggaaaaaaggagcctggaccctctgccccataaactccataacgaactaaatatatgcacagttgtgctttgtgagttcaattagaattttggacaaggttttaaatatggaggcacagatgggacaatttctacataaacctttttaagagccccccccccacccaattgggtcagcaaatttcttaacttcccctctcttcactttccacacacctctgtgtagaaaacagtggtaatttcattgcgctattgtctgtccctttctgctatggaagggcaggccacctggacttgattattcttagccctgctgaagtagctccagctccatctgaaagaccaggaaaggaaccagagggccggcaaactaagtcctgtattgcaacaggacactgtgctcagtattctttgattctttgcttgccttcttgtcacctccctagacatttggggacctgcacttccaagatgctgctttccattttggaaatgaccaagtgggattcccccaatagttgctttcctaatgaatcattggtgaatatttatggagtccctccgcataaaacagtggctcctgctttcaagaatctcacaatttggggagacaagattaacacaggaaacaagagttcgataatgtgtggcactgattaacaggacaaggggggctcagagccaaagagagtcgcaaaacggttgaaaaggacactgactgggaattgagagccctgggttcatcatgctagccctgacaataatttgtcatgtaatcttgaacaagcccaggtactctggctttaattgccttgtgagtaaaatagacgatggtactaagtgattatttaaaatcctttccaattgtagaagtccaaggttgtgtgaaatttggatatgtaggtgaaagatgctgaggggcccaaggaaggcatttaagacatgcccaatgtcacactacaagtaatagcagagccagtcttgaagcctcgttcttttccatcaaaccacagggctctgtggcccaagaaagatttcttcctggaatgtttttttcaaggacaggctcttcagtaagaaaagaggaagaaaacctgtgagtgggcaagtcagtctttacatgctacagccgtcaagtgccagctatttggtcaggaaaggcaaaataatggctgtaggaactcctgaataaccgaagagaagatccttcttttcctatcttgcagacttctgtggcaaaacggtcaagtccagagggttctagaaaaatcacgggccaggcagatttctgtgcaaatgcccattcttcttcttcttcttctttttttgtttaaactaattgtgtagactttggctgagttatcctgggtgcttctattttcccatctataaaatggaactaattgggtctactcattcattcattcgataattattgaatgcctcttctctgcaaagcacttgatgtgttcactccatctgatcttagtcttcttactgcctgggggacccagcatgggccagttgtgtggaaggtgctcagtctacccagattctcctcccttcttttccttcctctactactgcagctgatgcctcaggcttgtatagtgatttaggtttgcaaagcaccttcgcatttattatttcccaggatgcttccaggctgaaatgcccatgggctgtgtgacataaggcagaaggatgctgtggaattagcaagcaaaattctgttctgtgcatgccaataatttgcagtgtgcccttggacgaatttcctcccttcctgggcttcattttctctttaaaaaaaaaaaaaaaaaaaagatagtgggtaggaggaggttgggaggaagcaagtgccctttaatggtcctctctagcctaagattctaattctgaaagaagcaggttatggttaggaacactgaatagtgtttaaacccaagagacttctttttccccacagcagactggacaggctagctcaggccttctgcaacttgtttagcagtggtggggcctcagcctcttattccaaatgcctctgaactttctgttcccagttctgctccttttaccagctttttcccccctcttgcattttttatttttatgaaaggatgtcattaaggcttttgtctgcgctgtttttgtttcagaacttttctcacaatcctattttttgttgaggaatccgctcctttgcccagctgtgggtcccggtcccacagctgtgttgatctaagactcagccccagacagcctggcgccagggtgggacgtcatgcgttcacacagggatgcgtgtcccaggcaacctttcctcgggcagtcaccggccggcgactgcctcccccaccaatgagcgccggacacccgagaaaggggcggggtctgcatcgccccaaccgcgagcggcttgtgaattgcagatgctgagaacttgataatgttgcttcaattggggccctttaaagtctttttttttctttctcttttagttctttattttcttttgtctattccctttctttccaccttcttcctttatctatatatgtgtataatttttcttcttcttttttctaactatctcctcccagtgtcaggaatcattttgtaagcatttccaggaactcaatcttcctctgccaaaataaaaaaaagaaaaaaaaattcaatgttgtgctctctgatttttttttttttgagaagttggcagaactctttaagttatactgttttgttttttaaaaaattttagaattttttaatttcgtggtagtgggctctctaaattgttgatttcaaagtcaaagtaatgatgacaaggattgcagatgcctttttgtctaagctgagcctctatttattatctatctatcatctttttcccatttatgtcccagacatggggatcatggggacctcagaaacttgctcacgtttacttgggatgtcagtagctggcctatggccagaacccagacctcctctcatttgactctctgtccactctgccctctctctcttttttttttttgggatggagtctcactccgtcgcccagggtggagtgcagtgttgtgatctcggctcaccgcaacctccacctcctgggttcaaacgattcttctgtctcagtctcctgagtagctgggactacaggcgcacgccaccacacccggctaatttttgtatttttagtagagacagggtttcaccatattggtcaggctggtctcgaactcctgacctcatgatccgcccgacttggtctcccaaagtgctgggattacaggtgtgagccaccgcgcccggcactcttaatagcattagggtggtcttagaacattcccaaatgccacatttcataatatgtatctccttgctcataagtgcctagaaggtgtggtgaggactttgcagtcacacacatagaacatcccttctccttctcctcccctcagagagtctggagcccaaagtattgcttgagattcaggtgatacaaggaaagcacaggggattcagaatcaagaccaggctcaatccttgccctgacttctcctaccttcactctgtctcagctgtctcttctattaaattgggaggaaaataccatccatctacctcacagctgggagagtcaaaggggacaagggatggaaaatggtgtgggaaacagttatttttatgtgctgtaatgtgatgtagcccctgttgagtgggataggtggtaccaagtgagttgagtggtccctgctgaggctgttgtcaggaatgtgaggagcatcaggatctaaggcatgagtccttacaggggtggggatttcaaaggcctccaggatgggctactctctaactcagaagcactcagcgccaccgccaccatcatcattcattgagttctgtttgccaagtcctgtttgccttcttacacattttcccgctgatcccttttatagacagagagacagtggctcagaaaggtgaatgtgcttgcccaaggtcacatagctagataagtggcaggtccaagatttgcacccaggtctgcctgtctcccaaagcctgtatcctcctgcacctatgcttttccttctgccctcacaaaggacctcctgggaaggtagcttggacttgagagggttttattctaccagatagggaaaagcaaaggtaaatccattaggtagggagacagacaccgaagtgttggggtactaggggaaaacattgttttctgtgcagagagactcagaaagcattggaatttgttggaaatctaaagcttttcctccctcaaatcctccctcaaagaccttcctatccatacttacgttttaggagatgtttattcttttttttttttttttttggagacagagtttcactctgtcacccaggctggagtgcaatggcatgatctcggctcactgcaatctctgcctcctgggttctaagctattctcctgcctcagcctctggagtagctgggattacaggcacgagccaccacgcccgggctaattccaggctggtctcaaattcctgacctcaagtgatccacccacctaggcgtcccaaagtgctgggatttcaggtgtgagccactgtgcccggccagattattcttaaagcaagtacacagtaactattcctgtttttaggagtcagctttagagttgagctccctcttctaacccagagtcagcctagcttcagtcagccacaacgccctgaagttaattaaccccttacttcagcaggcaggcagtaactacagaatgcccacggaccatctgggattgagggctgagcacccacagggaagcaggaagggaattcattttctgaggaactgtcatgtgttcaaagtttcataaattttattttaataattggccctcgagtttttttgggtaggtattatcatgatcattttctccacaaaaatactgaaattcagctgggcatggtggctcacatccgtaatcccagccctttgggaggctgaggtgggcggatcacctgaggtcaggagtttggaaccagcccggccaacatgatgaaaccccatctctactaaaaatacaaaatttagccgggtgtggtggcgggtgcctgtaatcccagctactcaggaggctgaggcaggagaatcgcttgaacccaggaggcggaggttgcagtgagccgagatcacaccgctgcactccagcctgggcaacagagcgagactccgtctcaaaaaaacaaaaaacaaaaaccaaaaaaacgaaacaaaacaaaaactgaagttcaaagagatttatccacacagctgacggggaaaaggagaaaacaatcagaatttgaatccaggcctatggctcaaacactgatacacacaaagacagagatcttcaagctgctcagtgtccagacacaaaaggactggttccctcatccttgcacttctaggctaatgagtacagagacagcctttgcctcatttctctgttaagggaaaagtttgaaacttctagactttggagagcatcagtaggttatgtaggaatttaactcagacttaacaaacagcaaaagaaaaagaattatgaactcataatgcagagtttcactacttccaaagcaatttcattcagtttcattgaacattccccgccaccttgtggggcacacagctcacctgcttcgtaatcaagtcttatttgtctccctggagtcagtatccttcacggtgcctggcaccaagtaggcacttagtaaagttgtactgaattaagttccaccccattaattgcttttgggagacaacttagaggggggatttgagactcaaatgcaggctgtgctggatgactgattctatgactcccaggcataatgttctttgctgtagacagatgctgatggttggatttgggaccccactaatcagggttcaggaaaggccttagaatgatggggtccaaggtaagaaaagatgaagtccaaaaaaggccttgaaaagcaatattcacctgcccaaatgtgttggcctaggtctcagcagtagttcaatggctgagagagtagagaggtcgggaagggagggatgtggcctggggaccgagctgaccctgcctgagaggaaagggcttccctgaccctaaccgggccagagctctgcagtgagctagagatacgggggtgccagaaagcagaggtaggggcgcagctcagagagagcctcctgctggccacagctatccctgagtgtaatcaagtggcccaagcatcagcaggcttaggaggatcttttgcaaagtgccagtcatgaaccagacattttacatgtattatcgccctcaattctcatatcagttgaggctcagagaggtgaagtgacttgcccaaggtcacacagcaactgggaggcagaacagagtccagagtttatggtttgcagcatgagccaggccaccaattggcgggagaaaggaatcaaatgctggagaatgggaactgtcttaataagaaactgggggctgggcatggtggctcagacctgtaatcctagcactttgggaggccgaggtgggcggatcacctgaggtcaggagtttgagaccagcctggccaacatggtgaaaccccatctgtactaaaaatacgtaagttcggctgggcgcggtggctcacgcctctaatcgcagcactttgggaggctgaggtgggtggatcatgaggtcaggagatcgagaccatccaggctaacgctgtgaaaccccgtctctactaaaaatacaaaaaattagccgtgtgtggtgctgggcgcctgtagtcccagctactcgggaggctgaggcaggagaatggtgtgaacccaggaggcggagcttgcagtgagccgagatcgcaagccactgaactccagcctgggcgacagagcgagactctgtctcaaaacaacaacaacaacaacataagttcgctggacgtggtggctcatgcctaaaatcctagctactcagtagactgaggcaggagaatcgcttgaacctcggcagtggaggttgcagtgagccgagatcatgccactgcactccagcctgggtgacagagtgactccgtctcaaaaaaaggaagtatgtatttgacatggattttgtttcacagaactttatggtgtcaggcagtgtgtgtgtgtgtgtgtgtgtgtgtgtgtgtgtgtctcagtttctttctttttttgagaggaagtcccactctgctgcccaggctggactttagtggcgcaatattggctcactgcagactccaacttccggattcaagggattctcctacctcagcctcctgagtagctgggattacaggcgtgcgccaccacgcccagctaatttttatattttttgtaaagacggtgtttcgccatgttggccaggctggtctcaaactcctgacctcaagtgatccgcccgcctcagcctcccaaaagtgctgggatcacaggcgtgagccaccgcgcccgacctcagtttctgagtgtattcctacctgagaatatgctgtccacccttgtctgagtgtggggctgtccttgggggctgtgcgcggggtgcgcctatgtgtcttcctccctgggtgtttcagcctgctgtgtgtgatgtgtccccgggtctagtataggatcttccctgggtgtgcggctttctatgtgcgtgcttcagtgtatgtccatcttcccccaatctcctagccaggtgcggaacagggccaagaggacaataggctcgagcgcccaggtggccttttcctccactccctcacccaccgcgaccctcccctcctgcaccccgcgccctgactgccccctctctggccctgcccgaccttccgcggccctccctgcccgcgccccggcggccccaccctggccctacccggccctccccgcccgcgccccgcgcccggcggccccaacccccggcggtcccggacgcgcagctgcgggacacacaatcgccggcgccccctctccgccccccgcgcagcccctcgtccaacaaaagccgctttctttccccacaacagattaaagaccaggagggggtgaaaaatagcttctccggccactggcgggggaggggcgcgggaaaagctgggactttggggactctttgatagcgagtgtgtgggaaacccgaaggaatgtggctgttcggaccgccgcggcggggccaggcgccgggaggagggtccgcacctcccccgctgggactcccgggacctcccggacccccgcggccccagcgtccctgcggccccggcgtccccacgccccacgccgccagcgccctgcacgccgcctcccgccagctgagcgtctcccgcgccccctgcttttcctcccctagtcaatttcctcacattctaatttccttactttcttctcactttcccttccaattctccttttcgcgagtcccctattctcgtcctccacctctttctctatgtcttttgctcaagtctgttcccctcgtctccctccccgggtctttatcttgatctatacattcttttttttttctctttgtctgggacacactctgtgtctctttgtttccgtgtctcttgctatttcttggtggctttcctgggttgggtcccagggatggtggatttagcaccgtcgctgtcgccctttctcctgcccatctggaagggctgggaaaagcaggccagggtgtgggcagtttgtttaaatgtccctctcccgccacacacgtgtgagtgcaggtgggcgctgggcagggaagtctggggagcccaggaacacccagggaggagctgtggggaggcctggccagctagaccaggatggagcagggatggggggactcgtggaagcctccaagggtttggaattatttttggcccggtataattcagtctctgaaaggaattcctggcccaggaccggatggtggccttgggacccttatgggaaatgagttgggtctcctggccccctcctctctagtccttgggacaggctagtgggaggaagggggctggttcaagacaaagggcttccaggtggctgaggaaggagaccttccatgtgaagacagcgtggtacagtggggaactcagccctggatcttggaatcccagctttcccctgggctctgccactccctgacaacctgggcgaatcccttcttcctctctgggcgtcagtttccccacctgtaaaatgagatgtttggaccagtggc

SEQ ID NO: 1534 - DNA, 647 bp, Homo sapiens
tgtttaaaaatcgtttattatgcaaaatgttaacttttataaaaagtttaatatacatcgcattgttacagaaagtcaccttcctgtaaaaaaggtacaaaacctatatactctattatagagttcataaatcagggcaacagaacctttctccaaggagaccagaagaccagctctgccgccgccttggcatagtttggagagcagccactccttccacacctccacgctctgaagagaccttagaacttgggggtggggtgggagcagggtgacgtcgcccagctggtggccagagctagctctggctcttcaggccacaagttcacagtccttcgctcctgagcaccaggtttagtctccaggaagggatttggtgaagtcaagtgggcagggcgaagttggggcccatccctgccgtccggcttccggcaggagagttcccgcaggcgggagtagcagtggttcatgtcgtccagcaagctcagcggctcctcagctgccgggcccttccctcggccccgggcgatggccagactgcgttccgacaggcagcacaccgcctcgtagcagccgcgcaccgggctcagcgccttcatgctggggagtgagtccagaggtgccccaaagagaaagaaaaccaaaag

SEQ ID NO: 1535 - protein, 33 aa, Homo sapiens
MQNVNFYKKFNIHRIVTESHLPVKKVQNLYTLL

SEQ ID NO: 1536 - DNA, 42761 bp, Mus musculus
  misc_feature (1)...(42761): n = A, C, G or T/U
tttcatgcatgcatgtaatgtgttctgattactctttttttttttttttttttttttttcgagacagggtttttattcccacccttttctctacctcgaccccacccacccaaagagcagcattttttttttccttctggagattgtagtgaacaaacgcccccttaagcactctatcactgagctatatgtgcagatggatggccctctttcatgtggggtcacctccgcatgtcccaacatctgtgaaaaacattgggaacatctggaaagaatctgcccaaactggaagcctgggctttcccaccagggtctcagacttctctcctctgtctacgcatgcgccaggtgcggcagccgccctctagatggcgcccttcccctttcgctccagcccttcattcaaaggcaccgaggagaaggacaccaggcaagccagagagaggacttgcagagcccactgcttgaaagaatgcaggctcaccagcagcgcatcaccctcgagtttgagaaaacaaagacttacaatctcgcagataggtggaaacagggcctgctatgagctctccttccctccccaggaaacatggttcattctatgtagactgcccattcctggacttctcttggcggctcacacaaactagatcctatactatgtagcctttggcacttttccacttggttaaatgtttcgaaggctcattcatgttggggtgtaaatggtccttcttttcttttcatggcaagataaatagatagatagactgagcctataatctcggcactcaggaggcagaggcaggtagatctctgtgagttcaaggctgacctggtcctaaggagtgagttccaggacagtcatagagaaaccctatctcagaaaacctaaacacacagatatacacaccggctatatggctacagtttacagtttatttaatttatccatttatcagttaatggcgactgggtcatttttactttggagtcattaaaaacagagtcgctacgaatacttgtgaccacacttgtttgtttgacagggtctcctttatgtagccatggctggcttggaactcacaccttcctctgcctctgttagaaccgaaggtacgtgccgcaatgcctagtttgtgtacacacttttatgtagagaagggttttcttcttctcctttgttttttatttttaaagatttatttattatacataagtacactgtagctgacttcagactctcattacgggtggttgtgaggcaccatgtggttgctgggaattgaactcaggaccttcggaagagcagtcaatgctcttacccgctgagccatctcaccagccctcttcttcttctttgttttgtttctcaaaacagggtttctctgtgtttcctggctagcttagaattagctctgtagaccaggctggcctcaaactgacagagatctgcctgcctctgcctcccgagtgctgggactaaaagtgtgcactgccgctgccaggctaggttttcaattcttttaaatttatatccaggattactattgctagagcacactagagttgtttgccttaatgtatttgaggcaaagtctcaccttgtagccaaggatggccttgaactcacagagctctgcctgcctcccacatgctgtgactaaaggtgcatgtcctgcccagactttaagttttattcgttcatctatatattgatttaacaggaggaggggtctgagatatggccacagtgcttagcctgaatcccgagaccacaggcctgatctgtctgtgtgtgggtttttgagaacccgccaagttgtttttgaagcagctgcactaattcaccgctcccagccatgcacgaggctcggatttctccacatccgggccaacacttgctggtgtccatctctctcgtgctggccatgccagtgagtgggtaggagatgctcagggtggttttaaagccacctcccaagtgactggggatgttaactgggtgctacatattccctggagaagtgtcctcctaaatttccaggctgcttcatcaatgttcatgcacccgcattgaatcgccaggacccaggcgggagaaggagaaaaccaatttctgcacgttgtcctctggcctccatgcacaaacacaccagccatggcacatgaaacacacacaggcacatacatacaccaggcacacacacacaccaggcacacacacacaccagccctcagccttcccccaccaggcaaccaggcaggcacacacacaccaggcacacacacacaccagccctcagccttcccccaccaggcaaccaggcaggcacacacacaccaggcacacacacaccaggcacacacacacacacaccaggcacacacaccaggcacattcatatccccatctcagattcacttcaatacaataacctgtgagacagcgacagcctcatttttcaggggaagaacggaggcacagggtggtgcagtggtctgcacaagagtacatgacttggtctggagagatgactcagcggttaagagcattggctgctcttccagaggtcctgagttcaattcccagcaaccacatggtggctcacaaccattgtaatgagtgagatccgatgccctcagagcaacagcgtactcatatatattaaataaataaataattctttaaaaaaaagagagcacaggacttgaggatgaagtaccaggctctatgaacttaactctccacactgaatgtatgtaacaagcaggaaggccgagcccaggcttgaagcagtgcctcccctccctgcagcaatccctccccgcagccatggttctcctttggcgtagcctcactgacagcaacatcttcctccctcataccctccctgttggatcgaacccagggccttatacttttagatcaatgctatactatcagtgcatgattgctccagctctttaacgcctacccccacccctactccacctctaccccccccaaccccacccctagctcccacaacccccggctcccaccactgaaacagcaggtttaatagaaagcacaaagatgagggagggatgcgtggagatttttctcccttgtacacctacctgcctgacttctatccctttggacatgtggtgacatgtggtggcagggaactggaacaggaggactaggtcttcaggatgcctgacactttttttttttgtcttttgtttctgttttgttgttgttgtttgtttgtttgtttgtttgttttaagattctaacatttggggctggagagctggctcagcagttaagagcactactgctctcttccagaggacctgggttcaattcccaacctggcagctcacaactatcttgtaactccaggatctaacaccttcacacagacatacatgcaggcaaaacaccaatgcacataaaatcagtacatattaaaaccagaaaaaaagccgggcagtggtggcacacgcctttaatcccagcacttgggaggcagaggcaggcggatttctgagttcgaggccagcctggtctacagagtgagttccaggacagccagggctacacagagaaaccctgtcttgaaaaaacaaaacaaaacaaaacaaaacaaaacaaaaaaacaagccaaccaacaaacaaaaacccagaaaagagattctaaattttatttttgtatatggtgtgtgtgtgtgtgtgtgtgtgtgtctgcctgtccagtttatgatgggagtggtggcccatgacttaaataatcccagcacttggaaggcagaggcaggcggatcatacctctgcaagttcgaggcaagcctggtcttcatagcaagttccaggacaatcaggactatatagagagacccagtctgaaagaatcaaaatataaaataaatgtgtgtgtgtgtgtgattgtgtgtgcacatctgtatgattgtgtgtacacatttgtgattgtgtgtgcacatctgtgtgattgtgtgtgcacatctgtatgattgtatgtacacatttgtgtgattgtgtgtgcacatctgtatgattgtatgtacacatctgtgtgattgtgtgtgcacatctgtgtgattgtgtgtgcacatctgtgtgattgtgtgtgcacatctgtgtgattgtgtgtaccatctacatgcaggatgccctggaattaggattgcaggcagttggaagccactatgtagatgctgggacactatgtagatgcgggagacccaaacctgggtccgatcctctgcaagtacactaagtattcctaactggtgagccatctctctggtctcatgcatgctctctagccctgagacagagagagagagagagagagacagagacagagagacagagagagagacagagacagagagagacagagagagacagaaagagagacagagagagaaacagagagagacacagagagagagagagacagaaagacagacagacagagaacgaatgagagacttgctctctaaccctagcaggtttggtattcgctatgtagcctagggtgacctagacttagggccatcctcctggttcagtgtgccaggatttcaggtgtcactcaccacatctggctctctgagaagcctgtaccaagtatttctggctttgataaacagtatttttttttatttgtttatcaagacagggtttctctgtatagtcctggttaccctggaacttgctctctcactccgtagaccaggctggccttgaacctggcaatccacctacctctgcctcctgagtgctgggattaaaggcatgtgccatcatgacctgactgctaaacaggattttgagcagaggcatctgagagactttttaggagacacaccagcggatgacccacatggagaatggcagtttgcaccagtttggggacttttccaagactctttgtgcctggcttagataaggattttgatattagccctgtgcctcaggcaggtccttaatatcctgagtcaccatttcatcgtctggtgaatggtttgaaacatccctaatgtacccagttgtgagcagtatgtatgtatgtatgcatgtatgtatgtatgtatgtatgtatgtatgtatgtattatgtattatgtatacagggtctcatatagtccagactatcctaagactatgtagttgaggctgaccttgaattgctgccttcacctccagcttccaagttctgggattgcacatcccttctgcggcccaggtacccctggctcaccacaaggcctggatttctgagactggtgctttgttcaacattcttggtatatggctccacagagttggctccgctgttaagagtacttgttgcttttgtgaaggactcaggttcaattcccagcacccacatgtaggcttacaaccatcagtaacttcccccaacaccaggcacgcactcggcaccagaaccaatatgcaagcaaagcaattgtacacataaaatcctttttatgtgtacatcttttttaaaaaagacttcagtgccttgggagacagagatctgagtttggtcttaatgtcatcattcctatgcaaccttttgtcaaatccctttacatcagaggttctcaacctgtgggtcgggtcatgactcctttgggggggaggtcgttgaatgacccttttacaggggttgcctaaaaccacgagacaacacagatatttaaatcacaattcataacagtagcaaaatcacagttatgaagtcacaatgaaattgatttatgggggtctctacaacatgaggagccgtattacagggtctccgtcagcataagggaggttgagaaccactgcctgtatgnnnnnnnnnnnnnnnnnnnntcctaagactatgtagttgaggctgaccttgaattgctgccttcacctccagcttccaagttctgggattgcacatcccttctgcggcccaggtacccctggctcaccgcaaggcctggatttctgagactggtgctttgttcagcattcttggtatatggccccacagagttggctccgctgttaagagtacttgttgcttttgtgaaggactcaggttcaattcccagcacccacatgtaggcttacaaccatcagtaacttcccccaacaccaggcacgcactcggcaccggaaccaatatgcaagcaaagcaatcgtacacataaaatcctttttttaaaaaatatttatttatttattatatgtaagtacactgtagctgtcttcagacacaccagaagagggcatcagatttcattacagatggttatgagccaccatgtggttgctgggatttgaactcatgacctttggaagagcagtcggcgctcttaaccgctgagccatctcaccagccccataaaatcctttttatgtgtacatctttttaaaaaaagacttcagtgccttgggagacagagatctgagtttggtcttaatgtcatcattcctatgcaaccttttgtcaaatccctttacatcagaggttctcaacctgtgggtcgggtcatgactcctttgggggggaggtcgttgaatgacccttttacaggggttgcctaaaaccacgagacaacacagatatttaaatcacaattcataacagtagcaaaatcacagttatgaagtcacaatgaaattgatttatgggggtctctacaacatgaggagccgtattacagggtctccgtcagcataagggaggttgagaaccactgcctgtatgactcatgcttagtttcttcatgtgctcacgctggacctgttacaagataactcagaggcgtcaacaaaataagcacggtggcacacgctttgattttttttttattagatattttctttatttacatttcaaatgttatcccctttcctggtttcccctccgaagaccccctctcccctcccctcccctcccctcgatttttgatttttgaaacagggtctcattatgtagccctggctgttttgtggaactcactatgtagatcaggttggactcgaactcagagatctgcctgcctctgcctcccaacctctgaggttaaaaggtgcaggccaccatgccgggttgatggcgtatgattttaatcccaatacttgggaggcagaggcgggtggatctctgtgagtttgaggctagcctggtctacagagagaggctagtcatagcttcatagtgagaccctatttccgaagcaccatgactactatcaaacaataaaaataagcataaaagcacacagctgggtgtttgcatcaaacaccgaggacgcacctgggacccttccatggattccgtggggcgtcccagaaaaacccactttgccatccgacttcaaaggtgtaagagtcaaagcttcgaggtctagcacccggactgacatcgcagcatgtagcacggatggaaggagcaagaactcaagctgcagggttcctgcttgatccatgcccacacctctcacaggaatccatccgttcccaggcagcgaaactccaaagccaaccccaactacccgaaactcaaccacagagaactggctctcagccccctcactggctgctggctcccttcttctctcccggcccctccctgccacctccattccctccctggccctggggccttgcttcggctccaaacctgctcagccacaattccttccaggtgccctcatctgtagaatggggataataacagtgtagtgtggtatggtgtggggatcaggaagcgccagagtgaagtgcatgtggtagggtcttgctacagaccagtggccatcatttctactgtcctgtgaacgagagggaagatcttggccccaggccgagtagcagctttctctgtattgggtggttgagggaatggaggttccgagaggtggccccacagctgacctgcccagggctgttcagctaggacgtagtgggcaggactttgtgagggatccctagactttctgatttcaaatctcactcactattgcctctctttgccggacacacaagcaagtcgtaacacttattatccaccttctgcatgccaagccaggcctcattcagagagagacttgactgagagcattgaaaaaaacttagatagaaagcaatgatttacaaggcaagaaagccaagtcttgcttgaggcaaaccacaataaacgttcaaagagtaaaggccttcagggtgagagagggcaaacaggcagggaaggcttccgggaggaggagaagtttaagctgggacttaagggaccagtgaaatagcagactattttttgtttgtttgtttatttgtttattggtttttcaagacagtataaccctggctgtcctggaactcactcagtagaccaggctgtctttgaactcagaaatctacctgcctctgcctctcacatgctggcattaaagtcatgtgtcaccacctcttggtggtctactgtagactaaagaggcctgtgtattccagatcaagtctgatatagcaacagctgtcgattctcatggaccaagctctgtgccgaaggctttgcatatactgtgccatgagatttctctgtgactccgacataaggaatgagagagagagagaaaaaaaaaaaagacccagagaatggagaagaaatcttgtcaaacagctttcacaaaagggttaggggactggatgtgaattaagaatgtcgaagagaaagcctgggctacctggtttgtgatgatctgatcaggtcttaacacggggactcagcccaccccccctcctgttgtggtaaaataattgtttaggccggtcaatggtggcgcacgcctttaaccccagtgcttggaaggcagaggcaggtggatttctgagtttgaggccagcctggtctacaaagtgagttccaggacagccagggctacaccgagaaaccctgtctcacaaaaacaaaaacaaaaacaaaaacaaacaaacaaaaatttgtgtagaagaaacctggaggtgtttgattcaggaaggaagagtgctgggtcctgttggggaaaatgacctgacaaactctggaccctcacccacgctgtgcctgtcaagggcggggcagagtttgggagagtggaaaggagctctttactagaacaaagactcccgacctggactgtcctacatttgactgccaattctcagatcagcgaatctgtgaatgacccgaggcacaatatcccgcccctccgactccctggtcttacccatcccacttctccggattgatgggataaattaaacaacataacatatataatggtctaatcttagtgtactgtacgggcgtacagtaggcgctcaatagaggttagtttttttcctgaagaaaaacataaaagggaggcgccacccttccctgcccctctgccaattaaagcctggaggaacaggttcctgggtttcatttgaagagaaagaggacatattggttatattaattaatatattaataaatgatttaacctaactaagcaacaaagcgaaaacaaaaggttttgtggccagggaaatgcacttgagggtcaagactcaggtcccgactctgactctctttcaatgtttggccccacccccaaggaaaagaggtccgctcctcagcgctcttcgctgtactgttggtccttatgctgggtgttccagatgcacctcctgcctcagtttcgcctactgttacaagaggacgctgaagtcagcagatgtcgcggcccctttaagccactaagctcctgtcgtaatcgctgtttcttagactaagcctttccgggggtgggtgggtgggaggagcctatatatattgtagcagccaatcgaggcgcggcattttccgcgggagatccgaatttggcggcatatagtttggcgctaaaaaaaaaaaaaaagaaaaaaaaaagaaaaagaaagaaaaaagaagaaagaaaagaaaaaggagtccaagcaagggacgggaactagaggggtgaacgcagagctcagcagggcgcacaggacacccttcgcgggtcagagcacacgagtgtccgcggggtccgtgggcattccgggacgctttcacgcacgggcgcgactccggacgcccagatattcggggcacgagccggaccgggccaactcctggcagtgccacctgtgccacgcgatctccgagtggcgatctccgagctcggcagcgctgggcggcgggccaggaggggagggtccggccttgcccggcgggcgtccattggcggctgctcccggcgtccgcggtgcagccggctgcaaagcccgcaggtgccccgcgcgcgcgcgccagacccgagtgggtagggggcgccgcactcgccatgctgcgcgcgccgcggaccctggctccggccacggcgcaacctacaaagagcttgccggcgctgaaccccaccgagctgtggccttcgggtctgagcagcccccagctctgcccggccaccaccgccaccacctactacacttcgctttacacgcagacggtgccttcctctgtggcgctgggcacctgcctcgacgccactccccacggacccgagggccaaattgtgcgatgtgcacccgcaggccggctgccggtaatgctgggggaccccctgtacttcccgtatacgtgtctgggtggggaaaaaggagagagggtgcttgggacgccctacggcttgattacagctggttgaggtggggaagcgggactggcagtagagagaaccctttcattttccgactccgtgaagtaatctcgcctgctgtcgcggactgcaatgagcactggtcaggggagcctggagacctagcccagtgcccctagcgcctgcgtgaccttgaggaagcttccaaggcatcgacgatgcttaagttcattcattctttcattgtttacgccagaaccaacacctgctttttcaggccaggggcttggcctgtgggatttcctggtgactttaaatccgcataggtctcccaggtctctggtccagcctggtatctggaccagagttgtctagccagctccttctcaagtgttgtcctcaggtcctccccacagcctgctcatcgtccgaaatagccagtagcaatgcaaatgtagtccgtctcttgggtttcctgttcagatggactgtgacctcgcgagtgagagatgtgttgtcagggaaggcctggtgtggtggcgtttgggctgtagtacagggtttgtgggaatggatgagaaagggcctgagggagttagagggagggttggggtggctggtttcagctctggtcttcactgtgtatatttggatgtcagggcctctgtttcctcttcttaaaaaaaaaaagttttaaaattacatttatgtgggggatgggaccgtttgtgccacactgtgtttggaggtcagagcacaacttttcagagttggttttctttttcagagtgggtcctggggatcaaactcaagctgttcagcttggtggcaaactcctctacccactgagccatctcgccagccccacctttcctcttctagaaaatatatcttccttggcttgtctcctctgttagttccaggtttggaagcaggtgtcaaggaggggagatggtatttgtagggtatggtaagtctagggacagggataagaccaccctgtgtccccagggtattttgtccgacctgtggctctgtcttttctttctccacccctggggcaggctcagagctcagtggtcacctctctggctctaggcagagccagcctcattttctgcctttggagtcaagctttagttttacctcccatgatccctttcctgggagtgcaggaagtggcatggctgtgttgtcatgcccattttacagggcaagaaactgaggatgagtggtgttctgttgctgtgtcggctcttgggcattttccagccgcatgcatttgtgttagcttgtgaagtaagctgaacaggaagaagctttgtgttgtggaagcggaaaatcgagggtcaaagttcatccagcgaagtgacccacaaatcagctctctatgaggctgggctttacccctgaactgctcattctaggagctaggtgcccctgggaaaggggactctggagggctaatcttgcctttgaccacctgcttttggatgtagagtgtcagtaacagctggggttttgaacttccccaccaactctgcacctgtctgctctgtcctcccagggcgggctcagggatcttagccagagtggctcttgcatgccagacacagcttggcactctgcaccagttatcttggttaggggatgaggctctctacaggtgaggaaaccgagccgagtgaagacattgcccaactcacaaggccaagaagtggggagggtgggggggggtgtcatccttgcatcagactccctaaaagcctgccaggcccagagaccatctctggtccatctccagatgctggggccccagtgccccgtgggcaggcctaaccccctgcttactcattttacaagggtgtgacctggagctgctccaagcccaaccctgggtgtggccttctgctttgtggctgcaaagtgtggggtgagcaagatttgttggggagctggccaccagagggatgacaaccgtggctctgtagaagtcaggccaggacttaggtctcctcgcttcctgcccactggtcctgctgtccgctagcaaagactcccaagctcccctgttgagtctcacctctggccaggctcgtgacattttctctgggtcctacagctggtatctgcgaggacagtgggggctcttctgggtttctctttgcctcttaatttgtgttatccacatggcagtccaggaactcactatgaagaccaggctgggctcgaactcagagattcaccggtttctgcctcctgagtgctgagggccacacacctggctgctgttattgagacaggctctcgctgttgccaggctggtcctgaatgcctaggcgcaaatgtcccagctaagctgggcatacatacatacactcctggggaaactgaggcggggagactgttgaaggttccagatccagctgagtgcgatggcccaggcctttactcccagtcctctggcggctgaggcaggtgaatctgtaagttggaggccagcttggtctacagagagagttctagtacagccagggctacataatgagaccctgtctcaaaacaaagggattctgcctcggcctctccaatggcttagcctataagacaaacataattaaaaaaaaaaaaaaaactctacccacaccaggccaggagatgacgtataggttcagggatagggtgacatgtcccaggctggcctttggagccaacagcaaagtggtccctaaatttttttcaccccagtgcctgccctagattggaaaggagactcaggtccccgcctatgtgaccttggctttcccttctctgatctctgtgctccctgtgtttctatgccagcccctctgttcctctggggctcctgagcaaggggtgtggtctacacttaagggctctgcaaataaatcctaaccagggctgttccagggggtccagattagaaccgtactgacctctgggtgtgttcacagacttttgctctcccttagcactgctgtcttgtcaaagttcaccctcgaacttcactcacggggatacccttgccagagtggctgcagccgctgcaccggcctgctgcattacctcactgtctcctcagaacgagcaggctggcccaactctcagtgggtcaaggtcatctgacctcccagctcacctagcaaaaggacggagaggtccagctttgaccccatctgaccccaaggcctgtgcttggcctctcctggtgccacctggcctttgcaagctcaacccagccacatgctgacttctttctgcgggtagcatccaaagatgttaggccggtgtccttaggtggggttcacactgctacttagggaccctggggttgcaatgagtgtgcatccagtgagggacggtgggagaggaggaggcagcgtgtgaacacatgaggtgtggggagcagatggcatagggggaccttggccccatgttctagcagttcctgggggagtgtgaatggaccgttcttgtagcctggcatatatggctttggagttggacagacctggttccacagcctggctctgcttttttgtctgtgtgacttaacctctctgtccccacttgtctctcaagacagagtgtcggtgttgatacacttcaggactgtgggagagtgtgacaggctggtcctcggcgtcccctgctttgcaggcggccagtgaggttctgattgggggtcgggagtataggatgagctagaactaggcttgaccagttctcttgtcaacttgcccttgtatggtgggagggagctcgaatgaaccattttgatcaagacagagtcctgtctgagcccacctggcctttattacaacagccacaccattggtactgatggggatggaggcttagggatgggggccggagcttagcttggattatatgggggggggctcagcgggtcctgatgtaggggtggggtttctctggtgacaagatggggttagcctccctagagtctaggacttcattggttgtgaggtgggtgaagaatactcgggagactttttcagacagatgagcggggaggtgtttgcattcggtgtgagccttggaagagagacacgttagacattcaggctcctggaagcaatgagcagaattcttgtgccagtccagggagacttcctggagggggctggcgtcagggagaagagctgacacctgtcaggccagctgtgctcggcagcagttagaaggctcagcactgccgagcgtgacctcaccaccaagtgttaaaacagatctttcaagcggctggcagaggcatctaggggtcagggaaggaaggaaacaggctcagaggccccagagggtgtgtccaggaagatgctgggatcgtgtttggggaatagactctgcatttcctgagcccctactgtgtgtctcctactgagaacatccctagagtctttgccacagtcctccaggtcatgatcttctgcccattttactgagcaggaaactgaggcccttagcgacggttggcacatgtccctaggtcacacagtgagacttcagacttgctggagattccagctggccctttgcccagtgtcccagtgccccagtgtttctgccccacccctgcccagccctaagccatcagggaggccctttccgggcaatgcagctagaagcctcattgtggccctgtggtggtggtggtggtggtggtgggtgggtggtgtctgggtagagcagccgagcagatgggctgtggtttggtttccccagcaggtgtttcccaagcttggcgggaacggggaggggcagcagggcctcagctgcttgtccttaagacactggggaaggactcattgtgtctcagtaaagaaagaatgacaagcagtccattctggaggccctggaacctcaagctggagcccaaaccgggatgggggtgggcaggagggagagtgtttgcactgtttcccaatgcgggcacctccctggggtgtggcactgagccaggaagtcccctgggcctgggcggatgctggccccaccctgataagggccagctgtggagctgtgatgggcaccaggttggaatgaaccagctgcttctgaaagggacaggtccccagcctgattatttgcctctcacttcagtgggcgctgacacttcctcaccaagttcagccggccacgccacacaccgcactgagggctggtggcaagcacacaggagatggctggctgttgctggccttgctgcaggccaagtaggccttgctgcagctcataaaaaaatgtcaaggaaggcctgattctctaactctttctcccccccccctctgtctgtcaaaggccaaaaggaagttggacctggagggcattgggaggcctacggtccctgaattccggacccccaaggggaagtgcatccgcgtggatggtttgccaagccccaaaagtaagagcttccgatgggcacctatggtggggtggcacgaggcaggagcccccaccctgtcaccagcgcaggcgcctatcagacaattcccttttccaaggtttcttgtgtattctcacgattgattctgttcagaagatagttacgttccgattcctgatgaggtaactcaggacttggccagggtcacacagctagtcagtggagtcaggactaacgccttgaatggcttcctgtactttaggcacctgccctacccttcccccagagctaaccacgatgactagtgtttatttgggagcttttttttttttttttaaagttttccatatttgggtttatcagacctttttctaaaagagagagagctctgggaggattagaagctaagcagggtctgcctcccacatacagactgctaagtgattcaaaggaagcaaaatctggaataatccagtctaccacctgaaggtctccaggctgtccagctagagcaacggttctcggcctttgggtcaaggcccccatgggggtcgaatgcctctttcactgggctcacctaggaccaccagaaaacacagatatctaccttatgattcataacagtagcaagattacagttatgaagaagcaaaaagaattttaccgttgtggatcaccacaacaggaggaaactgtattaaaggactgtagcatttggaagggtgagaaccacagggctagaacctttctaaagctgaggtggagggaattcctacctctgcgatttttctggttaacctgggagtttaagccagtacgtccaggagataaatggatttacccagagacctaacgagggcataggtttaggtagaatgtgtagatgtcaggaattagggatgagggtaagggctcccaccggacatcgattattaatgtctgccatgaacacaaaactggagtaagcagtacgtgtgtcaaatgcttggcctctatgtgtgaaggggttctcaagtccccttcttgagggatctgagattaaaacttagttcccgtgactagtttggacgccaacttctatgagacttaaagtcatttgattgcaaaagtccccttgtggttttaattcgcttcagctgagaagtggtgtcgcaacggcagccctgttgagaaagggaccttttccatggacctggcccccatttgatgtttgatggttcatgattcccttcagataattatcgggctacacatggaaagaaaaggcaagtgtggatctataaaaatgctctcaaatccaggcttgtcctttccttccaaccataactcctaattcctggtataattgttgagagatgataatggtttagcaggaaaactggagcctgcctggatttgaatcttactttgccgtctgctgagtgagacgaacaaatgacttaaccagtctgtgctttctgtacagccctgtagggtattcccttaaggaaagtgcccagagcagtgaccctcccaacagtaggcacttagttgttggagctgttgctgtctgctcagagctatggtggaaaggtactctgaaccgggagtccgcaacccttggcttccggtctcgacagcgcaccctagcggagagacctggtgcaagtctccttcccccgaggctacagggctttgtggcagtggagaatccgctgcctgggtgctctgcgcgctggacagctctcggtgaagggtgggagataaggtgtttctgaatggatctgaactcgtggagagaccccaggctggctcccccagagcagtgtgtgagtggggccttttcctcctcagcccccaagtctcctggggagaagacacgctacgacacgtcgctggggctgctgaccaagaagttcatttacctcctgagcgagtcggaggatggagtcctggacctgaactgggcagccgaggtgctggatgtgcaaaagcggcgcatctatgacatcaccaacgtgctggagggtatccagctcatccgcaagaagtccaaaaacaacatccagtgggtgtgagtgcctgggcccggccagggcaccatccaatgggtgcatgtgttaggggcggggccaggaacagtagccaataggtgtgagatttagggtgccctccccagcaacaggcaattcgcacaagtacaggatggggggggggggtaggtggccaatggggcatagcctgtgtgtttgaatggtgtggaacaggtgttaaatgctggcatagtatcgagagcgagccaaaggactgggcagagcggaggagttctaggggttgtacaggtccgagaggaccctagctccttgtattaggggccccgggatcctcctcttgactcaggaaaacctttgggaatagctcaggtatgggtcgggctcctccccactgctccagggtctgaaagcatcctggcatgaacccttaaggaaacccaggaacggagccaaggctaaagtcaacagcttcttaccatctgatggaggctggggcctaaggattggacgctggggttcaggtttcttatctctaacctacccccaagcttcaagtgccaggccatgatagttcacagggagctgggcatccccagtgatttgcataacatgagagggggcaccgctggtgactagccctgtcttggagtttcaccagctcccctctgcggttgtgcgggggcagccctgaggtgggggtcatgacgttggggattgctctgttcccagaggcagggaactatttgaagaccccacccgaccctccaggcagcagcagttggggcaggagctgaaggagctgatgaatgccgagcagaccttggaccagctcattcagagttgctccctgagcttcaagcacctgaccgaagataatgccaacaagaaatatcctttctgcggggggcggggagggggcgggagggagcagggcggcttcgggctgtggaaatggacactcccttgatcttttttacctccttacagggactagctccctctagaggatagtcacatctgtatctccctctcgagctttagcgaagtttgggggttatttggggtcctttcttttgtgagatcctgcctgaggagatgtgggctcgcttggtgcccactgtaaatgtcgataagacctacagtgcgtgtttggatccagtctggacttcccctaatttattttctagttatgctttttcttgtcatgaaatgacatgtgtttatgtgtgtgtgcaggggtgcggtgtgctatggaggccagaggacagcttatgagggctagttctctccttctaccatggaggtcccaaggatcaaattgcggcatgcttcttctccttctttttttagtctttgacagtttcatacatgatatacattgatcgtttctactttcaatttccttcgcccaccctccccaaaacagcccctcctctctccaccctcccctaaatagcccctccccaccaccacatatcctcttctcttctttctctcctctctctctcccttcctccctccctcccttctctctctctctctctctctctctctctctctctctttctttctttctttctttctttctttctttctttctttcttcccctgagacagggtttctctgtatagccctggctgtcctaaaacttgctctgtagaccaggctggcctcgaactcagagatctgcctgcctcctctctgcttcccaagtgctggaattaaaggagtgcatagcatattttttttgcttatcaagacaaggtctctctctagccctggctgtcctagaactctataggccaggctggcctcggccttattttattccgtttgtatgtatgtaggtgcacgcatgccaggactcatgtgtgcaggcctgaggacagcgtgcaggagtcagttcttcttttaccatgtgggctttaaggctcaaactcaggtccttcaggctggctgagcacttgctgtctatatttttattttattttattttattttattttattttaaaagatttacttattgtattcatatgaatgcactgtcactgtcttcagacacaccagaagagaacaccaaatcccattacggatggttgtgagccaccgtgtggttactgggacttggactcaggacctctgcaagagcagccagtgctcttagctgctgagctatctctccagacctgccagcctttatttctaaaaacatgttcttaactgaggttgaccgtctcacctcccactgtctcctttcccccacccttacttgtaacccacccctagaattccctttttggctcccaaaagaatccagcataagccgggtgtggtggcgcacgcctttaatcccagcactcgggaggcagaggcaggtggatttctgagttcgaggccagcctggtctacagagtgagttctaggacagccaagagctacactgaaaaaccctgactcaaaaaaaaaaccaaacaaacaaacaaaaagagtccagcatagggtagggccttgtgtgtgacagttgaggcctctgcccctgagttacaaggtcattaaatcttataaaccccaataaagcaaaagagccggcaccctgaactattttcttagactgggtcatcccaaactgagtttcaaattatcctcatacatggctcattgcattatatatccatcgctccctaggaggagacaaaaggtaatctacaaagctttcccaggtttgggggccactaggcagcaagagccccaacctctaaggtcccccaggcagctgccattcaggcaagctttcccctggccagtccctggggaacaattttacttgcttcttatgatcccttctcctgcttctcataaccaacctcctggctccccctttggccctcatattccgtattgcttgtgctctgctgcccttcccactcccttcccttaaagcttaccttcaccttctctttctagttttctgacctctaccctccctccctcgcagacacacatgtatacacatgaaaattagcagttaggagccacacgtgagaggtgatgactagaacagtgactctcttgcttcttgagagagggttggtttgtcttttttgttattttttgttttgctttgttttaaagattttacttattgttgtatgtaagtacactgttgctgtcttcagacacaccaaaaggtgtcagatctcatcacagatggtggtgagccaccatgtggttgctgggatttgaattcaggacctttggaagagcagtcagtgctcttacccgctgagccatctttccagcccttgttttttttgtttttttgtttttgtttttttttgagacagggtttctctgtgtagccccgactgtcctagaactccctctgtagatcaggctggtttcaagctccgagatccgcctgcttcagcctcccgagtgctgatattaaaggcatgcgccaccatcactaccaggccagtgtttgtttttcgaagcctgggttaccttgctcctgtcacattgtcctgtatatttcctgtttcattttcctttatgctggtataatcctataccactataggactgaactatatttccagcatccattcatttgttgatgggcatttaagccaaccccatttccttgaggtttgcaaacagccacactaaccctggatatgcaatctgtttgcttttcagggatggaaggcttgtgctattcaaagaacagtctatggtcatttgcattttgtctgagctgcatggtgtgtgagggtgggatgggctctggaggggagaggaaagccctggcaggctggatgtacactttgacaaggttgcttttcttaacttttctgcccctacactggcctatgtgacctaccaggatatccgtgccgtaggcaacttcaaggagcagacagtgattgcagtcaaggccccaccacagacaagattggaagtgccggacagggccgaggttagaagtgtggagggcagggtgggaaggccctgagtcgctctgtggagtctgaggcagaagtgtccaaaactggaaggaacaacggagtctaagttctggcctgagggcatctctggttttacaggggttttctctttgcagttagggctggaaagggtccttactcgctgaaggtgaggaccaaagccttcaacgctggggatggagccctatgcctcgcttgtgctagcacagtctccacaactgagctgtacctgtacccttggctttttaaagacaggcctgtctgtgtgggtcagtctggctttaaacacactacgtggcccagcccaaccccaaattcatggtcttcctctgcttcttaaatgttggtgttaaaggcagataccaccattcctggcataagatcaaattattattatctttgtaaattttacttatctagtcactgtgtgtgtgtttatgaatatcagagacaagtgggaatccattttcttgttcatatattagtcttgacagcaggtacttttctgtcaagagaactctatcgcaataccaaaattcttatttatctacttatttatttatttatttttatttttggaaatttgtttgggtttttatgtgtatgtttggggggtttgcctgcatatgttgtctgtgtgtcatgtgaatgctgtgactggagattggaagagggtgttgggtctccttacagctggggtttcgggctcttgttaattgccatgtaggcactccgggagtcaaagctgggtcccctggaagagcaggggatacgcttaaaccactgagccatctctacagctccagtccgaattctttaatactctggtaattactctgagtccagaggattccccgatgcctctcctaagctgccttctatctctgttcctggccacgtcagcctatctggaacatcctccgtgcaggccttttctcatctttgctcacactgctcctctccctgcctggtgggctgctggccagcctcggctttcactctgagaccgagtcctgagtcacttccttcctcatcagctagccagactagatcctcctttttttttttaaccacactaaatctcagttctctggtccctctttgacaacattccccacaaactcactgtgtaaccgaagacgaccttgaaatcctggtcctcctgcctctgcttctggagtgctgggactgttagtgcatctagcatcagtttagagagtgcagaagctggagcctagcgccttatacctgctaggcaaaccctccaccaagtgagctggacgccagcctgttggtgttctaagctttacggaagaatgtggtggtcaacttgctttagggtctggcaatccagaaatgatgtgtttgaaggaaaccccatactgcagaggtgagccccacccctcagctcaggacctagtgggttgtgggagacccaggcaatgtgacaggtaaaccaagtatcacagattacaagggtttctgctaggccaagtgatgcatagagacctgaacttgtgtctgtgtgtgtccctgtgtgtgtgtgtgtgtgtgtgtgtgtgtgtgtattcactgtgtcttatgtagaaacacagtggaaagggacaagggtggagaaaccccacccaaatggttcaagcttgcaggcaagaggaagactgatgacaaacccagggtctgaagattggagacaaagtttaattcagtgactcgagtcatgcttcccatctgccaggggcttcgtctacccctgcccgcctctctctgtgctattctcaagagggctcccctcctgtggtagaaagctcgtgtgacaacagctcagccaccctggtagaaagggaccttctgtcctcgtgtccagccagcgtcctgtacctaatgctggttaggttgacctcagccgtgtgacaccctgagggagccgcttcaccctgactctcccagctgcatcacaagcgtggcattggagttggattgtgtaatatttccacaatcttcacagcagcacataggtagggaaggctgatttcccccaatgaaaagcaaggcgtcctcccaactaggagacttgcaggctggacagtgggatggtgatgtcctagcagagcagggcagtgtcaggcttgtgctgagcctgctcgcatgggtagcgctacctgtgtctgctcgaaccggctgacctgcgtgggtctgtgtgcctcattgttcctcttcctcctccaggagaacctgcagatttatctaaagagtacccaaggccccattgaagtctacctgtgcccagaggaggggcaggagccagacagtcctgccaaggaggcgctcccctccacctctgccctcagccccattcctgactgcgctcagccgggctgcagcactgactctgggatcgcagagaccatagagccttcaggtaggtgggagggaggcgggtgtgactctacttcttcctcttctgcatttgtcggttacccagcattctcccagcagaggagcccagtgtcctcacgtgtggtcagtgagcttcacccttggtgaagtccacgggcatccctgtctcaccgggggaaccggggcagctcagccgctcctgccctcagctgtgtgccttctgacagtttctgcttccatttccttatctgtaagttgggcaagagtagttaatatttaactctcgggttattaaagggattagtgaactaatgtaaactgaatgtttggcctggcaataactgtcattcctactgccatgacggctgtgagagtggctcgcagccaagcacgtggcaatcggcaagcctcggtaagcgggcggcatgtgtgtggggtgggagttgaacccatgcataatgcatcctggggaagtaggcaccgagccacagccttggcctgtgggtctttaaaatatcttaattaaaagtttatcatcaagactttgtaaattaaaaacatcatgcactaaaataaaccaaatccaaagtctatacatttcaatatacttctatatgattagaatggccaaggctgaagagatggctcagccgctaagagcacaaaaggtcgcgggtttggttcccaacacccacatggcagcttacagcgctccataattatagctccagaggagccaatgctttcttgggtacctcccagcactagaagtgtgtgagcacacacatgcactcacacacaccacacacacacattcatagacatccacatgtacacatagacacacacacacacacacacacagaggcagcaccctcatacccataacacaagtataatatttttgttttatctgagacagggtttctctctgtatctttggctgtcctagaactcactctgtagaccaggctggccttgaacctggagatctgcctgcctctgtatcttgcctgggtgctagagttaaagccatgcaccaccacagctgggcttaaattagttttaaatagccattctgaaggcgtggcgcttcacctttgattacacacttttgctacccaacatgtttatgctcttagctaccaccccaaaacccccagagaactagaaacataattacctttgtattctccatcattacctgaagattaggctggctttaaactctcagagagtgtctctgccttgagttttgagattaaaggcatgtgccgctcttcctggtgagggtttttgttttgttttgacaataggtctcatgtagttcaggctagcctcaaactttctgtgtctgaggatcacttctcatccctaacccctgagcgctagaattttaggtatgtaccattacgctcagtgtatgtgctgctgggaagcaaaccccaggctttgcacacaatctgtaagcaccctaccaacggagtcacgcccctagcctgagtctttatagctgtttcacaaattactcatttatatatttatgttacatttatttattgttatatgtggatgcatgtatatgtgagcaggaacatgtgtcatacatgtggaggtcagaggacaacttgtaggagttggttctttccttcaaccatgtgggtcctagggattgaacccagatccgcagacttagtggcaagcacctttacttgcaaagccatttcgctggccccaggtctttttaactgttggagacaaggtctgtaaccaagtcagagctgaagtcctctgtcttctctccagtgacaggattgctaggggttacctctacacccggttaactggatttccagaggaaggcttggaactttctctggtagcactagctaagtaggttttttgtctgtttgtttgttttatttttttcaccatgactccatattgggctatctcattccataccacaccttgaagggaggtctcatcactcctggtttagcattagataaccaaggtggagagatggtgcaacttagccaaggctagacagctggaaggcagcccagtgtgtcttaacctttggtctacaggggcccagtgctgtgtcctcgggcacagaataaaccaggaagggctcctggctggagggcccacacctggttgggaggagggtggtacagctaatgactcagaagccacctctgcagaatggctttgccttcaactgagattctgccccaggtcacatgaccggcttcttcctgactggaggccagcttggtttttacatttttcaaggtttgaggaggggggctagagagcgatggctcaggtgttaggaacattcatttatttatatgtgcatgagtgatctgtcttcataggtacccagaagggggagtcagatcccattacagatgctgggaattgaacctgggtcctttaagaacagtcagtgctcttaacctctgagccatgtgtctccagcccccaacattggctgtttttttttttttttttttttttttgcaaaggacatgagttcaattcctggcattcacatggcgatgattaactcttgtttggggatctgacgccctcttctgactcttgatggcactgcatgcgtatggcaccatacacacatgcaggcaaaatgcttgtacacataaaatatagtcaataaacctttaagaaagaaagacagaaagagagaaaagaagagaaaagaaaagaaaagaaaagaaaagttgggcagagggcaactgctgcccgtgtcccacaaaacaggaaatactgtccagctctttacagaagtttattgactgtgatctcattctgtatgattatattaaagcccagagaccgcaagtggcttccttaaggtctcacagcaagtcgatggaagatctgggaccagaacccatgcttttaacaattccagggatctctccggtgttgttgttcagggaccagggcttctctgtgtgccagccatctgactctttgggcacctccctagtcactatcttctaacccaggcctgtgcctcctgtgcctcctgtgccccaccctttcacgccgcctgcggctctgccctctggctcagccgtcaacaaggatgtggctccccagagttcaagcttcctgtgtgttagctatcctccgagaccttgcatggaggcagtggtaatggcttctcgccagctttctggtgtaagatctgaagcccagaggttgtggctgagctcaggagtggactggccactgaggccctgggttctgaccccaatggtgggggctggcaagaaaacctggaggccctggggcgggcaatggcggagccagtttgcttgctaccttctgcccactgaagggaggaaaaggaaggtgtccactcacacacatacacttacaatcacacaatgcacttccatgcacactcacacttacaggcacactcactcacaaaaatacagatatgggttgcacgtttcagcttaaagtagaggtttttggttgttttaaagatttgcttatttttattttatgtatgtgtgtttgcctctgtgtgtgtgtgtgtgtgtgtgtgtgtgtttgagtgccacatgtttgctgtgccaggcagagggcagaagaagacatgagatccctggagccagagacaggcagtggtgagcctccatgtaggagctagggaccaatctttgattctctccaagagcagccagtgttcttaacctctgagccatctttccagcttcagagtcgagtacttttttttttgaggtgagagagtcagaggccaggcccaaagcagagagtgcagtcttgggatttaaggttcagggatctctgggggaattggtaacccgttatgatctcagtttccttattatagaaggggcttgagtaagagttacttctaactcctattctggctctgacattctgagacgtattctgagatgtattctgagatctgaaattgggagacttgggttggagtctgtagttccaggctttgaagacaagcgagacaggaagagtgcttgaagctggaaattcaggatcaaccttggcaacacagactcgagacccagactcaaaagatacataaacaaatacataaatattcacctggtatagtggcaagagcctgtgattctgtgattccccacttcttgggagactgaagcaggagggtcataagtgggaggcttgcctggatgatggtgagttcaaggacactctcggtaacttcttccaaaccctgtatctctagataacaggtatcgagagggttaaggatgtagctcagtggtcgagtgcctgcctagcacgtacaaggggcctggcttctattcctggtactgcttttaatacacacacacacacacacacacacacacacacactcacacacacacacacacacacatgcacagcagtgtccacagctgataagaagcagggctgaggtttgcagccacattcttgttccccttgctgtaatcccagcaatgtgatgtgattgtaatatgttggggatggaaccggggacctgtgtatactaggcaggtgttctactgttgatgtggtgtgtgtgtgtgtgtgtgtgtgtgtgtgtgtacatataactatgcacacacattcatgcctgtgcagaggccagagcaggacgtcaggtgtctccctctatcaccctctgagttgttcccttaagatggagtcattagatctgaaattactattatttgtccagactggctggcctgtgacctctcgggatcaacctgtgactctcttccagttctaggggttataggcactcacagccacgctagcttttatgtgggcactggggattcgaactcaggtctgcctacttgcagtgcagtcagtcttaaccactaagctatcttcccagcctttgctttgcttcaatgtcttgtttcgtagtctcaaccgcatggtacttctgcctctgcctgccaagcgccagcatgagaggtctaagccaccatactcggcatgaaagtttgctctagcttttcctgtaggaatttaatagattgagatcttgcgtttggtctttcgtctactttgaactaattttaagaaatggtttaaaggtccagcttcactcctctgcacgtggacacctcactctccggggaacatttgttgaaagggcggccccttggggggtggggtgggagggccaatgctttaaaaaaaaaagatttattttatcttctgttgcttatttgtgtgtgggtatgtgcatatgaacacaagtactcacagaggcccaggaaggcatcggatctctgggatcaggagctaccgattgcaaggtgtaggcgctgtgaacccagctcgggtcctctgcacaaaccacaaactgcccccacttcttcagctcaggagattgctgtttaaagctaggcattatcagggtgtcgtgggctgatgtaatgatgtaaggagagttggggaagctggaaatgtaggaaccagaaaatggtttccgtagcagtcctgtagggtagcaaggtggactacatacagaagtcaggggtggggtgggagagggtaggttttttgggagcaggtcactgcacccagtggaggggagaagaacacgggagaatggagtttctgtgactggagcctggagagatcgggtgtctccaggccactaagtggaagagatggaggaggggccagccatcggagagcagccagacatgacccttgtctatttgtctcccaaaccagtactgataccccagccgataccaccgcctcctccaccaccactgccgccagccccatccctcgtccccttggaagccactgacaacatgctggagctgtcacaccctcttctacaacagactgaggaccagttcctgtccccaatcctggcggccaactcccccctgatcagcttctccccgcccttggaccaggacgaatacctgtggggcatggacgagggggaaggcatcagtgacctcttcgactcctatgaccttggggacctgttgattaattgaagcgtcctgcatctgtctacctcctcacagacagattgacaggctctctgcccagatgggggacaccagacaccaggtgtcaccctccgtctgcgcggctctcttccagccttccttagggcggaggccagctagggagatgtggaggattcggctggggagtgatatcagggctaagccctgaccctcctcttctgacctccgaccccttcatgaaggactacgggtgcaggtggccatgttcagggaaagggctcactgcctccttctgaggggcagggggaccctgactttttcaagaagcacttaacgcctttgtatttatttctagttcagatgtgtttgtttgtccaccctgagttttagcagggagatttgttctagtttctcctcagacaggcccacccacgcccagtgcctaagcgcacatctgggcttccaggggtctaggccagctccttgccccccgtccccccgtccccccagtggtgcctgggtcttgaggggactatccagtttgcttgaattaattgcacttaggctttgtaattttagaaaatgccaggcccagccaaggcaccggcttggaattctccatctcctccatcctagagaaagttccagtagctactctgggggaggtagccaagggggctggcttcctattggatgtcttatctttcctgagcctcccaatgtaaatgtaggccttcaggaattagcccagaagagctcctgggaaaagcaggaggccacgcccgtgcctcctagatgcccttcctcaggaggtcagagacctggaaggtggaggcagagaggagtgagaagaaaacaagaaacaccctggggtctgcccatgtttccctgggaggattatttttgtttcttggttgcagttggagggggaagattccttaaacacccactgtcccaaagccctcacttcacttccaaggtcagatgtgacaggagcttggtgacaggtttgcacctttccccactggagtgcttcgggggtgagggggcaggggtggggtgctcttccctgcagactaggcctcagcagctcatgacgggataggctggcgcctgccacctctcctggcatggggatctgggaagagctcttggtctctcttgttctgcccatagactgaccatccagggttcctgtggtcaggagacggcaagagtccgcttttcttcctcgcctttccaggcatggagaatgggcttaaccaaggccacgtgtccagagaggtgtacccaggggtgacggggtctgagaggccttccacctaccctcagggagcctgggtttctcaggggctcagtggggcagcactttttgcttgttgttgttttaagtttgtagcattaaattgatttaaaagatgaagttggctatgccaggtaggtccgagctagctgactgggaatttgaagtttggatgttgagctaatatgtactggtgcccatttgggttaatttgtcttatcctcgagtcagcttcctggtgccacaaacttagtcctgtccgaggagtggtcagcgactcacccccccacacacacacttgaaatttgtctatttttacaccgagtgtccaaccttttgacatatgtgacctcgtcgtctctaaagttcaccctcaggaactgcatagataagctaccaaaaaaaaaaaaaatctcatgatgtttgaagtacgtttacaactctgtgttgggctgtgttcgtaggtgtctgcgacccgtgctgcaggttagatacacctgctgcagagatgtccttggtctctaccaagcgaggggggtttctcagaccacccagaaagcccagtgtgctctagacacagggggtcccttgagtgatgagggtgctacctgagatctggtttgatgcacatgaggccggagacagcattgctgtttcctggtctttgccgtttagctgtgcgccaacagagatatctgacctctgtgccttgggctctgggtggaggagagcttggcttagcgagaagagggctgccattcctgtctggtgtgaggttaagaatacagtccagattcaagttcagtcaaaagacccagcgcagggatggatggaggcttccccagtctttttgatctctgagctctttcttatcaaccctgcctggtccaggggctggacctcccgggagaagcccgaggctagcgtgggaacaagctcacacctctttcttgccaatgatacttgagacctctttaagttccttagagtgctttaaaagaacggggtgtaccccttttggaacactgttttgagtggtatgtcttttaggccctagggaaacgttcatgctagggtgggaaagctaccagtttctttctgaggggaatactttcttcagggaagtttcccagccctaccagtgtcccctgctgatatccctggggactccagagcatttagcagaattaaacttgtaaataggcttggagatgcaccattgaagatgtcaggctgagtcccttctctgtgtggctgtgaggagtgggagtttgggggagtttgtaaactatttcagggggtgcagtgtggtttcccctccctgtgaggcctcagcctctcttctgcacagattccgtgttgtaaagagtttgctcatgccgccatcggtgtgctatagctttaacgcttctgaaacctctggggttgattagaagccggggcttaagtttccgtcgtacccagaggccccacctcacccaggtcgtctcttctcccacaaggctcttcagggaccgtggtggctacaggtctggccagcctctggctcctaggaaatatgcagtcttgtggggtttgatcattttgaagatacctgggggtgggaaggtctggagtccctgggttgggactccatgtgggtcacctacctcctggtttcacccaaagtcctgccttgaaccaccagcaagtttcattctgttgtgataattgggcattaaataatggcggctctggtaaactttgtcttggtgtgatttctttttgcagatctggggctcccacccctcacacacgttagatacgtgcccaaccattgaaccgtacctcaggcctgttgtgcttcctgtctgctcccttgacggggggttaggaacatatttttccagctgatgtgtcctgtctctatgtcctctcttccctgccttgctgttcctgtgcctggagttagcggtgccaagccctggggtgtgatccgcccgcctaccccactcctcactggtctgtgccgttgcctcgctcatagcctccctgtttctaaccacatccaccatgtcttctacacctcaaagcagggtccccagtcagaggcttcaacatcatgcgcatgggcgtgaatgcaaagaggccaaaggccaattttagttgcctccctctgtcacggtgcctagagctgcctgttttacagctaggttgactggcggccagctttgggaatcctcttgtacctccccgcctgggctccagatgagcactgctgtgctcattttgtttgtttttggtttggttttgtttttaatgtgaactcaggtacgtgtgcttgctcataaagcacccttaactcaccgaaccatctgtctcaccccaagagtctgaaaaaacattattgttggagaagggaagtatgttggaatgtcaggtgtggtgtatacctgaaaccagtatttaggtggtgaaagacacaggatttcaaggccagccgcaactactaggaagcttcaggctagcctgagctacttgagatatccaaaaaaaaaaaaaaaaaaaaaaaaaaaaaaaaaattaaataaagaaccaaattaaattaaacaaaccagaacatcgtctttaatgtgaaaaggcatcttataatcttatagaatgggagaaaatatttgcaaattatatatcaaattagggacttgggttttttaaattttatttatttattatatgcatgtatgtatgtatgtgagtacactgtagctgtcttcagacacaccagaagagggcgtcagatcccattacagatggttgtgagccaccatgtggttgctgggaattgaactcaggacctctagaagaacagtcagtgttcttaactgctgagccatctctccagcaccccaattagggacttgtattcagaagagaagatgaactcagggctggagagacagctcagaggttaagagccctggctactcttgcagaggacccaggttcaattcctaacacccacatggccttctgacttccctgtgtacacctgctgcccatgcgtacattcaggcaaaacacttgtacccataaaataatctcttttaaaatgattttactttatgtgtatgggtattttgcctacatatatatctgaaccacatgcaggcagtgtccaccaaagtcttagaagagggcattggatcccctggaactggaacagtctcatgtgggtcctgggaattgaacctgagtcctctgaagggcaggaagtgctcttaactgctgagccacctctccagcccccatataaagtaatgttaagagaatgaactcatgtaactttcataaaaagacaatctagagctagacttaggggtgcacatctttaattccatcgctccagaagcagaggcaggcacatctctgagtgagtttgaggctagtctgacctacacggggagttccaggccagcaaagctacccggtaagagcctatctcaaaaggccaaccaaaaataaataaaaagagacgagccagggtgatggcgcacacctttgatcccagcactcaggaggcagaggcaggcagatctctaagttcaaggacagcctggtctacagagtgagtttcaggacagccggggctactttgagaaaccctgtcttgaataaccaaaagaatgccaatatatgggtatgggtggggcagagcacacctgagacaacccctgcccactgccacagggtgagagcagggtggaagataccagaggcctgggtgccactaagatgagttagcaagtggtagagagaagcacaatggtgtgtgcacaatgaggagaggcagaagtggagaccagtgagaaacagccggatgcactgcccctgctgtcttttttgggtttgtttgtttgagactggattctctgtgtagccctggctgtcctggaactcactctgtaaaccaggctggcctccaactcagagctctcctgcctctgcctctggttgctcggttacaggcatgcattactgcctctgctaccacccagctcatgcccagcttcctgagcatcttggaaccccctgaactgcatgcctgaagtagatgcaaaaggtgttcagcccaccaaagaagacacgcaaaaaaaaaaaaaaaaaaattataggttagttcttttaaacatagagataaaaacctaaataaaaaccaaccaagtacatataacctcacaaaatgaagaggaatcacagccaaataggattgagatagggatgcagagactccatcagcacagttattgaaaacctccaagcctgtcttagagaattcaagcgtgagcatatgaatcaggccaggatccatcagcagttgggcagcgccagcatcggaccctgggttccattgcctgaaccttcccctgtagtaaaggaagacaaaaaacaaacacaaaaaacaacaaaaaccaaaccaaaacaaaaaaacgctgcttgcctaagacctgtgaaattttgactcttctgagcaagggtcattcatttatcagacatttatggatgggagcatctatgccgtgccagggtggggtcttcttccgggtccacactgcacacctgctttcagctcttgcttccttgttgccggagcggggagggaacagcccagccagcctttcctgttggcagtggacccctgggtacctgaagctctggttaagttcaaggtcaaagaccgaagagtgaccacttgtcagggctctgcaggaggctttttgttctgtctgtctattcagatgtttagtcatgcaattgtaagatactgactggggctggtgagaagtctcagcgggtaagagcactgaaggctcttctgaaggtcctgagttcaaatcccagaaaccacgtggtggctcacaaccatctgtaatgggatctgatgccctcttctggtgtgtctgaagacaacgatggtgtattcacatacataaaataaataaatcttaaaaacaaacagggctggagagatggctcaatggttaagagcactgattgctcttccacaggtcctgagttcaattcccagcaaccacatggtggctcacaaccatctgtaatgagattcgatgccctcttctggtgtgtctgaatgcagcaacagtgtactcacatatattaaataaataaatctttaaaacaaacaaaatatataaaaatctgaggtgtttctggccaagctggcgagtgatgcattgtgggacttacttcacagccatgcatgacagtgcatgacagtgaactctatctgaaccatctccttacctttgtaaggtgctgcacataaaggttttctgtttttacagaaacataataatggcttaattacagaaaacagaaaacagagaccagggtggacgctcacaccaaatggccccaggaggttgatatggtgccaggcaaatggttggaggcaggaggggaggatgccgggtggatctgttgcctggtgatgcgttgatccaggcaaggccatgcatgcttcctttcagaatgggatcattcaaaactacctataagtactccagaggctgaggcaggagaatggagagctataagccatcctgggctacacagtgagacatttctgaaaaaaaaaaaaaaaatgagggaaggaaaggaaaaaggacagaaaattaaaacatcacggccctcagtaggtgttggcctgagttctgcctgggtgctagagagcactactgccctctggtggacacaaggaaaggcgctaccctcctttcaaaacccttgtagaaatctgtttgaggctcagaaagtccacggaggctcagaaaggtgaatttacttaactgaagtcacacaactggcatgtggccaggacaaggtaagcaagcaagcttgtagaccgatcttattcttggccaacggagttcgaagctgacactgggcacccaatcccatctggactggatgctggcatctgcctttctggcttcctctctccctggctaacttaggcaaattttgctttgctaaagtgctaggaatgaaactcaggctctcaccatgctacacaagcattccaccccctgaatggcctttgatatgttacctttgtgagggctcctaagtttgttgtttgtttttgagacagaaacaggatctctctctttagctctggctgttctggcctttaactcagagatatccacctgcctctgcctgcctactgctgggattaaaggtatgtatcacccaacctggcacaaagtaaagttttgataagtttcaattagattattatctcacgtcctgggataccaaacccaccccaatccctctcatctcctttaaacttgttgttgttgctgcggctgttattattgttattaatttatatgtatatgtcagcatatgaggtggtcaagggagtgtaagatcacttgggactggagttataggaagttgtggtctgtctgatatgtgttgaggtttagtcttttgctatgcattgtaatgctaaatacggcggccaaggcctggttgccccaagggacaaaagaatctgcacaaactcaagtgacactgtgtaaccccgactgctaagttatccctggttggtgaataaagacacctacagggtgtagctgggcagaagggagataggtggggtttgggttcccaggcttggggtctgagaagaccacggagagggagagtgtgggaaaagaagatgccatggggtaggtgagtcatgaaaacatggccatgagggctggccagctggagtaagagctgcccagatggaacatggcaagttatactccagggttatttacggggaagtagattctaatagcttggaggatggatatctgctcagctatagtgccgattaggcttattataaatgtaaaggtcgagtcttttatctgtgaactgaatgataaaaggtggggtagaacccctgatttgagatggagtaattattacaacagatatggttgctgggaatcaaactcgggtcctctgcaagaacggtctgcaccttgaaccactgagccctctctgcagctttacctttttctgagacagggtctcatgtagcccaggctggcttcaagctctctctgtagcagaggatgacctagattttatcagccttcttttccggactctctagagctgaaatcacgggcattgttggtgtgcaccgccgcacattgtttttatgagttgttgggatttccagggctctgagcatgcaagacacgaaatcacacccacagccccccaatcagagaggcttctaagaggtgagccactgagagccggagagatggctctgtgggtgagagcatttgttgttcttgcagaggacatgggttaggttcccagcacccatatggtaactctaattccagggggatttatgcccgcttatggtttccataggcaccaggcactcatgtggtatacatacatatatgcaggcaaagctctcatacacataaaattataaaatcttttttaaaaattaaggccgggcagtggtggcccacacctttaatcccagaatttgggagacagaggcaggtggatttctgagttcgaggccagcctggtctacagagtgagttccaggacagccagggctacacagagaaaccctgtctcgaaaaaccaaataaaataaaataaaataaaataaaatcatcataaatatcttttacaatgtattatttgtgtgtatgtgtgtacatgtgtgccagagcatgtataatgcatgggttctggggatcgtgtgtatgtgtgtgtgtgtgtgcacgcgcgagcatgtgtgcacacgcgccagagcatttataacacacgggttcctgggatcaaactcagatctccagactttcaaagaaatcatgcttttttgttttatttctttgtttttgagctagggtctcattatgtagccatggctggcctggaattctctacatagaccaagctgacctcagtccacaagagatctgcctgcctctgcttctcaagtttggcaggaagcaagtattttttgccagagccatctcacggaccctaagtcctattcttaagctccaccatggtgcctagatgtttgcatataccgaagattccaaacttgttcatggattccctgacccttcgagaatctgactttggaagtatctaaactattcacactgttctctggaaactgacgtgtgtgggagaaaattatgcttctgctctgtgggtgggggtgcccgttctgcgggctctacagaagtctggcccacccgaatgggtacgcaagactgcttaccgtgttctgctttccagctgtgtaggctgcgcactattcaacgctagggggcgccatggcaccaagtatggtgctcaagttgggggtggtcctcttaggtctctttctggcaggaaatatgtagttctctcttaaagaaatttaagaattgagattcaaagattagggtcagcatgtggcttgaactgaggttgtacaaagatctctgagccctgggaagcaactgtgtttgactcttgagcacttttcagtttcttggctaggaactcttgggagcaattgaggttagggaattatcaagctggaagatttgaaaagagaggaagtaggtccagtagggtccgtctatgtctcagcagagttagcattccttctaggctccaccccacagttacctggcaatagccagggatgcttgatttactataaaaggggctgctgccccctccttaccctcttgccctctctgtccctcctctccccattcccctccccactttcgccatatgtcctctctctctcctctctctctccctctctcctcttttgctctcattctcactctctctctctctctcccttcctctccctcaactccccttctcatgccctaaataaattctgttctatactatatctgttgtatggtatggctggtacctcagggaaaaggacgtctcagcatgggcccgcagaggcacccccttctacctcaccatactgagcctctacaaacacattctgatttttttcttttttataaaacacaacagagagtgtgagggataaacaagaagacaaagtgagtcatgtggggggctaattttgggaggattatatggattgggcctaggatcaagacagagagcatctctgaggaccgattgattttactttcattattagttcatgtcctgggaacacgaaaatccccttcttaggaactccagttgtgtaaatggattgatattcataccctcttgttagatttattaagttatgtgcctttaagtgtgtgcttgtgagtgcaggtgtctgtggaggacagagaaggtgttggatcccctggagttggagttacaggggctctgagctggcgggcagtagggacagcctttggggcaggcaggtgatgggagcagccagatgtcagtctgcatggaagttggttcttttctcctgagaaacagaagaagtgggcgggtcatgctagatcgagaaggcgctgggagtggggtacaagagcatagcccggactcagggcgcggagtcctctttcctgccagcctcatggcccctcattagttctcatttgcactagaaattatggattacctacatcctggagatgaacctagaacctgtccccagaaggtaactcacacggcagcaaaagaagcagagagtctgacttcagataagcctgggttcttgttctgccctttctgctcctgggtcagctgactttgagcacaggtaaaccaccacaccatggtatgttcattgcatacctactgtgtatcagttgtgggagtgatgatcaccatggcgaaggtgtgccaaggctaaactgcatttcgcttatctacttgattggacgacctcaggagggaagccatcctcgtcccaccagtgagagaaggggagactggcacccacggaaatggagctacttacctaagacagagagcaaagacaggatccaaccagacagtctgtgcctctggaccctaacccgatctcccacaaagccctcaccagaacaaaacccttcttttcttacagaatttgcacagtagtaggagagagtgaagggtaaatagaaggcaaacaaagcagcatgaactagatatggtggcacgcgtctttatcctagcagaggcaggcagagctctgctgaggtggagatcagcctggtatatatagtgagtttcaggccatccagggctacatagtaagaccctttgtcaaaaagaaagaaagaaaacagaggaaggaaggaaagaaggaagttaggaagcagagtcccagacagctctcagaggtgtagtgcacagagttcagggctagcacggagagagcatcgcagaacccagatgtactggtccatatctgcagtagcatccaggaggtggaagcaggtagatcaggagtgtgaggttacccatggctacacattaagtttgagtctagataaaaccctgtctcaagataaataaacagatacacaagaaagggagtccgctctcaagcctgatgacttgagtccaatccttggaacccacgtgggaaggagagagccaactcctgaaagttgtcctctgccctcatgagttcagtgtcctgcatgttgtgcacacatgagtacacacacaaacacacacccacacccacacacccacacacattcatgcacacagcaaatttctaaaactgaaaattttaaaaaggggctggacagatagatggcttagtggctaaagaatgtttgttcttgcagatgaccct

SEQ ID NO: 1537 - DNA, 3722 bp, Mus musculus
caagggacgggaactagaggggtgaacgcagagctcagcagggcgcacaggacacccttcgcgggtcagagcacacgagtgtccgcggggtccgtgggcattccgggacgctttcacgcacgggcgcgactccggacgcccagatattcggggcacgagccggaccgggccaactcctggcagtgccacctgtgccacgcgatctccgagtggcgatctccgagctcggcagcgctgggcggcgggccaggaggggagggtccggccttgcccggcgggcgtccattggcggctgctcccggcgtccgcggtgcagccggctgcaaagcccgcaggtgccccgcgcgcgcgcgccagacccgagtgggtagggggcgccgcactcgccatgctgcgcgcgccgcggaccctggctccggccacggcgcaacctacaaagagcttgccggcgctgaaccccaccgagctgtggccttcgggtctgagcagcccccagctctgcccggccaccaccgccaccacctactacacttcgctttacacgcagacggtgccttcctctgtggcgctgggcacctgcctcgacgccactccccacggacccgagggccaaattgtgcgatgtgcacccgcaggccggctgccggtaatgctgggggaccccctgtacttcccgtatacgtgtctgggtggggaaaaaggagagagggccaaaaggaagttggacctggagggcattgggaggcctacggtccctgaattccggacccccaaggggaagtgcatccgcgtggatggtttgccaagccccaaaacccccaagtctcctggggagaagacacgctacgacacgtcgctggggctgctgaccaagaagttcatttacctcctgagcgagtcggaggatggagtcctggacctgaactgggcagccgaggtgctggatgtgcaaaagcggcgcatctatgacatcaccaacgtgctggagggtatccagctcatccgcaagaagtccaaaaacaacatccagtgggatatccgtgccgtaggcaacttcaaggagcagacagtgattgcagtcaaggccccaccacagacaagattggaagtgccggacagggccgaggagaacctgcagatttatctaaagagtacccaaggccccattgaagtctacctgtgcccagaggaggggcaggagccagacagtcctgccaaggaggcgctcccctccacctctgccctcagccccattcctgactgcgctcagccgggctgcagcactgactctgggatcgcagagaccatagagccttcagtactgataccccagccgataccaccgcctcctccaccaccactgccgccagccccatccctcgtccccttggaagccactgacaacatgctggagctgtcacaccctcttctacaacagactgaggaccagttcctgtccccaatcctggcggccaactcccccctgatcagcttctccccgcccttggaccaggacgaatacctgtggggcatggacgagggggaaggcatcagtgacctcttcgactcctatgaccttggggacctgttgattaattgaagcgtcctgcatctgtctacctcctcacagacagattgacaggctctctgcccagatgggggacaccagacaccaggtgtcaccctccgtctgcgcggctctcttccagccttccttagggcggaggccagctagggagatgtggaggattcggctggggagtgatatcagggctaagccctgaccctcctcttctgacctccgaccccttcatgaaggactacgggtgcaggtggccatgttcagggaaagggctcactgcctccttctgaggggcagggggaccctgactttttcaagaagcacttaacgcctttgtatttatttctagttcagatgtgtttgtttgtccaccctgagttttagcagggagatttgttctagtttctcctcagacaggcccacccacgcccagtgcctaagcgcacatctgggcttccaggggtctaggccagctccttgccccccgtccccccgtccccccagtggtgcctgggtcttgaggggactatccagtttgcttgaattaattgcacttaggctttgtaattttagaaaatgccaggcccagccaaggcaccggcttggaattctccatctcctccatcctagagaaagttccagtagctactctgggggaggtagccaagggggctggcttcctattggatgtcttatctttcctgagcctcccaatgtaaatgtaggccttcaggaattagcccagaagagctcctgggaaaagcaggaggccacgcccgtgcctcctagatgcccttcctcaggaggtcagagacctggaaggtggaggcagagaggagtgagaagaaaacaagaaacaccctggggtctgcccatgtttccctgggaggattatttttgtttcttggttgcagttggagggggaagattccttaaacacccactgtcccaaagccctcacttcacttccaaggtcagatgtgacaggagcttggtgacaggtttgcacctttccccactggagtgcttcgggggtgagggggcaggggtggggtgctcttccctgcagactaggcctcagcagctcatgacgggataggctggcgcctgccacctctcctggcatggggatctgggaagagctcttggtctctcttgttctgcccatagactgaccatccagggttcctgtggtcaggagacggcaagagtccgcttttcttcctcgcctttccaggcatggagaatgggcttaaccaaggccacgtgtccagagaggtgtacccaggggtgacggggtctgagaggccttccacctaccctcagggagcctgggtttctcaggggctcagtggggcagcactttttgcttgttgttgttttaagtttgtagcattaaattgatttaaaagatgaagttggctatgccaggtaggtccgagctagctgactgggaatttgaagtttggatgttgagctaatatgtactggtgcccatttgggttaatttgtcttatcctcgagtcagcttcctggtgccacaaacttagtcctgtccgaggagtggtcagcgactcacccccccacacacacacttgaaatttgtctatttttacaccgagtgtccaaccttttgacatatgtgacctcgtcgtctctaaagttcaccctcaggaactgcatagataagctaccaaaaaaaaaaaaaatctcatgatgtttgaagtacgtttacaactctgtgttgggctgtgttcgtaggtgtctgcgacccgtgctgcaggttagatacacctgctgcagagatgtccttggtctctaccaagcgaggggggtttctcagaccacccagaaagcccagtgtgctctagacacagggggtcccttgagtgatgagggtgctacctgagatctggtttgatgcacatgaggccggagacagcattgctgtttcctggtctttgccgtttagctgtgcgccaacagagatatctgacctctgtgccttgggctctgggtggaggagagcttggcttagcgagaagagggctgccattcctgtctggtgtgaggttaagaatacagtccagattcaagttcagtcaaaagacccagcgcagggatggatggaggcttcccc

SEQ ID NO: 1538 - protein, 520 aa, Mus musculus
TQSSAGRTGHPSRVRAHECPRGPWAFRDAFTHGRDSGRPDIRGTSRTGPTPGSATCATRSPSGDLRARQRWAAGQEGRVRPCPAGVHWRLLPASAVQPAAKPAGAPRARARPEWVGGAAMLRAPRTLAPATAQPTKSLPALNPTELWPSGLSSPQLCPATTATTYYTSLYTQTVPSSVGTCLDATPHGPEGQIVRCAPAGRLPVMLGDPLYFPYTCLGGEKGERAKRKLDLEGIGRPTVPEFRTPKGKCIRVDGLPSPKTPKSPGEKTRYDTSLGLLTKKFIYLLSESEDGVLDLNWAAEVLDVQKRRIYDITNVLEGIQLIRKKSKNNIQWDIRAVGNFKEQTVIAVKAPPQTRLEVPDRAEENLQIYLKSTQGPIEVYLCPEEGQEPDSPAKEALPSTSALSPIPDCAQPGCSTDSGIAETIEPSVLIPQPIPPPPPPPLPPAPSLVPLEATDNMLELSHPLLQQTEDQFLSPILAANSPLISFSPPLDQDEYLWGMDEGEGISDLFDSYDLGDLLIN

SEQ ID NO: 1539 - DNA, 45999 bp, Homo sapiens
atgatttatttatctggtttaagaaagaaaagaaggaagaaacttctatctgagagcagaacagttttttctggtggaagagatggagagagacatgtgaagcagggagaacagcatgggcaatagagagagctgagaggtcagaggggagttaggaagagtgtgttggattagaacgtaagggggccgggtgcagtggctcacacctgtaatcctagcactttgagaggccaaggcaggtggatcatttgaggtcaggagttcgagaccagcctggccaacatggtaaaaactcgtctctactaagaatataaaattagctgggcagtagtggtgcgtgcctgtaatcccagctacttgggaggctgaggcaggagaatcgcttgagcctgggaggcagaggttgcaataagcagagactgtgccactgcacttcagccagggtgagagggtgagagcctgtctcaaaaaaaacaaaaaacaaaaaaaaaaacctaaggcccatgtgtgaagggtctgaagatcggagggacctggtggtgggggtggctgggccgtggtggggagctagttgccagaccttgaactagagagagacaaggtcaggtgtgtgtgttaaagagatccctcaggaaaacgagggaataaactgacaattacaggaattataggggcggatcacgaggtcaggagatcgagaccatcctggctaacatggtgaaaccccgtctctactaaaaatgcaaaagaaattagccgggcgtggtggcgggcgcctgtagtcccagctacacgggaggctgaggcaggagaatggcgtgaacccgggaggcggagcttgcagtgagccgagatcgcgccacgggactccagcctgggcgacagaacgagactccatctcaaaaaaaaaaaaaaaaaagaagaagaaggaattataggtggcatttccccaagagacgctaagcagctctgctgggacctgactcccgcatgggatgtccctcttcccgcatgggatcacctccacgggacccaacatctgtgaaaagcattcccagggcctacaaacatctggaaagaatctggccagtctagtagccctgtcctcagcggggctgcttctttcacatcctgtttctcctccccaagcccatagcgggtgagttaccttgatgagaagataagacgcctcgcaggctttggcaggtgccagagttcacctctaggtggcagccttcacctttcagccccaccagcttccagccaaaggtctgagagaaggaaaaggaactaacgaagacgcagggggacccaccaggcgccgcaggcacatttactgagctgcagagccaccatctcaggcgcacgtcattctctccacgtcacaactgagagacgtgaagtcactggtccaaagtcacacagatgggtggcaattggcttctctgagcctcatgttcttcatctgtacagagactgacccattcccagcaatcactaatctactttttttttttcctgagacagagtcttgctctgtcacccaggctggagtgcagtggcgtgatctcggctcactgcagcctctacctcccgggttcatacaattctcctgcctcagcctcccaagtagctgggattacaggcatgcgctaccatgcctggctaattattgtatttttagtagagacatggtttcaccatgttggccaggctggtctcgaactcttgacctcaagtgatccacccacctcagccttccaaggtgctgggattacaggtgctgggattgagccactgtgcctggccttttttttttccgaggcaaagtctcactctcgcccaggctggagtgcagtagcacgatcttggctcactgcaacctccacctcccggttcaagcgattctcctgcctcagcctcccaaagtgctgggattacaggtgcctgccaccacgcccagctaatttttgtatttttagtagggacggagtttcaccatgttggccaggctagtctcaaactcctgaccttaggtgatctgcccacctcagcctcccaaagggctgggattacaggcgtgaaccaccacgcccagccccactaatctactttttgtttctatagatttatctattctagtctgtaatcccagtactttgggaggccgaggtgggcggatcacctgaggtcaagagttcaagaccagcctggccaacagggtgaaaccccatctctactaaaaatacaaaaattagccaggcgtggtagtgcacaactgtagtcccagctacttgggaggctgaggcaggagaatcccttgaacctgggaggtgaaggttgcagtgagccaagatcatgccactgcactccagcctgggtgacagagcaagactctgtctcaaaaaaaaaaaaaaaaaaaaaaagatttatctattctagacatttcactaaatgggatcatacaaacatagccttttgtgtctggtttctttcacttagcataatgtcttgaagagtcttccatgtcatagcatgtatcagtacctcattcctttttatggggccaggcgtggtggctcatgcctataatcccaacactttgggagccgaggcaggaggattacttgagcccaggagtccaagaccagaccacgggatatagtgagacccccgtcactattaagaaaaaaaaggctgggcacggtggctcacacctgtaatcccagcactttgggaggctgaggtggtggatcaccatcacctgaggtcaggagtttgaggccagcctggccagcacggtgaaaccctgtctctactaaaaatacaaaaattcaccgggcgtggtggcatgcacctgtagtcccagctactcgggaggctgaggcgggagaatggtgtgaacccaggaggcagagcttgcagtgagccgagatcgcaccactgcactccagcctggatgacagagcgagactccatctcaaaaaaaaaaaaatttttttttcctttttttggctgaataatattctattatataaatataccactttttttttgaggcagggtcttgctctgtcatccaggctgggatgcagtggcatgacttctgcctcccaggttcaagcaattctcccacctcagcctcccaagtagctggaactacaggtgcacgccaccacacccagctgatttttgtattttttttgtagagatggggtctcactgtgctacccaagctggtctcaaacttctgggctcaattgatgcacccgccttggtctcccaaagtgctgggattacaggcatgtgccactgtgcctggactccacattttgcttatccaatcatcagttaatgggcatttgggttgtttctactttctggttattatggataatgctgctatgaacatctgtgtacacatttttgtgtgaacatatgttttcaattctcttgggtatatgggagtagaattgctgagtcatgtggttaactctgtataacttttttaaaaactgctgaactattttccaaagcagttatacccatttacaatcccaccagcaatgaatgagggttccaatgtatgagggttctccacatcctggacgacactagttattgtctctcttttctattataaccattctagtgggttagtgaagtgtcatctcattgtagttttgatttgcatttccctaatgactaatgatgttgagcatcttttcacgtgcttattggcctctgtatatttcctgttttttttgagacggactttggctcttgtctcccaggctggagtgcaatagcacaatctcggcccactgcaacctttgcctcctgggttcaagcgattctcctgcatcagcctcctgagtagctggtactacaggcgcccgccatcacgcccagctaatttttgtatttttagtagagtcagggtttcaccatgttagccaggctggtctcgaacgcctgacctcaggtgatccacctgcctcaggctcccaaagtgctgggattacaagtgtgtgagccactgcgtccggcctggcctctgtatattttctttgaagagttgtccaaccaaattgtttgccttcttaataaattttggtacacacacacacacacacacacacacacagcacattcacatcccatcccagattcacttcaacgcaataaacccgagacagctgtgattagccctgtttatcagatgaaggaacagaggcccagagtaatgcaatgatatgtccaagagcacatagcttatggagtgccaagatttagaattttatgtttttttctttatttttctttatttttatttttttgagacgggttctcactctgtctcccaagctggagtgcagtggtgcaatcttggctcactgcaacctccgcttcctgggttcaagcgattctcctgccttagccttccgagtagctggaattacaggtgtgcaccaccacacctagctaatttttatattttcagtagagacagggtttttccatgttggccaggctggtgtcgaactcctggcctcaactgatccacccacctcgggctcccaaagtgttgggattacaggcacgaaccactgcacctagatttttttttttttttttttttgagacagagtcactgtcgcccaggctggagtgcagtgtcgagatctcggctcactgcaggctccgcccctgggttcacgccattctcctgcctcagcctcccgagtagctgggactacaggcgcctgccatctcgcccggctaattttttgtatttttagtagagacggggtttcaccgtgttagccaggatggtctcaatctcctgacctcatgatccgcccgcctcagcctcccaaagtgctgagattacaggcgtgagccaccgcgcccggcctgcacctagaattttatgtatttaacaaacattcatatagtgtttactacatgccagtcactgttagaaaagcccacgaacccatcttccaacaatgttccagtaaaaaggttaccactagcagaacttccttaaagcaacaccttgtttctctttttaaaaaacaacttttttttctccaatcaccaaagtaatacatgtttattgtagaataggaaaagcacaaagaagatggagcagggatttttctcccttgtttcccatagctctgatctggtttctctgtgatttgggattcgtgtgaacaggtgatgtgctgaggagcccgggacagggaatatgtaccttcaggaagtgtctgtcaagcagtttgtattctgattaacaggactttgagcacagggaatctgtggaatttttcaggagaagatacaccagctggaatggaagtttgctttagtttggggatttttccaggactatctggggttgcctggaacaggaacttcctcacttacctgctctgtggcctcaggcaagtcatggcttcctcatctggaaaatagtactaagcatccccaactcatccagttgtgggacacagtctttccacttccagcaatgtgtgcagcactggaacccctggttcattagcagaatgtaccctccttcacatggggttttggggctgagttcactgttcacaacagcgcagtgccttgggagagatctgagttcagatcctgatttcatcttcaaacagttgtcaagttcctttacatatttcagcttcaatttcttcatctgtccaaaatgtacctgtgttacagggtagttgggaggtttcgacaaaataatgtatgtaaaatacctagctgggtgtttacgcctaggaagttctcaggaaatgtgaactattatcatttatttcaggcctactttgtgcctggcatctcaggggaggaaggcgcaaaagtgaaaacaaagcctgggtcctgcccccaaggagtctgaagatttgttgataggtagattaaagtaaaagggtcttatgcactggagataggatcagagacgtaagaaaactgccaattcttgaggctccttataaaccaggttccatgctgaaagctttatatgcattatctatgagatttcttcacaatcctatgaggtaagtgctattaggattagaaaatcaaggatcaaagatcagagaatttaggaaattttgcctgggtcacacagctaataaagtgtcagggcctgggtttgaaccctgggatgtctgacttcagattctttgctccttccactccatttgagttggaccttgaaggatgagtcagatttgggcacatggggatggaggggaggaggggcctggaggggaggcggggcctgaagaataggaggatatggagccaggtaagcaaagcctgggagatgggaaagtgtagggcgtgtacggcagaaactctgagggttttgtgtgtgtgtgtgtgtgtgtgtgtgtgtgtgtgtatgtgtgtgtgtgtgtttgagacagggtctcgctctgtggcccaggctggagtgcagtggcacgatcttggctcattgcaacctccacctcctgggttcaagcgattctcctgcctcagcctcccgagtagctgggattacaagcacacaccaccacgcctggctaattttttttttttttgtatttttagtagagacaggtttttgccatgttgaccatgctgatctcaagctcctggtctcaagtgatccacccacctcggcctcccaaagtgctgggattacaggcatgagccaccgtgcccggcctgtttgtttattttgagacagtcttactgtgtcacccaggctggagtgcagtgacatgatcatggctcactgcagccttgacctccctgggctcaggtgatcctcccacctcagcctcccgagcagctgggattacaggcgtgtgccaccacgcccagctaatttttctgtattttggagagacagagttttgccatgttgcccaggctggtctcaaactcctgggctcagcagatctgtccaccttggcctcccaaagtgctgggttcacaggcatgaaccaatgtgcccggcctgaaactgcaagtatttagtctggttccatgtgagggcctcttcgggtccatttcacataaaccttagccaaaatatattaagtacctaccatgcacctgacatttctctaaggactttataaccaacaccttactaaggcctcacagtaaatggagaggtcacttgtgccgcctccatttcaaagatgaggaaattgagactcagaatggtccagcaacctgaccatgatcacaatgctaggaatgaatggggcaggaattcaagctcagggaggcagatttcagatctgtgccccacacctattgcaagaattagtcagttcccaggcagtgaaactctaaagccagccccagctgcccgaaactcaaccacagagagctggctctcagcccctcactggctcccttcttttctcccagctccaccctgccacccccatttccctccctggccctggggccctgctgcttccccaaacctgctctgccacaattccttccaggttccctcatctgtaaaatggggataataatagtgtccgtctcagagcagtgttgtgaggatcagaggaggggctcaaggtgcttagagcccagtgtatagtaggttctcaataaaaatcagtgatcatcgccaccactgtcatttaagtagtgtctctgaagtaatgtgaaattgactgagtgatagcattatccacatttgatggttgaggaaattgtggttaagagaagtgaagcagcggctgtccagtgtcacttaactaggaagtagagagcgggacttacttaatctgggcctcctgactttctgacttcagatctcattaacttctcctattctttgcagccaggcagatgagtgaatcataatcagtatttattacctgccttctgcactccaagccaggccctagatgctaaggggcattctagagagatctgacctagattcttgaaggagcatagaacctaactgataaacaaggtatgaaaacgaagccttgttttgttgaggtagaacacactaagggtcccaagagggtaagagccattctggctgagaggaagcaggcaggggaggcttcttggaggaggtgagatttaagctggccctcaaaggaccaaaaaggaccaatgagatacgtagactagagtaaaagggtcttatgcactggagataaggtcagagatgtgaccgggagcggtgactcacacctgtaatcccagcactttgggaggccaagtagggcggattgcctgaggtcaggagtccgagaccagcgtggccaacatggtgaaaccctgcctctactgaaaatacaaaaattagccaggcatggtggctggcgcctgtaatcccagctactcgggaggctgaggcaggagactcacttgaacctgaggcaggagaattgcaccgctgcactccaacctggtgacagagtgagactctgtctaaaaaaaaaaagtcagagatataacaacagctgccaattcttgaggctccttatgatccaggttctgtgatgaaagctttatatgcattatctcatgagatttcctcatgatcatatgaggtaagtgctattaggaggagaaaatcaaggatcaaggatcagagaatttacaaaatttgccttggtcacacaatgaataataaagtgtctgggcctgggtttgaattcggggctgttggctacaaagcctgggctcttaatcatcatgggttattgccaccttggcctcaaccatctaatgaggaattaagctgtggactgtctctggagggctttgaatgccaaggctcagacttgcataaaaatcacacagcaccaggcaagaaatcagacctgaaatctagcagcagcttctagcaactttttaccactcactacccaagtttgcttctctgagcctctctaaaccggagtgatgaggaatgtattatcagcaatgaaggtttttgaatgaggcagagaggctcttgtgacaaaaggattgtttaaaagaaacctagagatgttcaaacatttactgagtattgggtcctaataatacaactgtgaacaagacaaagctctgcagtgggactctgaccctgctgtgcccccaggcagcttgggagagtagaagaaccccttaactggaaaaacaagggctccagagctgggacctgtcccagattctgttgccagctctcaaatcagggaatctctctgtatgaccttgggcaagttacccagcctttcagactgtcagtctttatcatggggatcatcattcctcttcccaggattgttggaataaattaactaaaacaacgcttgtaaggatctagcatggtgcctggcatcctgtaggcgctgaatagatgttagttttccctacaaagaagtagactagtttgcctccgtccctcacccctctgccattaaagggaacaggttcctggccttcattttagcaggaaaggggatatgaatgcacatgtgctagctaagcaacaatgcaaactaacaaaagggcctgtggcctggggaatacactgctgggtctgggctcaggctgggaccccgcgccaaaatgtttcccttcaatcccagggaatccgggcccatttctcggggcgctgtgcactgctctggccgcctctgcactgtgaatcccggaaccaccctctgtctccgtctcgccggctgctaactagcgcggccggcggctggcggcaccaacagcaggtgtggctgcccctttaagcagcgaagctagtgttgcaatcgccgcctcgaggacgcgttctttccggggggggggggggggggtggagcctgtactgtcgcagcagccaaccggagcgcggcattttccgcgggagatccgaatttcgcggcacgacgtttggcgctaaaaaaaaaaaaaaaagaagaaaaaaaagaggcagagaaagactcaaggactagagagcgagccgcaaggaagtcggtgcagtcgagacccccctccccatcccagcgcatcgcgtctccgccgagcttgagggcacgccggggacccctccccagagccggccggaccccaggtgccgaggccttggggagcgcggggcgtcccgggtcgcggtgccctcgggacgagacagcccctggcagtgccaccaccgcagccgccgggcgatctccaagcggcgatctctaagcgctgctctctgctcggccgcgggccaggaggggagggtccggccttgccccgcaggcgtccattggcggcttcccccggcctccgcgccatgccgcgggccgtgtgaaaggcggcagcaccggaacccgcaggtgtccgcgggcgcgccaagcccttttgggtagggggcgccttactcgctatgctgcaagggccccgggccttggcttcggccgctgggcagaccccgaaggtggtgcccgcgatgagccccacagagctgtggccatccggcctcagcagcccccagctctgcccagctactgctacctactacacaccgctgtacccgcagacggcgcctcccgcagcggcgccaggcacctgcctcgacgccactccccacggacccgagggccaagttgtgcgatgcctgccggcaggccggctgccggtaatgctgggggcccccaccgcttccccctatgcttttccaggtgtgggaaaggagggaggggtgcctgagatccagtttgagtggagcaggtagagttttgggaagagggaagatgagctttcagtttccaggacccagtgcccccaatatctgagtagaagaccccttcattttcagactttggatgaaataatctcatccattctagtggagtggaatgagcactggattgcgagtctggagggagacccaactcactactcccagtgcactgtgtgaccttggggaagtccatgcagccagcgttgccgccattcattcattacttcattgtttggccagaaaccagtactgggtgcctgctattgtccaggcaaagagtatggcctggggacactgtgggactttggtaagacagagggataggtctagtgggtctctcacatccaatctgccatggacagactccaaattgtccagccagctcctgagatagccccaagtatctgccctaggtcctcccccaggcccagtcttccctcccagacagccatgtagcagatacaaatgtgggcagcccccttgggttctgttcagattggctgctctctcctcaagctcccaggctcgttgccagagagggcccaaagtgtagtggcaccaggctgcctgctgacctgggctcagggtgtgttttgtgggagtggaattcctggagcccgtgtgaatcaaaacaactttagggtggggggtggagtgggaaaagcctgggggagtggaggtggtggtggttgaggagcctggtttctggtgtgactctgccactaattctctgtgtgtccttggacaagtcttggacccagtctgggcttcagtgttctctccttcacaatgcgtgtgtgcacagggtggctgtggggctagctcttctcagccacattcagctccaggtcctgggttttggaagcaggctccagggagaggaagggggtgttgtaggtttgcttagttgtgagtttggtgaataagttcgggtacagggataagaccaccccccactgccccagaggcatctggtcagacctgtgctagtcagcaagcacggatgcccagccagctctggatgcaggcagagccaccactccctgccagtggactcaggctttgcccatgttcaaaacgttaaccttcctggagacccttcctgcacatgatttctaactaggagggcagtgggcaggaatggtattatccccattttacaggttaagcaaccgaggataactgggattgggtatcttgtgttcagtgttttatagcctaaaacatctttgtagttcgtgaaatagatggcattaatagctccatgttacagggggaaactgaggctcagagaggggatgtgacctaaggtcagagatggggatggggtagagtgatgggactcacaaggcagtcagctcttctgtcttttattttttattttttgtagagacaggggtctccctatgttccccaggctggtctcaaactcctgggctcaagcaatcctcttgcctcagcctcccaaagtgctgggattacaggcatgagctagctactctaatgcacctggtcaggcagcaggctcttctctatgtagccttgactttttttaatactgcctaacttaggagctgagctccccccagggaagggagctttgcggcaggcccactctcctctggccagctgctttcagactggaagtttcagtaacagctgtggttttacactgctttgaaccctcccagaggagcccaagtacatctgtctgtacctccctcccagaagggctcagtgatcttagcaagaaggtctctcttttactgagtgcctctcgtgtgccagacactgcttggcactcttcacgttcattatcttggtcaggatgtccagaatgaggcaccttgcagataaggaaactgagcaaagaaaggaagtcacttgcctgggtcacaagtgaagaagcaggggagtctccttgcagcagaccaccctaaagccctgccaggcccagagctcccgctcctgtcaatccccagatgcccggggcccagccccgtgggcaggcctgccctctgcttactcattttacaagggcgtgacctggaacagctccaaacccaaccctgggtgtggccgcttgctttgtggccgggctgcaaagtgcagggtgagcaggatttgttgtggagcttctgtttaaagggacctcaggcactgtccaaggatggcaaccaagttcaatggcagaatgaaggccacaacccagatctcctggctccctgtccagagctctttccaagtcctctgaggaaggctcagggaatgcccctttatcgcatgcctcctctggccaggcgcatggcatcattctctttcacgcctgcaggaagctctgcccaggctggcttgcaatagcgccatctctgctcactgcaaactccacctcccaggttcaaatgattctcctgtctcagcctcccaagtagctgggattactttttgtatttttagtagagatggggtttcaccatgttggccaggctagcttcgaactcctgacctcaggtgatccacccgccttggcctcccaaagtgctgggattacaagcgtgagccaccacgcccggtcctccttttctttcaatttgtctacattttccagatttcctcttgtgaggcatgaaagaaaataaacattttaacacacaactctacaaggcaggtcaggtgaggaggtgtaggctcagagaggcaagacagtgaatcccaggctgttcagctacgaagtggcagagctgggatctgaaagcaaggttcgaccccttacatttgctcctacccccaccatctgacttagggcttaggagagaccaggctccactctgcgtgaccttgggcaagtcaattcctcttccccaagtcccagtttcctcaccgtggtgcccgtaagggggttgtgcctggtgatctctgaccctctgcacttctgcagctgcctgaggaaggagctgtactcttctccataggggttggcagggtgggcttgcgtcctgaccaggccttgaagatccagccaaaggggctgcctaagagcgtccaggatagggctaagctggcctctggctgtggccatagcctttgctctcctcccctcatcgcagtctcttttcagctcacccttgaactttccccttttcccactggtgctccccatacatcagtgctagcagctccctggtgggggcactccctatgggcaaagcgctttgctgcactatctcactgaatcctcagcataggtggagacaatgatgcccattttataggtgacttgacgtcaactgatttcccagctaagaaggggaaggcctagatgcaaagccaggccagtctgactccaagacctgtgctcagcctcaccttgatgctgatcctcctgggcttgtcctctgccacctgtgttctgcaggttcagcccaagccataggctgactttcctctgggcactgtccaaaggtgtcagggaggtatccttagggggacacttgccgcattgggaccctgggagtgcagaataagggtgaaggagagtgagaaaagagagaaggctgtgtgtgtgtgtgtgtgtgtgtgtgtgtgtgtgtgcaagtacatgcagtgatgggggcaggtgggcgtagcccaggccttggcccaaattctagcaaatcctggggcagcgtgtgtgggatgcagctgaggcagcctggtacatggctttgcagtcagacaggcctgggttcaaaccctggctccggcctttgtgtgaccttgggcatgtgcttactctctgtaagtctccattttttggcttccgagagccagtgccaatactgatgtggtaggactgttacgagcatgtaacaggctcagcatagatattctgttcaaggtcttcctgggattctttctggtttgttctggcgggggagacaggtgtggctggggaggctctgggctgccccacctctgcctcaggtagaactccacctgagcttcccttcctctccctgcccttggtgctcctgctgggggatatatgaagaatactaggatgtgcagccttggtcaggattgatggaggcctcggagctccccaagcctcaattacttcagctgtacaatggggattagtggtatgggaagattcagtgaagtgatgaatgttggggcgtggttcagggcatgtggaaggtctcagccagtgactggccctttctctagtgacagcatggggctaaatctctagaatataggatttcaccagttaggaaggtagaaaaggaatattcaagagactcattcaagaatgagcagtaaagtgtttggatggtttccaggtctcggtagtggtggaaagcaagagtgttatatccaggctcctcaaaccaaggagcagggctcctcacatcagcccaggaagacttcctggagggggcaggagtgggggaaggggaactgacagcaggaagagctgtcaccacctccaacacctgtcagcccagctgtgctcagcagcagttagaagtctcagccctgctgagcatgacctcaccactaaatgttaaaataggcctctctgtccaagccagggtaggggtgtctgggggatccagagttggaaagaggaaagaaatgggctcgatgacccccagaaggatgtatgaaggaagaggtcgagattagattttagggaagggactctgtgtttcctgaacacctactgtgtgctgagacacaggctgagaactttacagaagttaaaggagcaggagctaaccagggtctttctcccacatgcagacagggagctaaataagtgcttcaaagggaagccacgcggggattaattcagcctgttccagggtttttaagatgcagaggctgcccaggtagtgccttccttgaatccttacaatagccccttgaggtaggcatttttaccccatttacagaggaagaaactgaggctccttagatgtgtaacatttcccccaacttgtaccgtgagcctgcgaaggagctggagattcaagcatgggtctctgacctatgtcccagtgtcccagtgccccagctctgcccctgccctgcccctgcccagccctaaccaggagagaggccctttccgggccagtgcagctctgggcctaattggggcccgggtggcaacagggtggagaggagcagatgggtctgtggtttgatttccccagcaggtgtttcccaagcttggcgggaacagaaagggggagctggagggggggggtggcctcagctgcttgtccttaagacacgggaaggattcattgtctgcccctctcggcaaagaaagaatggcaaatgcagtctattcaggaggccctggggccctcaagctggagcccaaacatgggggtggggatgtttgcactgcttcccactgtgggcacctccctgggttgtggcactgagccaggaagtcccctgggtctgggcggatgcccagccccgccctgataaggaccagctgtgggactgtgatgggcactcagtctagctgggccagctgcttctgtaggggggccctttccccaccctgatgtggtttaggccccacccactgcttcctcctggtatcatcctctgggtgtggtggggtgaggagcaggtataggagccggcttagggcccgtggttaaggagctctgagcccttggccagactggctttggtagggtctcaagtgcctgggcctcagaggatgggagttttatttgcccttcagaaaacaagatttcccctgaaagctcacttctcaggtcactgatgttttcctatcaagtacagcagtgcttcaccaggactggcggtaaactgaggcacagaggtggctgctaagtggcttcattgctttggccccacatcagggaaaggctaaaggaggaatgattctcaaactctgcctctctctcccccttttctccaaggccaaaaggaagctggatctggaggggattgggaggcccgtcgtccctgagttcccaacccccaaggggaagtgcatcagagtggatggcctccccagccccaaaagtaagcagtgctgatggggcctctggggtggggtggggcaggggcagagggcagtgccctgcccaatcactggtagtcatatttggatcactttccagtttacaaaagcttcctgcgtattttattatttgatcctgccaggtaggtaggcttgtctgtctttactaatcaggcaacttgagactcagagagcttgagtgacttgcccatagtctcagagtggagtcaggactagagcctggacatgtaaatcttgcattacttctgtgttttttttttttgttgttgttgttgttgttgttgttgttgtgagacaggtctcgctctgtcaccaaatgtggattgcagtggtgccatcttggctccctgcaacctccacctctggggttcaagcaactctctcacctcagcctcccaggtagctgggactacaggtacatgccaccatccctgcctaatttttgtatttttagtagagacacagtttcaccatgttggccaggctggtcttaaactcctgacctcaaatgatccacccgcctcggcctcccaaagtggtgggattacaggcgtgagccaccatgcccggccagtctcgcactacttctaccataccatgtactgctctcatgatctaaactcaatgaccagtgttttatttgggaatttattatttttaaaaagttttaatgtttaggtcaaggtaaatttttctaaatcagaagagcaggggctaaccagggtctttctcccacatgcagacaaggagctgaataagtgattcaaagggaagggaagcacagattaatccagtctctgccaccccagaggtttttaagatccagaggctggccaggtggtgccttcctaaagctaagttggagggggttgctgcctcttgatattttcagtcaatatcctggataggctgagcgtggtggctcacacctataatcccagcactttgggaggccaaggtgggcagataacctgaggtcaggagttccagaccagcctggccaacgtggtgaaaccccgtctatactaaaaatacaaaaattagccgggtgtggtggcgcatgcctgtaatcccagctactcaggaggccgaggcaggagaatcacttgaacctgggaggcaggttgcagtgagccaagatcgcaccactgcactccactccagcctgggagagagagtgagactccatctccaaaaaaaaaaaaaaatcctggttagagcaggagttaaagcaactgtgtttgggaggaacactagttttgggggtccaggtaggattctgctccgacctgacaggtcactcctgtgaaccttagttgttgtgaaccttagttgtcttgtgtaaaagaagacacagctagatcaggaatggcaagaaagtttcctctacatttgattggtcaaggctgcccagagcactgtcttgaaggatcctgaggctcatgataactggtcctcctccagaggaacctaagactctaaaattcaggttccagaattactggattggccactaacttgctatatgacttggaagtcactcgattacaaaagtcccctcgtggtttaagatgctgcagctgagatgtggtcttgcaacatcaacctcattgagaaagggacctttctcatgaacctccccgacttgatgttacaggaccgatttttctcagataatcattgtgattcacatgggaagaaaaagcaagtgtgtgtctataaaaatgctcttaaatccaggcttatcatttctaccctattctaattccaaactccggacatttaagtggcaggatagggtaatggttaaggaaaactctggagtcagactgcctggatttgaattccagctttgccactttctagctgagtgagctgagcaaattacttaaactgtgcctcagtattctcatctataaaatggggatgattgtacagcaacccttacagggtgttgtagggcttaaatgtgttcgtacatggaaagcacttagaacagtgacagtagttgtgggtggtggtctggcagccctaagctgtggtggaaatgtgcatttaaccaggagtcaggacactaggcttccaacactgcccattggccgtgagaccttaagcaagtcaccttccctcttaggtatcaggttccctgtctggacagtggtggtgatggatgccctggctcacactgctttgtaaactggaaagtgggtggtgaaaggtggtacttaatgagcctaggtcaatggacgagggtcctgggcgggccctcccctccctgagctgtgactgggtccctttcttcttcagcccccaaatcccccggggagaagactcggtatgacacttcgctggggctgctcaccaagaagttcatttacctcctgagcgagtcagaggatggggtcctggacctgaactgggccgctgaggtgctggacgtgcagaagcggcgcatctatgacatcaccaacgtgctggaaggcatccagctcatccgcaagaaggccaagaacaacatccagtgggtgtgagtgcctgggcggccagtggtaccctccaatgggtacttgtgctgtgggcggagccagaggcaatagccagtgggtgtgagtggcaggggcggggctgagagcaacatccaatgggcacaagggctgaggcggaccaagagcaacatccaataggcttattgctgggggtagagccaatgtatggtgaggaagagcgccgtgtacctgctgaagtaatcggagaacgtgatgcggggcagagtggagaatgacatctgggaggtgtaaaggccaaagggaaccccagattcttcctcttgagtcagagatcccaatatccacttcttctagcttagggcagtcccctgggagctgagtagggggatcccggactccttccagatctgagataggagtactccagcctcctctctccatttctacagggtttaaagagctgacctatagcccttggcataaatcctaagagaaaccaggcaggggagggagtcaggactgaggctactccagttggaggaggctggggcatagggatgaacagagtcgagagcccctcagaaatggggttcaggtcttgacttgttttttctcccaagcccaacccccaaacctctgcttccaatccctggtagctccctgagagacaggcatgaccactgatttccacaacccagggaagcaccctcatagactattttttgaatgaccttgttctggagtttcacccacagactgacactggggggctgctctgttcccagaggcaggggaatgtttgaagaccccaccagacctgggaagcagcaacagctggggcaggagctgaaggagctgatgaacacggagcaggccttggaccatctcatccagagctgctctctgagcttcaagcacctgactgaggacaaggccaacaagagatatcctccttggttgggggaaggtgtcagggagcaggaacctgttgcatgtttatatctatcctgagttgattcagtaacttaccctaagggtctggcatctgtttcttccttcctgggtggcttttcttctcaagtctatttttaaaattatttatttattttttttagagacaaggactcattccgtcatccaggctgtagtacaatggcatgatcatagctcgctatagcctcgccctcctgggttcaagtgatcctcccaccgcagcctcctgaatagctggaactacagtcatgtgccaccatgcctggctaattctttattttttgtatagacagggtctcgctttgttgcccaggctggtctctaactcttggcttcagtcgatcctcctgcctcagtctcccaaagtgctgagattacaggcatgagtcactgtgcctggcctcaagtttattaaaggtattttttcattattgaaaataagccaagtaaatttctttaaatctggaaaacggagaaaaagaatgatgagctgccaccttaacatagccattgttcttgaactgcacacagaatgtgttttatttcaatatagttgtaatgtagttgtgtgcctgctgaacatagctttttttttttttttttgagacagagtctcactcttgcccaggatggagtgcagtggcacaatctcggctcgctgcaacctccacctcctgggttctagtgactctcctgcctcagcctcctaagtagctgggattacaggtgcccgccaccatgcctggctaattttttttttttttttttgagatggagtcttactattgctgcccaggctggagtgcagtgccatgatcttggctcactgcaacctctgccccctgggttcaagcgattctcctgcctcagccttccaagtagctgagattacaggcgcctgccaccacacccggctaatttttgtattttatgtagagacggggtttcaccatgttggtcaggctggtctcgaactcctgacctcaggtgatccacccacctcagccttcgtaagtgctagggttacaggagtgagataccgcacccggccttcacacccagctgatttttgtatttttagtggagatggagtttcaccatgttggccaggctggtcttgaattcctgacctcaagttatccacccgcctcagcctcccaaagtgctaggattacaggcatgagccgccgcgttcggccgaatatctttatacatagaatgctttcccatatttttacttgtttcctaggtcagatccctaggattgaaatgatgaggtcaaagagcatggactttgctaaggctctttcatacattttccaaaatcatttcatatctaattggttttggatctgaccttgtatttttggaaggatgctaggcattgtgagaaatataaagaaataaaacacatcttcctgccttctcagagctaatgatctagtttgagagatgaagcctttacataaggcaacattttttatgatttataatgtaaggcaacattttttatgatttatattcccatttgctttccaaagggatctaaggtagcttatgagattaacaggttacagattgtattatttctaagttgtacaaggagtgagaaagtaatgttcagaggcttaggagaggtgggtgaaggtgctccctggcaggtttggggtttgaattttgaccagacagtcacttttcttgactctcctgccctacgctggcctatgtgacttaccaggatatccgtgctgttggcaactttaaggagcagacagtgattgccgtcaaggcccctccgcagacgagactggaagtgcccgacaggactgaggtgagaggggaaatatttggtggagagcagggttgagaccctgccagggagcgttccaggcggctctgcagactctgtccctggcactgcctagccccatgctttgcaggcccattgtggtgtccatggcaatattggtggccttcaagcttgggcagaaatggcagaagctggaaagggcaacggagactgagtagtggcctgagaaaatctctgttcctggtttctttctgcatcccaccagccctgggttcctgcgcacatgcacactcatgcccacgtatgacggtgtcaatactcatgaaaatcctttcatgctgaccgtgctttcccaggttaaagaccaaaattcctgacactccctatgaggcttcggtgctctgagaccccagctgacgttgccaacctccttttccccgctgccccatctgtctttgttttggccacactgacctgtctgcagtttccccattgcactaagctcattcctagtatgagatcttctgttttgtttgatttatttatttatttatttatttatttttgagacagagtctcactctgttgcccaggctggagtgcagtgacacaatcttggctgactgcaatctccgcctcctgggttgaagcgattctcctgcctcagcctcccaagtagctgagattacagatgcccgccactactcccggctaagttttgtattttttttttagtagagatggggtttcaccatgttggtcaggctggtcttgaactcctgacctcatgatccacctgcctcggcctcccaaagtgctgggattacaggcatgagccaccacactcaacctatttgattttttttaagacagcgtcttgctctgtcacccaggctggagtgcagtggcatgatctcagctcactgcaacctctgcctcccgggttcaagccatcctcccacctcaccctcctgagtagctgggaccacaggtgcatgccaccatgcctagcacattttttgttttttttgtagagacgaggttttgccacgttgtccaggctggtcttgaacttcggcatagaagtgatttgcccgccttggcctcccaaagtgctgggattataggcgtgaaccaccgcacctagccgtgcaagaccctcatacatgctcttcccctcgagctgaaatgttcttccctctctgcctgatttaccgctattcatcctacaggtctcaactcaaatgtcacttcctcaaggaagccttctctgattacctccagacttcataaacacctgtgcttttccgctgcctttaatttaatctccatttgctgaggtatatttggcatgattacacgattgcattctgcttcatctattagggtgtaagcttcacaagagaatgttctactcaccttgtatcccttgcccagagcctggcatattataaggactcaagaaataatttatttaaaggaagaactggggctgcagagacaattaaggtcctgcccccacccttggaggagttcacgacttagtgggaaaaagacgctgtcatttatagactgaagatgtgctttgcaagcatagagaaagggtagttagaggaggtatcccaggtggggacagttaaactaggtcttaaagaatgaatagggtttttgctaggtgcagttctgtgtgagtacaggcatggagacctggacatgtgcctggatggcatgcatgtcatcagttgtggcttaagttgcggttatgtggtagggaagggacagggtgggaagaccaaatactaggactcttggttacaggtaacagaaagccaagtccaactggcttcagcgggaggtatgggtaggggtggtgggaaccaaatgacaagtcctgggggagattcagagattgctggcaaggttggatgtagatgctcaaactatgacttcaggtctgtctcacgcttttcatctctctgcttttctctgtgctgactccattcccaggtgggctctctccttgtggtggtagaggtagcttttatgataccagctcagcaaccccagtgggaagggggcttccatttcccacaagtccagcaaaagtcctgggcctagtgctggttggatccacctgagccatgggccatcctgaaccaatcatgtcacactaactttcctggctgcgtcacaagctcacccactggcattggggaagggtgctgcccccccccccccgccccaaaactagatgacctgagagtggggggaagagtgatttcccacaggaaaatcaaggtgttccccctaaaagaagtgggcttcagggccagacagcagaaacagcggaagtccaccttagttaggccagatggagttggtctcagtgccagcccagggtttgagcttgcacccatggatggcagcagccacgtgcgtctgtccatacacactaagtgtaagtgtccagctgcccagagcaatgacctggcttctcttcctcctccaggacaacctgcagatatatctcaagagcacccaagggcccatcgaagtctacctgtgcccagaggaggtgcaggagccggacagtccttccgaggagcctctcccctctacctccaccctctgccccagccctgactctgcccagcccagcagcagcaccgaccctagcatcatggagcccacagcatcctcaggtaggtcccttgtccagagggacaggaggtggggggagagaccggccttagttttctcttctatatcaatgtttgttgaaaacctcctgttttatccagcagctggggatgtagtcatcctaccccacacatgtgcattgtacttaatgctttataaagcctcactaggaaggctggtgctgctccagggcagaggaaggcctggatttgaatcccagcccatccacttaccagctatgtgaccttagacaagttacttaacctctcttggcctcaatttttctcatctgtgagttgggcgcagtaattaatactgtctaactcataggttgttgtgagattatatagctcacgcctataatcccagcagtttgggagactgaggcaggagaatcatttgagaccaggagttcaagagcagcccgggcaacatagggataccctgtctctataaaaaaatttacaaattagccgagtgtggtggcacacgcctgtagtccagctactcgggaagctgaggtgggaggaacacttgagccatggaggttgaggctacagtgagctctgatcatgccactgcactccagcgtgggcaacagagggagaccctgtctcaaaaataaaaataagaataaaattttaaaaaataggccaggcgctgtggtccccacctataatcccagcactctgggaagctgaggtgggaggatcacttgagcccaggagttcaagaccagcctgggcaacataatgagactccatctctaataaaaataaaataataaaatttgcccattaaaaaaaaaataagacatagaggtgatgtgtcttacctaaggtctcccagctgggaggcaacagagctgtgtcttgaaccttggtctacatactcccagcccagtgctctctccacaaggcatagatcaaatcgaagaaggggcttctggctgggaggtggacggtatggttaagagctggctacccctgatggaaggtagtacaggtaagttgccagggagcaaagttcctgagagcttcccaaggagggtgggagtccagaaggagtacaaatggaagcctgtaaaggcccctctccagaacagtttttgccttttcctggatcacacatccggctagactggcaggattcttcaaggctatgtaggccagtgttccactttttgtcttcttagcagcagaattctcttaagtagaaccctagcgtttagaccaaggtagaggtagagctgggctgatggaagaggcttgctggaagggctctgcagtacactggttgtgtccatttctctaactcagaggttaataaactattgcctgcaggtcaaatctgacctgcttttaatgacccatgagctaagaatggttttacatttttaaagagttgtgggagaaagaaaaagaaggcaactatgtgacagagaccacaagtgtcccacaaagcctaaaatactctccagcttttttttttttttttttttttgagacagtctcgctccgtcaccaggctggagtgcaatggtatgatcttggctcacagcaacctctgcctcctgggttcaatcaattctcctgcctcagcctcccaagtagctgggattacaggtgcccgccatcacacccagctaatttttttttttttttgtatttttagtagagacagggtttccccatgttggccagcctggtcttgaacccttgacctcaggtgatccacctgccttggcttcccaaagtgctgggattacaggctccagctctttatagaagtttgctgtccccaactaactcaacccttcttttaacacatgaatgaacacaggcccagagagggcaagtggcttccctaaggtcacacagcaagttgatggcagagctgggaccagagcccagcctcccaactcttctctaatgatctctcctgtgtctgtcaggcctcatcagggaccagagcttctccctgtgctagccatctgtcccttgggacacctccccagtgcctatctcccatcccagacctctgccccaccctctggtccatcctcctcctgctgtgcctcctcactcaagtgtcagcatgcgcatagccctccgaagctggaaccaccttcgcttcagttgtcctctgagaccttgggtggaggtggcagatcccaaagcataaacaagggtgtgaagttgtttttttttttttaagacagagtctcactctatcacccaggctggagtgcagtggcacaatcttggctcactgcaacctccgcctcccaagttcaagcaattctcctgcctcagcctcccgagtagctaggagtacaggtacatgccaccatgcccggctaatttttgtattttcagtagagacagggtttcaccatgttggccaggctggtctcgaactcctgatctcaggtgatccacccacctcagcttcccaaagtgctgggattacaggtgtgagccaccgagcccagccgggtgtgaagtttttacctgagttttacaaatcaagatcctgaagcccagagaggagcagaggcttacacagcagtctggtggggccagctctcatgtcatggctgtccccacgacccttgtcacatggcctcatagtattatccctgctgaagggaggaggaggaagttttcctggtcttggctcactgcaacctccgcctcccaggttcaagggattctcctgcacagacacacacacacacacacacacacacacacacacacacacacacacatgttccgtgctgtgttctgaaatagtatcattttgaggtctgagtgccagaagccatgtaagagaggaagccactacagtcttgggacctgggtcctggccctggttctgcattaccaggggaagtgttctctgcagcctcagtttccctcatctgtaatggaaggggtttcaacaacatcatctctgacatttctccaggctctgacattctgagatacacctaaatgtagctgatggcacaggatttgaaattgggagacctgtgttcaagcctgtatctcacttcttagtgacttggtgactgtgagtgaatcactttaaccccccaaagccccagttcccacatctctcaaatggggacacttgaaatttcctcatgaatattgaatgggttatagaagatgacatggcataaatgtgatttaaaaaaaaaaaaaaaaaacttatgtggccagccgcggtggcacacacctgtaatccagcacttggagaggccgagggaggtggatcacttgaggccagaagttccagaccagcctggccaacacgatgaaaccccgtctctactacaaatacaaaaattagccggaggtggtggtgcatgcctataatcccagttactcaggaggctgaggcacaatagtcacttgaaccaggaaagcagacgttgcagtgagctgagattacaccactgcactccagcctgaccgacagagtgggactctgtctcaaaaaaaaaaaaaagcttgtgtgaagagcatctactgagctgggcctggtgctgttttagagacagaaaagcagtaagagccattcagagtgtggtggagagacacatattacaaaaggcgattctatttctggacgtgatcaacagcaggagacagcaaggtctgacctataatagagattttcacatgtgttttatcagttactgcttctaatactcatccctgtttttccacatgaggaaacagagttctggggttccatggctggtgagaggaggcgctagagtctgagcccacatgctccccgctcccaagccaggcctctgactgtaacatcagcagcgtgccaaacaaaccttagatttttttttttaattaatatacatttaatggacttctttgggccctagttttctcatctgtaaataggggtaacagcatggactccctcagggccatttgagtgtgcaaggaggctgaaccacgcctcgcctcaagggcagtgccaccacctcccccattagccttggtaaatgggagcaatttttaacaggagcaagggcagcatgcagacccgacaaaccagtgcttatttatttatttgtttgtttatttatttatttttattttgagacacgagtctcgctcttgttgcccaggctggagtgcagtggcgtgatcttgcctcactacaacctccacctcctgggttccaatgattctccttcctcagcctccctattaactgggattacagatgcctgccaccatacccagcgaatttctgtatttttagtagagacggtgtttcaccatgttggccaggctggtctcgaactcctgacctcaggtgatctgcctgcctcgccctcccaaagtgctggtattataggcatgagccaccgcaccaggccaaaccagtgcttcatatgcacttaccatgcggtcctctgagcaaccctttgaggtaggtagtgctatgctgccccatgcagaggggagaaaatggatgctctaaaacgtgaagtccagagcaagactccatctcaaaataaattaaataaataaataaaatgtgaaatcacatgcctatgggtgcaccaccagtctcaacaggcagcctagcatcccagcgcagttgtatcttcagaataatacttggctggggcttaaggagtgactgcaatgtgggggattctgagcatcaggatatatgtggcaggcaatttccagtgcttcattgcatgtccctgtatgggaaatcaccgtcttaacatctaagtggaaatgagcaggttgggtgtggtggctcatgtctgtaatcccagcactttgggaggctgaggcaggaggattgctcgagcctgggagttcgagaccagcctgggcaacagagtgagaccctgtctctacaaaaaagtttaaaaattggatgggcatggtggcacgcaccagtggtcccagctactcaggaggctgaggcgagaggattgcttgagcccagaaggttgaggctgcagtgagccgtgttcaccctactgcactctgtactctagcttgggcaagaccctgtttcaaaaaaaaaaaaagaaggcggcgagaaagaaatgagcatagagtgctggagaatggctactgaaaggtcaaataagatgaagccagagaaatgaccattgggtttagcagcatggatgtcactggctcagggacatggtggggagagaccccagactggagtgagttgaagagagaatagtaatagggaagtggagacaagctgaggctactctggagaaagtttactgtgcaaaggagcagaaaaatgggccagtaattggagagggtgatgaggtcaggtatagttgtgtgtggtggagagtagaggcaacataacaaaaatttaccatcataactatttttaaatgtacagttcagtggtaattaatacattcataatgttgtgtaaccatcaccattcatctccataactcctttcaccttgtaaaactgaaactctgtacctattccccattcccctctctgcccagcccctgacaaccacccttctactctctgtccctgcgattttgactaagtatctaatgtaagtggaatcacacagtatttgtttttttgtgattggcttatttcacatagtttaatgtcctcagggttcatctatgttgtagcatgtgtcagaatttctttcctttttggccgggcacagtggctcaggcctgtaatcccaacactttggaaggccgatcacttgaggtcaggagttcgagaccagcctggccaacatggtgaaaccccatctctactaaaaatacacaaattagctgggtgtggtggtgcatgcctgtagtccagctactcgggaggctcaggtgggagaatcgcttgaacctgggaggcagaggttgcagtgaaccaagatcacaacactgcactctagcctgggtgatagagtgagacccggtctcaaaaaaataaaaaatacatgaaaagttgtagggttgggtgtagactctggaaggtggattttgagagcacgacagtccacccaggctaaggagagagaagaagggtgcagtcatccagagaaccggaagtctgtcctcgcgtgctgaggagttggatgctagggccaggcgtaacctttgtctgtttgtctccagtgccagcaccagcgccaaccccccagcaggccccaccgcctccatccctggtccccttggaggctactgacagcctgctggagctgccgcacccactcctgcagcagactgaggaccagttcctgtccccgaccctggcgtgcagctcccctctgatcagcttctccccatccttggaccaggacgactacctgtggggcttggaggcgggtgagggcatcagcgatctcttcgactcctacgaccttggggacctgttgattaattgagtggccctgcctgcccccagcagcctgcccccgactctacctcctcacagacaggctgacagcccctctgcctgcacagggacattggacactaggtgctgccctcagggcatggggtctcctcgcctttcctgccccagccggcagaagctgtgtggggagatatgaatggtacgggtgaggagtggataaggggtggtcctcaccttcctaatggaagctgggcctagggaggcccatccagtcttctgacttctgacctctcacaagaaggctgcaggtgaggtggccaagtccagggaaaggccctgctacctccttttgaggggtaattaggaccctcgacgtaccaagaagcacataatgcctttgtatttatttcaggttgagttgtttgtttgtcctccctgagttttagcagggaggttgttctagtttttagtgagacctctgcagacaggcccatcactgtccatgttccagggcaggtctgggtttccaagggaggggcccaggctacatccttggtttccccactgtggtgggggctgggactctgaggggctgtccagtctgctagaatgctaattgcacttaggcctcatggttctagtaaacggcagctgtgggcccttttgcctcttcccctgttcttggcctcacatctccagctgagctgccggtcttggcttcctggtcgcctctgtcccagagatggtcccagggagccatcctagggcaggtagcactgaggctcctgtggaaacaggagccacctgctcaggagacccctttcctgaggaagtccttacctctccccttgagatgtaaaaatggtccagcagagacaagctcccgtggaaaacagacaggagcatgggggcagctgtcatggctgtggcgggcacttttcctcagagtttctgccttgcgctggtccaggagccattttgcaccaaggacttggtaggcagaggcagccccactgtaaagaagggtcagattaaaacaaaaaactgccaaaagcatcccctctgccccccatgtggcactggcatcattctctgcttccctgggaggaattttttcaccatgttattgaaggggatggttcattaaggactccacccctcagagctcactcagaccccaaggacagaggtgactggggcttggtgacttgttcactccttttttcccaggtatactgaaggggtgacagagagaggtcttcatggcagaccaggccttcacagctaatggggagaggaactcatgttacctctgcaggcctggggtcctgagggggtcttttggcttcagcctgttcccccagaggcttgatcatcccacattgtcccttcagctcagctgctcttctcccccacccaccctgggatgtgggtgctctgggctgaaccaaggctatgacttctggagagaggctcaggggttggtctgagaggcctgccatccacccctcagggagctaggttttctcagaggctcagctggacagcactttttagaaaagtttgtagcattaagctggtttaaaatatgaagttggttttgttggatggctcctgagctgactgactgatgtctgaagtttgagacgagggattatttcagggtggggcccaatgtgatctaatgcccagctggggacaattgtgcctcatcatttgctcaaattcctgggcccccaagttagccccctcccaggagtggtcagcgggtcacagctgcccccactctataagcagggctaattgtgtaccctttgcagaaatgcttttggtctcctacccaaatactcacaagggtcttatcagacgcccgtcttaaagtccagcatgctcagggaccctgtgtaggatctcgtttgtggtgagtgggctgctctgaggtctccactgggctgccatttagccatgtgccatctctgaagtcagaggtgtttgactcccattccttgggctctggagctttccccaagaattacatcagagaaaaggaagaaggggcctgcaggacccattgggaatgagtttaatactgaagtctggaatgtaagctcatgccctagaggcctctccatatggctggtcaggggagctgccttcaggcttgtgccccgtgtgctcagcagctgcctctgtccccctctactgtccctttcacaccttgcctggccaaggggctagacctcccaggctaagcctcagattcagtgcaggacacaagctcatgcccccgtcttgccagtgacacttgaagcctcccgacttccacagagtgcttcaggacacattttgagtggtattttcttttctttttttcttctttttttttttttttgagatggagtctcgctctgttgcccaggctggagtgcagtggcctgatctcggctcactgcaacctctgcctcccaggttcaagcgattcttctgcctcagcctccagagtagctgggactatagacatgcaccaccacgcccggctaattttgtatttttggtcgagacggggttttgccatgttagtcaggctggtcttgaactcctgacctcaagtgatccaccacctcggcctcccaaagtgttgagatgacaggcacgagccaccaggcccagcctgagtggtattttctttagggaccaggtagactttaaaacgagggtaagagaaaagccagtgtctttctgaggtaaataatttctgccaggaaacttcccagccccaccagcagcccccctaaaaaaatcactcgtgtccccagggacttctaaagcttggggctccaggaaatcatccagtagagttggagattcagagatttcttgaagccagggacatgctcctaactcctttcccattaaaggtgttagaatagaccagagggtgtcccttttccacagtaatgggatcggctggtgtgccttcagggaggaagagggaggtggtcaagcttgaaaaactggctttaggatggttctgactttgttctccctccccaagtgttctcaacctccattctgcagtgttcagagttttagggaaagggtttgggtgccccagcatccaggtgttgtgtggcttagcgcatgtgaagtgaaaaccttctggggttgtttggaagcagctttctggttcttgtgattgtatcctgaggtcccagaaccctattctcccacgaggatcctcagtgaccatggtggccacacgcctggccagcctgctggctcctgggtgagctgaagaaccttgcctgtggcacttttcgagggtgagctggaaccgagagaacatggtccccgtgctgggactcatgcgggtcatttcctgccggcctggtttcgcctggtcgtgtctttatgagcaccatgtaagcctccttgtattgagataattgggcattaaacattaaactgcagctctgggcatcttgtctttgtcgtgctttctgaagctcattaccaactgtggatctggtccccgcaggctgggtgttgggggctgtcctggccaatgctgggggcacatgattgcccagtggatttccctccaagatacagtctcttatcaccatgcctgcaatctcaccattaaggcactgaaaagttcgcagcacccagatctaaaatgtgatcagccctgactctgtctcccccatctatttccacagcttcctgaaaggtcttgctgcccacactctccctcccaccctctacatcagtgggtccaactgtagtcctcagaccagcagcagcagtatcacctggaaatgtgagacatgcatattcaagaccatgcctcacgctgggtgcggtggatcacttgaagttaggagttcaagaccagtctggccagcatggtgaaaccccatctctgctaaaaatataaaaaaattagccgggcttggtggcgggtgcctgtaatccaagctactgaagaggctgaggcaggagaatcgcttgaacccaggaggcagaggatgcagtgagatcacaccactgcactccagcctgggctacatagtgagactctgcaaaaaaaaaggccaggtgcagtggctcacgcctgtaatcccaacacttcgagagtccaaggcgggcggatcgcaaggtcaggagattgagatcatcctggctaacacagtgaaaccccgtctctactaaaaaaataaaataaattagcgggcatggttgcaggcgcctgtaactccagctactcaggaggctgagtcaggagaatcactttaacccaggaggcagaggttgcagtgagccgagatggcgccattgcattccagcctgggcaacagagcgagactccgtctcaaaaaaaaaaagagaccttgcctcagacctgctgaataagaaactcatggggcgggactcagtattctgaggctccatgaacctcccaggtgagtctaatgcagctgaagtttgagaatgcatgccttctgctgccccagagagatctttctacacttgatcttagccaaaaggctgagaagcgatccccagaaagatctttctaaaatgtagttctaatcgcgttactctcctgcttaatgcccatccatggctcctctctgccctcgggatgaagttctaacccttttgcatggtataaatggctatttacaacttccaactggcttcctctaccttacctgtggcctccctggccaccctttcccagcaccattgccacactgggcttccttgtcatttcctgaaatcgacacgtcttccctcttctgggcctgtccacatgctgttccttccacctaggatgccctgtgctccatttgagctgagtgggtgcctacttattcttgaaggcccagttcaagaatctttttttgtagttttctttctttttttttttttttattgatcattcttgggtgtttctcgcagaggggtatttggcagggtcataggacaatagtggagggaaggtcagcagataaacaagtgaacaaaggtctctggttttcctaggcagaggaccctgcggccttccgcagtgtttgtgtccctgggtacttgagattagggagtggtgatgactcttaaagagcatgctgccttcaagcatctgtttaacaaagcacatcttgcaccgcccttaatccatttaaccctgagtggacgcagcacatgtttcagagagcacagggttgggggtaaggtcacagatcaacaggatcacaaggcagaagaatttttcttagtacagaacaaaatgaaaagtctcccatgtctacctctttctacacagacacggcaaccatccgatttctcaatcttttccccacctttcccctctttctattccacaaaaccgccattgtcatcatggcccgttctcaatgagctgttgggtacacctcccagaccgggtggtggccgggcagaggggctcctcacttcccagtaggggcggctggccgggcggggagctgacccccccacctccctccgggacggggctgctggctgggcagaggagctcctcactccccagtaggggcggctgggcagaggtgcccctcacctcccggacggggcggctcccgggcggggggctgacccccccacctccctcccggacggggtggctgccgggcagaggggctcctcacttctcagacggggcggctgccgggcggagaggctcctcacttctcagacggggcggctgccgggcggaggggctcctcacttctcagacggggcggctgccgggcggagagtctcctcacttctcagacggggcggctgccgggcggagaggctcctcgcttctcagacggggcggttgccgggcggagggtctcctcgcttctcagacggggcggccgggcagagacgctcctcacctcccagacggggtcgcggccgggtagaggcgctcctcacatcccagacggggcggcggggcaaaggcgctccccacatctcagacgatgggcggccgggcagagacgctcctcacttcctagatgggatggccgccgggaagaggcgctcctcacttcctagatgggatggcggccggccagagacgctcctcactttccagactgggcagccaggcagaggggctcctcacgtcccagacgatgggcggccaggcagagacgctcctcacttcccagacggggtggcggccgggcagaggctgcaatctcggcactttgggaggccaaggcaggcgggtgggaggtggaggttttagccagccgagatcacgccactgcgctccagcctgggcaccattgagcactgagtgaacgagactccgtctgcaatcccggcacctcaggaggccaaggctggcggatcactcgctgttaggagctggagaccagcccggccaacacagcgaaaccccgtctccaccaaaaaaatacgaaaaccagtcaggcgtggcggcgcgcgcctgcaatcgcaggcactaggcaggctgaggcaggagaatcaggcagggaggttgcagtgagccgagatggcagcagtacagtccagcttcggctcggcatcagagggagaccgtggaaagaggggacggggagagggagggggagggggagggggagggagagggagagggagagctttttgtagttttcttgacattaacgtgtaatcattaatactttgtacatggatattgttatagcttactgaatattacatgttgggcactgagaagataaatatgaataagacctagttcccattttcaggatgctcacaaaacacaaacacataaaaatataattataaataatgtaacaattgtagtgactggtatacattacaggagttggtgggagggggttggtcattttggaaggtttcctggccttcatacaccataatctcatttaatgctcacaacaacctcaggaaatcagagttactcttattcccactttatagatgaggaaacactcagaagttcccaatacattgttgaagttcctcatacattgttggggatgtaaaatttgtagccactttggaaaagtttggcagctcctcaaaaagataaacataaaactaccataagacccagtaattttactcctaggtatagaattattcctacttgcagtaggatcatttctgcttcaagataaatgaaaacatatgtctatgcaaagacaagacttggacacaaatggttctagcagcattattcgtaatagccccaaactggaaatacctaaatatccatcaactggtgaacagaaagacaaaatgtattagattcatacaatggaatactattcaactatatagaggaatgaggtactgatacattctacaatatgatcctcaaaaacatggtgctaaatgacagaagcgagtcacaaaaaatcacatatgattccatgtacatgagacatgaagaatagaaaaacctacaaagacaataagtaggccaggcgcggtggctcacgcgtgtaatcccagcacttggagaggccaaggcgggtggattacctgagctcaggagttcaagaccagcctgggcaacatagtgagacctagtctctacaaaaaacaaacaaaactagctgggtatggtggtgcatgcctgtggttccagctactttggccgctgaggcaggagaatcacttgaacccaggaagcagaggttgcaatgagctaagatggagctgcactccagcctgagtgacagagtgacaccctgcctcagaaagagagagaagaagaagaaagaagaaggaggagacctgaggtcaggagttcaagacaagcctggccaacatggtgaaaccccatctctactaaaaatacaaaaatcagccaggcatggtggtgcatgcctgtaatcccagctactcgggaggctgaggcaggagaattgcttgaacccgggaggtggaggttgcagtgagcagagatggcgccactgcactccagcctgggtgacagagcgagactccatctcaaaaaaaaaaaaaaaaaggaatgaagttggacccctaactcacaacatatacaaaatttgactcagaaatgaatcaaagatctaaatatatgagctaaaactatacaacttttaggaaaaagcatagacataagtctttgtgaccttatattaggcaacaatttcttacttttttttttttttttttttgagacaaggtctcatctgtcacccaggctggagtgcagtggtgtgaacaaaactcacggcagcctcgacctcctgggatcaagcaatcctcctgcctcagcctcctgtgtagctgggactacaggcacttgcctgccaccatgcttagttaatttttaaatttcttatagagacaggttcttcctgtgttgctcaggctggtcttgaactcctggcctcaagtgatcctcctgcctcacctctcaaagtaataatttcttaaatatgacaccagaagcacaagtaacaaaaggaagaaaatagataaattggacttcattaaaatcaaaagcttttttttttttttttttgagatggagtctctctctgctgccaggctggagtgcggtggcacaatctcggctcactgcaacctccacttcccaggttcaagtggttctgctgcctcagcctcccaagtagctgggactacaggcgcttgccaccacgccaggctactttttgtatttggagtttcaccatgttggccaggatggtctcgatctcttgacctcataatccacctgcctcagcctcccaaagtgctgggattacaggcgtgagccaccacacccagcctaaaattaaaaacttctttgttgcaaaggacatcatcaagaaagtaaaaaaccaacctacagctaattgtttgattttttttatagagacgaagtctcactatgttccccaggttgatcttaaactcctgggttcaagtgatcctcctggcttggcctcccaaagtactgagattataagtgtgagccaccatgcccaacctatatgatctcacttacataaaatatccagaataggcaaatttatagagattcatggttatttaaggttgttggggaggggagaagactgctaatggacacagagtcttatgggggtgtgattaaaatattctaaaagtgatatggtgatggttcccgggtattcttatttagcaatcagttcaacccttcacattaacaagttaaaggaaaaacccatgtgaccatctccatagatacaggaaaaacacttgaaaaattcaacactcattcacggtttttagaaacctgatagctaaataagaatacacaggaattactttccacagcaaatatcaaacttaatggtgaaactttagaaatgagagaaggacatccagtatcattcctacaaatcaacatcgtattagtgatcccggacaaagcaataaaacaaggaataagaaaaaagcccctgccagtctgtttcgaacttatgcaattaactacaatgctgtcctgaacaagtgccatttatttatcagacatttattgggcatctaccctgttccaaggtggggtcataagtactgctccctccttgtcaagggtgtttacctgccttaagaaattgcttcctctttccctgggtggccaaggcctggcaggtgtgcgtctgcagcaggattcttttttttttttttttttttttgagacaaggtctcactctgtcacccaggctggagtgcagtggcacaatctcggctcactgcaaactctgcctcccaggttcacgccattctcctgcctcagcctcagctactgcctcagcctcccgagtagctgggactacaggcgcccaccaccacgcctggctaattttttgtatttttagtagagacggggtttcaccgtgttagtcaggatggtctcgaactcctgaccttgtgatccgcctgccttggcctcccaaagtgctgggattacaggtgtgagccactgtgcccggccgcagcaggattcttgaggtgcctcaagctctgagttgcagcagggatagaaaaccagacctttcgggggttctaactgagagtttcaaagtgctcaacagtgtgacaatacttttttgttttgtatattaagctgtttactttgcttgtagatccttccacagatcctggaagagagaacaggtaatgaaactgaactttggaaaatctaagatactgagaaccataaaaagaaccaaaagggctcttcactcatttgttcatttgtttcacaaaacttttcctttttttttttttttttttttgagacagagtcttgctatgtcgctcaggctagagtgcagtggcacgatcttggctcactgcaacctccacctccagggttcaagaaattctcgtgcctcagcctcctgagtagctgggactacaggcgcccaccaccacacccggctaatttttgtatttttagtagaggtggggttttgccatgttggacaggttggtctcaaactcctgacctcaagtgatctgcttgcctctgcctcccaagcaggagggattacaggcatgagccactgagcccggcccacaaaccttttttgagcatctactatgcgcctgcctctacctggtgctagggaaaccatgccccctcattttatggagcttacagccaattctaattcaaaccacataaagcttatggatttgaacatatatttagacaaacacctttgagcctctatgtgctggctgggtagatcccaaactttagcgctcatcagaatcagagggcttgttagagtacagcttgctgggctccatccctagaatttctgattcagtaggtcacaggtgggacctaaaaatggacatttctgggctgggcgtggtggctcatgcctgtaatcccagcactttgggaggccaaggcaggcagctcacctgaagtggggagttcgagaccagtctgaccaacatggagaaaccctgtctctactaaaaatacaaaattagccgggtgtggtggcgtatgcctgtaatcccagctacttgagaggctgaggccagagaattgcttgaacctgggaggcggcggttgcggtgagctgagattgtgtcattgcactccagcctgggcaacaagagtgaaactccatctgaaaaaaaaaaaaaaaaaaaaaaaaaaaaaaaaaaaaagggcatctctaacaagctccaaggtgatgttgagaatactggtcaggaggaccaccgcaccagataacatgcaatgcccacactgggattcagacattgcaaaatgtaaaaaagaaagaaaacaatccttattcttgaggagctcacagcccagtggattcactcacttgctcattcatttattcaacaaattagggcctcgtgtgcataacatcatttagcttccggccaagcgtggtagctcacacctgtaatcccagcactttgggaggcagatggatcacttaagcccatgtgtttgagaccagcctggacaacatagtgaaaccccatctctacaaaaaatacaaaaaattagccaggcatggtggtggcctgtagtcccagccctttgagaggctgagctggaaggatcacctgagcccagaaggtctagggtgcagtgagtcataagcatgccactgcactccagcctgggcaacagagtgagaccccatctcaaacaaccaaaaaaaaaaaaaaaaaacacaaacaaacaaacaacaacaacaacaacaacaaaatcatttattaggttggtgcaaaagtaattgcggtttttgccattaaaagttatggctaaatggtttctggcaaaaccctataaagtaggtattgttattagccccatgtttacaaatgaggaaattgagactcagagaggttgggcaatgtgtacaaagtcacacaacatgtgatagagcccaggccatgcagccccaggaaaccctactcttaacctctagccaaacttcatgtcttataaatatgtcgtttaataaagtgttataaatgccaccatcaaggaagaatagaatgctctgggagctcggatgggctccatctatggaaagatggactcagagagggttggggatggggcctgaaggagatgcttgccgaaggaaagaaggggagaaggctgcacagcaggcagaaggagctgtttgggaaaaggccaggtggctccatggttaaaatatgtagaacagggccaagtgtggtggctcacgcctacaatcccagcactttgggaggctgaggcgggaggattgcctgagctcaggagttcaccaccagcctgggcaacacggtgaaaccccgtctctactaaaatacaaaaaattagccaggcgtggcggcgtgtgcctgtagtcccagctactcaggaggctgaggcaagagaatcgcttgaaacaagtgaccacagcaaagggtgaccagcaggatgcccagtgtatctgttggctagtggttgtgttgacccagttatggccacacaccccttcctggagcgtgtagtccctcaattaaagggatccctgaccactcgaactgtttgcccggtcagcgctagctaggcctctgcccaggcaggttattttcccagcatggggaccactgccctctgctggccactctgccaaatgcagaaattgggaaaagctaccttttattgagatctctttagtgaccaggttttattctatgcaatcttttcaaaaaccttatagaataggcattattattgccagtgaggctcaaagaggtgaatttacttatgtgaggtcacacagctagtaagggtgagcaagagaggcacttcacctgcctcaccctagtcccggtcctggtgatacaaccagactgcaacgtggccatctaagctccaagggccatgcttgtgacttccatgtggtccagcctcctaactggcattatgggggctccattctgacctttaagattttctgtgtgtgtacactgccagattctggggaaacaaagacacagtcttttgcccacaaacagtttgactagtggtccctcaaatataaactgtgagaagacacctggcttcaggagcagcaaagaaagcacgatttgcatgtgtgtgtatttggtattctaaggaaacaggcccttggggaagcctgtaggcagtgtcccagccacagggaatcctcttcccagacaatgcgtgccctaaggccagcaatcccctatcccaccaccactactaggctgtactttcaggtccctgggacaagcctgatcctgttatttctttcttttcttcttcttttttttgagatggagactcgttctgtcgcccaggctggagtgcaatggcacgacctgggctcactgcaacctctgcctcccgggttcaagcgattctcctgcctcagcctcccaagtagctgggactacaggtgcccgccacacgcccagctaagttttgtatttttagtagagacagggtttcaccatattggccaggctggtctcgaactcctgaccttgtgatctgtccgcctcagcctcccaaagtgctgggattacaggcgtgagctactgctcctggccccttttttttttcttttctttttcttttttttgagatagggtctacctctgttgcccagactgaagtgcagtggcacaatcacagctcactgcagcatcgacttcccgggtccaggtcatcctcctatctcagcctctcaagtagctgggactatagatgcacaccaccatgcctggctaatttttgtattttttttaagagatggggtctcgctaagttgcccaggctgctctcaaactcctgggctcaagccatcctcctgcctcagcttcccaaagttttgggattacaggtatgagcctggcctcattatttctctacttacacaaatcttcctcatggtctgagccctttgaggaccaccaccttcccttgagctctgtaaccctggcagggccaccagccaccaggttccttggaggtactagggaagcttttgtggataaataaccatgaacttgcaatacagttgatctgctgtcacttctgacgtgattgttattgtcaggaaaatgctcaccagtgtgaagttcattcattcctttgacccagacatacccaccacttctcatgttgccagctttttttttgagacagagtcttgctctgttgcccagactggagtgcagtggcacaatcttggctcactgcaacctccacctcctgggttcaagcgattctcatgcctcagcctctcgagtagccaggactataggcacacgccaccaagcccagctaattttttttttttttttaagtagagatggggtttcaccaggctggtcttgaactcctgacctcaagtgaaccgctgtcctctgcctcccaaagtgctgggattataggcgtgagccaccgcgcccggctgccagcaccttttttccaagtgtccaaggcagtagtttcccctaaaaccaattcacaagtttttattgagcacctactaggaagccaaaacacagggggaggaaaattttagaggtagagcttcaggccttttattaagaacctgcaattgtcctaattggaattgtcctaagcctgttactcc

SEQ ID NO: 1540 - DNA, 2448 bp, Homo sapiens
caaggactagagagcgagccgcaaggaagtcggtgcagtcgagacccccctccccatcccagcgcatcgcgtctccgccgagcttgagggcacgccggggacccctccccagagccggccggaccccaggtgccgaggccttggggagcgcggggcgtcccgggtcgcggtgccctcgggacgagacagcccctggcagtgccaccaccgcagccgccgggcgatctccaagcggcgatctctaagcgctgctctctgctcggccgcgggccaggaggggagggtccggccttgccccgcaggcgtccattggcggcttcccccggcctccgcgccatgccgcgggccgtgtgaaaggcggcagcaccggaacccgcaggtgtccgcgggcgcgccaagcccttttgggtagggggcgccttactcgctatgctgcaagggccccgggccttggcttcggccgctgggcagaccccgaaggtggtgcccgcgatgagccccacagagctgtggccatccggcctcagcagcccccagctctgcccagctactgctacctactacacaccgctgtacccgcagacggcgcctcccgcagcggcgccaggcacctgcctcgacgccactccccacggacccgagggccaagttgtgcgatgcctgccggcaggccggctgccggccaaaaggaagctggatctggaggggattgggaggcccgtcgtccctgagttcccaacccccaaggggaagtgcatcagagtggatggcctccccagccccaaaacccccaaatcccccggggagaagactcggtatgacacttcgctggggctgctcaccaagaagttcatttacctcctgagcgagtcagaggatggggtcctggacctgaactgggccgctgaggtgctggacgtgcagaagcggcgcatctatgacatcaccaacgtgctggaaggcatccagctcatccgcaagaaggccaagaacaacatccagtgggtaggcaggggaatgtttgaagaccccaccagacctgggaagcagcaacagctggggcaggagctgaaggagctgatgaacacggagcaggccttggaccatctcatccagagctgctctctgagcttcaagcacctgactgaggacaaggccaacaagaggctggcctatgtgacttaccaggatatccgtgctgttggcaactttaaggagcagacagtgattgccgtcaaggcccctccgcagacgagactggaagtgcccgacaggactgaggacaacctgcagatatatctcaagagcacccaagggcccatcgaagtctacctgtgcccagaggaggtgcaggagccggacagtccttccgaggagcctctcccctctacctccaccctctgccccagccctgactctgcccagcccagcagcagcaccgaccctagcatcatggagcccacagcatcctcagcttcctgaaaggtcttgctgcccacactctccctcccaccctctacatcagtgggtccaactgtagtcctcagaccagcagcagcagtatcacctggaaatgtgagacatgcatattcaagaccatgcctcacgctgggtgcggtggatcacttgaagttaggagttcaagaccagtctggccagcatggtgaaaccccatctctgctaaaaatataaaaaaattagccgggcttggtggcgggtgcctgtaatccaagctactgaagaggctgaggcaggagaatcgcttgaacccaggaggcagaggatgcagtgagatcacaccactgcactccagcctgggctacatagtgagactctgcaaaaaaaaaggccaggtgcagtggctcacgcctgtaatcccaacacttcgagagtccaaggcgggcggatcgcaaggtcaggagattgagatcatcctggctaacacagtgaaaccccgtctctactaaaaaaataaaataaattagcgggcatggttgcaggcgcctgtaactccagctactcaggaggctgagtcaggagaatcactttaacccaggaggcagaggttgcagtgagccgagatggcgccattgcattccagcctgggcaacagagcgagactccgtctcaaaaaaaaaaagagaccttgcctcagacctgctgaataagaaactcatggggcgggactcagtattctgaggctccatgaacctcccaggtgagtctaatgcagctgaagtttgagaatgcatgccttctgctgccccagagagatctttctacacttgatcttagccaaaaggctgagaagcgatccccagaaagatctttctaaaatgtagttctaatcgcgttactctcctgcttaatgcccatccatggctcctctctgccctcgggatgaagttctaacccttttgcatggtataaatggctatttacaacttc

SEQ ID NO: 1541 - protein, 346 aa, Homo sapiens
MLQGPRASAAGQTPKVVPAMSPTELWPSGLSSPQLCPATATYYTPLYPQTAPPAAAPGTCLDATPHGPEGQVVRCLPAGRLPAKRKLDLEGIGRPVVPEFPTPKGKCIRVDGLPSPKTPKSPGEKTRYDTSLGLLTKKFIYLLSESEDGVLDLNWAAEVLDVQKRRIYDITNVLEGIQLIRKKAKNNIQWVGRGMFEDPWGKQQQLGQELKELMNTEQALDHLIQSCSLSFKHLTEDKANKRLAYVTYQDIRAVGNFKEQTVIAVKAPPQTRLEVPDRTEDNLQIYLKSTQGPIEVYLCPEEVQEPDSPSEEPLPSTSTLCPSPDSAQPSSSTDPSIMEPTASSAS

SEQ ID NO: 1542 - DNA, 5194 bp, Homo sapiens
caaggactagagagcgagccgcaaggaagtcggtgcagtcgagacccccctccccatcccagcgcatcgcgtctccgccgagcttgagggcacgccggggacccctccccagagccggccggaccccaggtgccgaggccttggggagcgcggggcgtcccgggtcgcggtgccctcgggacgagacagcccctggcagtgccaccaccgcagccgccgggcgatctccaagcggcgatctctaagcgctgctctctgctcggccgcgggccaggaggggagggtccggccttgccccgcaggcgtccattggcggcttcccccggcctccgcgccatgccgcgggccgtgtgaaaggcggcagcaccggaacccgcaggtgtccgcgggcgcgccaagcccttttgggtagggggcgccttactcgctatgctgcaagggccccgggccttggcttcggccgctgggcagaccccgaaggtggtgcccgcgatgagccccacagagctgtggccatccggcctcagcagcccccagctctgcccagctactgctacctactacacaccgctgtacccgcagacggcgcctcccgcagcggcgccaggcacctgcctcgacgccactccccacggacccgagggccaagttgtgcgatgcctgccggcaggccggctgccggccaaaaggaagctggatctggaggggattgggaggcccgtcgtccctgagttcccaacccccaaggggaagtgcatcagagtggatggcctccccagccccaaaacccccaaatcccccggggagaagactcggtatgacacttcgctggggctgctcaccaagaagttcatttacctcctgagcgagtcagaggatggggtcctggacctgaactgggccgctgaggtgctggacgtgcagaagcggcgcatctatgacatcaccaacgtgctggaaggcatccagctcatccgcaagaaggccaagaacaacatccagtgggtaggcaggggaatgtttgaagaccccaccagacctgggaagcagcaacagctggggcaggagctgaaggagctgatgaacacggagcaggccttggaccatctcatccagagctgctctctgagcttcaagcacctgactgaggacaaggccaacaagaggctggcctatgtgacttaccaggatatccgtgctgttggcaactttaaggagcagacagtgattgccgtcaaggcccctccgcagacgagactggaagtgcccgacaggactgaggacaacctgcagatatatctcaagagcacccaagggcccatcgaagtctacctgtgcccagaggaggtgcaggagccggacagtccttccgaggagcctctcccctctacctccaccctctgccccagccctgactctgcccagcccagcagcagcaccgaccctagcatcatggagcccacagcatcctcagtgccagcaccagcgccaaccccccagcaggccccaccgcctccatccctggtccccttggaggctactgacagcctgctggagctgccgcacccactcctgcagcagactgaggaccagttcctgtccccgaccctggcgtgcagctcccctctgatcagcttctccccatccttggaccaggacgactacctgtggggcttggaggcgggtgagggcatcagcgatctcttcgactcctacgaccttggggacctgttgattaattgagtggccctgcctgcccccagcagcctgcccccgactctacctcctcacagacaggctgacagcccctctgcctgcacagggacattggacactaggtgctgccctcagggcatggggtctcctcgcctttcctgccccagccggcagaagctgtgtggggagatatgaatggtacgggtgaggagtggataaggggtggtcctcaccttcctaatggaagctgggcctagggaggcccatccagtcttctgacttctgacctctcacaagaaggctgcaggtgaggtggccaagtccagggaaaggccctgctacctccttttgaggggtaattaggaccctcgacgtaccaagaagcacataatgcctttgtatttatttcaggttgagttgtttgtttgtcctccctgagttttagcagggaggttgttctagtttttagtgagacctctgcagacaggcccatcactgtccatgttccagggcaggtctgggtttccaagggaggggcccaggctacatccttggtttccccactgtggtgggggctgggactctgaggggctgtccagtctgctagaatgctaattgcacttaggcctcatggttctagtaaacggcagctgtgggcccttttgcctcttcccctgttcttggcctcacatctccagctgagctgccggtcttggcttcctggtcgcctctgtcccagagatggtcccagggagccatcctagggcaggtagcactgaggctcctgtggaaacaggagccacctgctcaggagacccctttcctgaggaagtccttacctctccccttgagatgtaaaaatggtccagcagagacaagctcccgtggaaaacagacaggagcatgggggcagctgtcatggctgtggcgggcacttttcctcagagtttctgccttgcgctggtccaggagccattttgcaccaaggacttggtaggcagaggcagccccactgtaaagaagggtcagattaaaacaaaaaactgccaaaagcatcccctctgccccccatgtggcactggcatcattctctgcttccctgggaggaattttttcaccatgttattgaaggggatggttcattaaggactccacccctcagagctcactcagaccccaaggacagaggtgactggggcttggtgacttgttcactccttttttcccaggtatactgaaggggtgacagagagaggtcttcatggcagaccaggccttcacagctaatggggagaggaactcatgttacctctgcaggcctggggtcctgagggggtcttttggcttcagcctgttcccccagaggcttgatcatcccacattgtcccttcagctcagctgctcttctcccccacccaccctgggatgtgggtgctctgggctgaaccaaggctatgacttctggagagaggctcaggggttggtctgagaggcctgccatccacccctcagggagctaggttttctcagaggctcagctggacagcactttttagaaaagtttgtagcattaagctggtttaaaatatgaagttggttttgttggatggctcctgagctgactgactgatgtctgaagtttgagacgagggattatttcagggtggggcccaatgtgatctaatgcccagctggggacaattgtgcctcatcatttgctcaaattcctgggcccccaagttagccccctcccaggagtggtcagcgggtcacagctgcccccactctataagcagggctaattgtgtaccctttgcagaaatgcttttggtctcctacccaaatactcacaagggtcttatcagacgcccgtcttaaagtccagcatgctcagggaccctgtgtaggatctcgtttgtggtgagtgggctgctctgaggtctccactgggctgccatttagccatgtgccatctctgaagtcagaggtgtttgactcccattccttgggctctggagctttccccaagaattacatcagagaaaaggaagaaggggcctgcaggacccattgggaatgagtttaatactgaagtctggaatgtaagctcatgccctagaggcctctccatatggctggtcaggggagctgccttcaggcttgtgccccgtgtgctcagcagctgcctctgtccccctctactgtccctttcacaccttgcctggccaaggggctagacctcccaggctaagcctcagattcagtgcaggacacaagctcatgcccccgtcttgccagtgacacttgaagcctcccgacttccacagagtgcttcaggacacattttgagtggtattttcttttctttttttcttctttttttttttttttgagatggagtctcgctctgttgcccaggctggagtgcagtggcctgatctcggctcactgcaacctctgcctcccaggttcaagcgattcttctgcctcagcctccagagtagctgggactatagacatgcaccaccacgcccggctaattttgtatttttggtcgagacggggttttgccatgttagtcaggctggtcttgaactcctgacctcaagtgatccaccacctcggcctcccaaagtgttgagatgacaggcacgagccaccaggcccagcctgagtggtattttctttagggaccaggtagactttaaaacgagggtaagagaaaagccagtgtctttctgaggtaaataatttctgccaggaaacttcccagccccaccagcagcccccctaaaaaaatcactcgtgtccccagggacttctaaagcttggggctccaggaaatcatccagtagagttggagattcagagatttcttgaagccagggacatgctcctaactcctttcccattaaaggtgttagaatagaccagagggtgtcccttttccacagtaatgggatcggctggtgtgccttcagggaggaagagggaggtggtcaagcttgaaaaactggctttaggatggttctgactttgttctccctccccaagtgttctcaacctccattctgcagtgttcagagttttagggaaagggtttgggtgccccagcatccaggtgttgtgtggcttagcgcatgtgaagtgaaaaccttctggggttgtttggaagcagctttctggttcttgtgattgtatcctgaggtcccagaaccctattctcccacgaggatcctcagtgaccatggtggccacacgcctggccagcctgctggctcctgggtgagctgaagaaccttgcctgtggcacttttcgagggtgagctggaaccgagagaacatggtccccgtgctgggactcatgcgggtcatttcctgccggcctggtttcgcctggtcgtgtctttatgagcaccatgtaagcctccttgtattgagataattgggcattaaacattaaactgcagctctgggc

SEQ ID NO: 1543 - protein, 433 aa, Homo sapiens
MLQGPRASAAGQTPKVVPAMSPTELWPSGLSSPQLCPATATYYTPLYPQTAPPAAAPGTCLDATPHGPEGQVVRCLPAGRLPAKRKLDLEGIGRPVVPEFPTPKGKCIRVDGLPSPKTPKSPGEKTRYDTSLGLLTKKFIYLLSESEDGVLDLNWAAEVLDVQKRRIYDITNVLEGIQLIRKKAKNNIQWVGRGMFEDPWGKQQQLGQELKELMNTEQALDHLIQSCSLSFKHLTEDKANKRLAYVTYQDIRAVGNFKEQTVIAVKAPPQTRLEVPDRTEDNLQIYLKSTQGPIEVYLCPEEVQEPDSPSEEPLPSTSTLCPSPDSAQPSSSTDPSIMEPTASSVPAPAPTPQQAPPPPSLVPLEATDSLLELPHPLLQQTEDQFLSPTLACSSPLISFSPSLDQDDYLWGLEAGEGISDLFDSYDLGDLLIN

SEQ ID NO: 1544 - DNA, 101882 bp, Mus musculus
  misc_feature (1)...(101882): n = A, C, G or T/U
tatggagggaggagtgtgaggtggctggtctggttcatccacagccagtgtcttagtgacttttctattgaggcagctggttacattgtatccacagccagtgtcttagtgacttatctattgaggcagctggtcacattgtacccatagccagtgtcttagtgacttttctatgaggcagctggtcacattgtacccatagccagtgtcttagtgacttgctgagaggaaacatcatgaccaaggcaacttacagaagaaccaatgtatttggggttcacagttttttttttttttttaaaatgttataatacatttttttttaaagatttatttatttattatatgtaagtacattatagctgtcttcagacactcagaagagggggtcagatcttgttacggatggttgtgagccaccatgtggttgctgggatttgaactctggaccttcggaagagcagtcgggtgctctaacccactgagccatctcaccagccctggggttcacagtttttaaggacaagtctacaaccattatggccgagagcctggaaacaggcaggcatggtgctggagcagtaggtgagagctcacatcttgagacaaaaccaggggacagagagagggacagacagacagacagacagacatacagagagacagacagacagagagacagacagagagacagagcactagctaagagtagtgtggatttttgaaacctcaaagccccccacttgcctgtgacacacctcctccaagaccacaccccccaaaccttcccaaaagtaagagtctatgggggactgttctcactcaagccatcacagctaggaagcaaagcaaagtggatgctggtgttcctcttccttcttccttccttccttccttccttccttccttccttccttccttccgagacaggattttgtgcttctcagtctggcctttaactcgtgagttgcaaagggtgacgctgagcttcaatcctcctgcctccacctcccaagctacagaatcacagtaatgctctgccacgcccagggtatttggtgctggggatggacccaagggcttggtgcatttggcaggtactctatcaatctaactacctctctggcccatgggatggggccactcacattcagggcaggtcttctcgctcggttaaacctctttagaaaagccctgagacacactcagaagtgtatctcttaagtgattgtaaatccagtcaagttgacaataagacggtcttaattagggcttcctcagttgctatggagtaacaccgtgtccaaagcaactcttatgaggacaacatttaattgtggctgtcttataggttcagtagttcagtccattgtcatcatggcgggtagcatccaggcaagcatggaactggacttgctgagacttctatatcttgttcagaaggcaatcaggagaagactgtcttccaggtagctaggaggaggttcttaaagcccacccccacagtgatgcacttcttccaacaaggccacacctattccaacaaggccacgcctcctaatagtaccacttcccgtgggccaagcatattcaaaccaccaagaagactaaccattacacctatcttaaaataaaagggagaaaggcagagctttttgttttaaaaggctctagtttgtaactctctgatctagcatatgcagggtcctggtttcaacacacacacacacacgataaatagataactaaataaaaaaacagcagaaaagaatacagtaggggctggagagatggttcaggggttaagaacactgactgctctttcgaaggtcctgagttcaaatcccagcaactacatgagatggctcacaaccatccgtaataagatctgaccccctcttctggggtgtctgaagacagctacagtgtgcttacatataataataaataaatctttaaaaagaaaagaaaagaatgcagtagaaattgcctagctcccttctactcccagtgactgaagaagcagataccttatctaataccaagaatttaaaaattaaaatgaaagagaaagaaccatttgcaggacgcagtacagtgaaaagcacttgcgctgcacatacatgggagccctgggccgacaacacactgttggtgggctgcggggatcacactcagatcacagcactgagcagccgtgtgaacttgatcctgccgtgtcagtctctcatctgtaaggtgaggcctgtttatggcgtccttcctcaagtagccgaggaggataaatgggtctgcactcagtgtatggagggacacaaatagactccatgctttgtggagtgttggctgctaaggcaaacagtgtgtgtgtgtgtgtgtgtgtgtgtgtgtgtgtgtgtgtgtgtgtgtgcatgtggaagccagaggtcaagctctggtgttagttcctcaggggccatccactgtacattttgaggcaaagtctctcactaagacctgaggctcatagactaggctagtctgacggaccagcaacctccagggacccttctgtctcctcctccacaacctggttttttataagcaaacaccaccacatgcttcgtttgtttgtttgtttgtttgtttgtttgtttgtttttaaacatgggtgctagggggttgaactcagatctccgtgatttggcagcaagccacctttcagccctagagaggatgttaatttccatatctctgcctaagtgttgggtttatgtcttctgtgtctaagtcacaggggaccctcatgctgccctagtgattctaaggcacttacaaactggcagcagagcccgcatagcaccctgacctccagtgaaccttcacactgtgggttcctcccactgctggcccaggctgcaacaggatgcttttcaagtccttttggtgagagaaatgggaagccttcagttctagttcacttctctcttgctgtaataaaacactgaccaacaccacttaggagagggaaggattagtttcattttacagcttatagtccatcatcaagggaagccagaccagaagctcaaggcaggaacctggaggctagaactgaagcagaggccgtggaggagctcgacctactgacttactctccctgccttgctcaccctgctttcttacagcacccagaaccacctgcccagggctggaatcacccatagtggtctaggtgctcgcacattaatcatgaatcagtaagatgccccagggctggagagatgtctgagtggttcagagcactaactgatcttccttgaggacccggggttcgaatcccaatatcacatggtagctcacaactgtctgtcacttcaagatctgacatcctcacacaggcatataagcaggcaaaacattaatgcacataaaataaaaataaatcttttttaaaaagaggaaagcttcttatgaaagaaaaaaggaaggaatgaagaaagaaagaaagaaagaaagaaagaaagaaagaaagaaagaaagagagagagagagagaaaggaaggaaggaagaaagagagagaaagaaagaaagagagaaagagagagagagaaagagagagagagaaagagagagagagaggaagaaagaaagaaagaaagaaagaaagaaagaaagaaagaaagaaagaaagaaagaaagaaagagaaagagaaacagacacacccacaagccagtttgaagggggcaatttctaaattgaggttctctcttttcagatgactctagctagcatcaagttgacacaaatcagaatgtccttagactaacttaagccttaagccagagaaaagtcaggaaaaagtaagcatcctgcaatgcccttgggggctggcaggcctacagcccgcgtgaggccactcagtctcactccacctgctgctagaaagcaagcctaggtgtggtagcagcagcctgacactagcagctactgctgtaaccacccccctgctggagagcctccatgcgcaggtgaggcttctgtgtgacctcagtgcctctgggtgaccccaagacccacagccacccaaaggagtcctgccaataaagcatggcaaggaacttggcaggaacggccaaggactgtaccacgagcgcagaaagagtcactggaagagaggatggcctggtttgtggtccaaggtaacaagctgaaaggatgagcatcacagcaggtggagaggctgtacttgatgctgagagccgtgggaggggttaagatctgtaccagacatcctcaacttggcaatgtggggcatggatttaaagggacagatgaggcatatcagggcatccctgcacacatatctggtggtgaaagatggagtcactggctctgtacaatcaggggtctccagaaccactgcctgccaggatggaggtgcacacttggaatcccagtactcagaagcagaggcaggaggctctccaaacattcccaggttagcctgggctacgtagtgagccccaagccagcctagtctaggtagtgagttccaggctatcctgggctacataatgagctccaggatagccagggttatatataaggccttgtctcagaacaacaacaacaacaacaacaacaacaacaacaacaacaacaacaacaggggctggagagatggctcagcagttaagagcactgactgctcttccagaggtcctgagttcaattcccagcaaacacatggtggctctcaaccatctgtaatgggatctcttctggtgtgtctttagacagctacagtgtacacatcatatgnnnnnnnnnnnnnnnnnnnnnnnnnnnnnnnngaggaggaggaggaggaggaggaggagaagaagaagaagaagaagaagaagaagaagaagaagaagaagaagaagaagaagaagaagaagaagaagaagaagaagaattctacctcaagaatctgctgagctcggagttctttaaacaacaacaaaataaacaaaccaaagccaaacaataacaacacaggacagaaaaagagaagctgtaccaagtgctgggacgtccctccaagttctgttcccagcttctggcttgtccccactggcccattgactccgggaaagtaggcggagagcatagttctgaaattaattatttttcaggaaatgagacaaaacctgtttcctttaaacactctgattttgcatagcatcacgtgagcccagttggcctgctacaaggagctgattcagcccttagagaggatgggccagtatcactcctgaagtattcactcctgaagcccggaatacaagacatgtcacttcctgatgaccaatagggataatccagccggaggccaggttgcacacatgtgtgacttagtgctgactgtgggagagccaggggcaaagatgtttgagttcagctcttctaagatgcagcagtcaggtccagtaaggataagtgggaatctacattcaggaggctgaggccagcttctgattaaaaaaacaaatgggtaaaacagggacctaggagggaaaatagtgacagatggcagaagccacagccagcaatggaaggcacaggactgacagctggtgcctgaccagcttctaaatatttataaacatattcaaaacttttaaattagatttacttacttatgtgtgcatgttctcactcgcaagtgtggaggtcagagggcaatttggggggtggggaactgtctctcttgtcaagtgagtccctagggtcgaattcaagtcaatacacgtattacccactgagccacccccgctggcccaaagcaagtagatcagttgttattttgtgtgtgtgtgtgtctgtgttgggggcaaacctatgctacagtgctcatgtgctggtcagagagaagcatggtgggcctgttcaccttcatttgggtctggaaattgaactcatgtcatcgaggttttgcagaatgcattttacccattgtgccatcttgctggcccatgagcacattttttttttaaattgagtagatcattttctttccactgacacataatcagaaaagggtctaatcactgaccagtggcaatagatggttcttttttctttttcttttcttttttttttttcttagtgaggttttgggggttgggtttttttttttttttttttagtttttgatttttggtgtgtgtaccacacaaagttatcctcaaaaagggtgaccctgatcttctgatccccctgcctcagttcccaaaggcactggggttacctgcgtgcatcaccaagccccgctagacactcattttcaagcatcacgtgtccagagttcaagaatggtccatcagacaagcccgctctaaagagtcctgtgttcccgagtgggcagttcaggtctcagcaactgcagttcagatgtcatgggggctcacacagagcatcgcatcctgctgctgcctctgatactcatattgatcctgcaaaggagagtattcttagcatcactatttttattctgtcttcttctcgatgtgctgaggatgggacccggggccacacgtaggctacgcatttcattattgtaatcgtcaatacgagacagggtattacacgtagcccaggctggcctcaaatttagctgtatacacaaggatgacttgcagttctgatcctcctgcctccacctccttagtgctaggatttcaagagtgtgccaccccactgaggcttatgccctgctgggaagaaacgcaggtagggcaaacactctaccactgagctacatcttcagaccctattttaagacttatttaacttaattagtttgttgtttttggagagagtttcattaagttactcaagctaggtctggagatgcagtgtaatggaaaagtactcagttcccatacatgaggcccacgtttcgacactcactgataacaaaagaaggttgccaaggtgacctcaaatgtgccatcctcctgcctcagcatctgaagtatctggggccataggcatctgcctcctgtgtacctagccagcatcactgtttttacatttaaagaaagaaactgaggcccagagagaataagacattttcccaaggtcacacagttcaaaatggcagagaagccaaaaaaaaaaaaaaaacaataaagacagatctgatgaaatcttatcctctttctaaatccgtgaatcaagctatatcctggtgtctcttgagagaagagctttccagtggactgtcagcagaagggctggtgaaatcagcattggcctatacagctgagaggctagatgtatccattccccgtggctactgtaacaaattgccaggaactgctgcagggcttagagaaacaaggttacagttttggaggtcaggtagcagcttctcccaggctaaaatcagtaacaagtgtgaggacccttagcaggtgggaagtcccttctgggctttctaccacataatctattcctatcatttccagcttttctaggccgctaacatcccttggctgtcacaggatccctttcagaagctttctctgaccccttcttcccctgcaacatctcagatacgaccgaccctcctaccttcctctgacaaaagcccctgtgacctctttgggtgaccctgatctccagattcacagcttgatcatacctgcagtctaccacctaaggtcctgggttccggagacttgagatgtgaacagctttgggcgcccattatcctgccagctcttggaaattctaggtgtgggtattctgagccagggctgcagagacagccccagtgctggcagatccaagaatagaatcttctcatttttgaggcctcccctgaaaagtcagaaagatcttcctcttagtgctctgtgaaggttggatgtttgcagcacaggattcaatagacagcatccattatccaaccccaaccccgatgtcctgtgataatagatgctctggctagggttcctactgctgcaatgaaacaccatgactgtgtgtgtgtgtgtgtgtgtgtgtgtgtgtgtgtgtgtgtgtgtatttggcttaggcttctacattactgttcatcattgaaggaaatcaggcaggaactcaagcagggcaggaacctggaggcaggagctgatgcggaggccatggagggatgctgcttactggcttgttcctcatgattgttctgactggtttctacagcactcaggacccagaggtccccacaatggactgcacacacacacacacacacacacacacacacacacacacacacacacacaccctactaatcactaattaagaaaatgccccacagacttgcccacagcctgatcttatggaggcattttctcagttgagaatccctcaacaaatataactataacttgtgtcaagctcacataaaactagacagcacaataggtaatagaagtcactgtttgagattcgcatctttggatcgtttcccctaaggacacatgcctccggtcctggtgaggtagcagcgtggtgggataaggaggcaggcagctcctgggtgggaagaggtaagaaaaaagaaacacattaaggcagaaggttggacagtgtgcgatgcgactcttttagttttcctctcagctcagctttggctgttaagtccttggtctctccccgcttggaagagacagacctgcccagctagattagatgcggtgtaggggcaggtctagagctgaatcccggcatggaaaagtaccagtattccttgcttccacctctgggactctctgaatgacctgcctcgagtctgtcagggtgaaatgcaaactataggcccgggctgtgccgggtggagaggttgagggagaatgttcaggaggcgaggcggggcggggcgggggtggggtcacccaggccgggttcagagtaaggacgtgaaatgttagcagttactcttgcgctccgaacctgtttccaaaaatgcccttttcacttcccaaatcacaagccatttcccaattaatccctttctatcagtgcaaataagaagtagcagtgtatagagtgtgattggactccggaagtatacagctcgggaagtatgtacccaggaattccaagtgaacttggctgcagccaagctgtgcggtttatccagaaagcggactttcaatctctctctctctctctctctctctctctctctctctctctctcacacacacacacacacacacacacacacacaccagtaggaggcgccttttaaccccagccgaatcctctgacacccggctgcccagggacttctcaagccttgaacttcaaagagctggctgcgcacccacgaagccacccaggtcgagattcagagctggcagggcacatagatctgtgcctggagtcgtggggttcccaggcaaacttccagccaggtgaggcgccactcagttcagatcaccctccccggctccaggcggagggagaagtcagcctgtgattcgctggaaagttttctgccaagctgggaacgcgccccttacgggaacactcccgagctagactagggctcgaagtggcgatccggagggcgtccgggacaccagagagtgggaagctgaccgaaagcgtgagctgagaggctgggaaaacttcccttccttcctccttccctcctccgcccatcattgggcttggctgcctggagccgcaggagcggcggcctgcgcgcacaagaaggtgagtttacagccaggtgaggtcgccgaacagggactcccagctcccattatccctcaagtgccccagtagacagccattccccagcctcagagtaggaggtccgggaccctgcactgcgttgcagggccaggccctccagcctgctccgccccagggtccgggtccccgcctggtggcgtagggcgcagggtgggcaggtgggcggtgcctcctgcgggcgccctcggtccctccctcctgctctcgccgctttgggccgcgctggctgatcaccacagaggtccccgggctgcgcgccctctccacgctgtgctccccggctccgactccgcggcccgcgattgcctggggtgggggtgtcgcgaaacccccagccccgggcctgcggacagagaccaagcgtggccctttgccttcgaggtgagtctgcgtcctcgcgccgaaaagagcacggtagggcccgggttgggtatccgtgcgtccgggagcatcatgtcggacatgttcctcaggggactccactccgccccccccccccccccgcaccctctgtagccgcacccggctgatgtggagttctcccgcctccccgcgtcgctctggctttggcctcgagggccccctgttggcggggacaggttccatccgcttgtgcctggacagagcacctgggcacttttgagaggaaagaacttggatagggcactgagccggccgtgggagcctctgtcctagtaatgtaggggtggacattgtgtattcttacttccttctgactgttaccggattaagaagcaatcgaggggtggagagccagcggtcctccagggtccttagtttcttcgcctgtaaaataggagtgactataggagcccgaggagccctaggctgaggctaagtattcgcagaccaatgactgtaaattaagttacagggtgcaggggagaacaaaataccgacgacatagtaagtttgcttgtaattgatatgaatgttgtgggtgcatttgaggagggaacgccaagtttgatttggccactttgagaatttttttctcacgcacaaggtaggagcaggagacctgtcagtgggggaccctgcaaggtggtgggtttctcctctgatgatatatgtgaccctgagccaggtccttggccaatatggaaacttagagatgaagtcaggagtggagtgaaggggcaggacctaggcgagttaagcaggcttgggggggggggtagggatccccacctgtccacttcagggcttcctctagttcctctagcttttgttttgaaagcaaacttgaaggttggcttcttaagagaagggtcaagagctttcccactgagacctgtcattcaaaggtccttggggggagttactcctttccaaatatctccctcagaaccagatcaaaggttcccccaacccagacagaaagaaaagggtgagcagagaaaaagagactggtggccattctgttggtcattgggcatcacccaaagccagccctgtctaattgggaaatcaaggaagtcagcggtagatatgacaagggctgtgtgatgatggtgagccaagtcacctcaccccctctgagcctgtctcctcctccaagtctggagtgccgacctcctggactgcaataaggctttggtggcacacactctgtaattactgtattaggggggcttagagagagacgaaagtgggtacttgtgtagtcatcaggacgttggtatccctggaggacaggagagaaagatgtcagagcagacgagatgataggaacaataatatggaagtctataggtgtgcggatgtgctggctggggtaccatttgagtagtgtgcatgggtttgtgagcaggttgaggggaaagttaaaggtctgggggtttacgatgagatggactggagaggcagcagggtgagggagctgcgaggacgggggtggaatgggaccatcccacagaggtgagcagaggtagaccaagcattttgtgtaaaccaggagctgccgacagtggacattgtagacacacatcctattctaggttttagggcagggagtcatctgaccttaccgttcagataattctggtgggagggtcggggcagtggtctcaggagtagagtacttgcttgtgatgcaaggccctgggttccatccctggcactgtacaagtcacaacaacagcaatgagacagtcttaaacttttattcaaaaagacagccaggagcaggaaatctggctctggacagtagagacactgaggggcactgtgtaggagaccatacaggaggcaaggatcaacttgtgaccttcacatgtgactgatgatcgagggcatgatccctggactctgtaggaggcccaaatggctgctctctttcctaccagagagcccatgagttcccaggatattgtcagagccccggaccctccagcggttgcttgggttcctgacgtcacaggttccgggccttctctggccacagtgagaacagaagaggccactcctgctgatgtcctccaggagcagtgtggcctttcgggttttttggggtggggcccctgatgtacaccagcatacttctgcatttttgcccttccctgttctgagtgaggctggcagggaacctctcccgtctcttgttgcagttgcagatcaaaaagagatcccagggcggattctagggagtcagcggccctgggaaagttccaggagcttccgtctctccacggggcgtgaggaatctgcatctggctggctgcttcctttcacttttatggtcaatgccctggcactcagggatacatcctgcacttagcagcctcggaaacaccctccgtgtgtgtgtgtgtgtgtgtgtgtgtgtgtgtgtgtgtgtgtgtgtgtgtgtgtgtgtgtgtgtgaagtctctcattgcctggaggcaacaggaggatcctggagtgtggcaggtggaggggagcgtctagctgtccgtacaccacatccatgggacccgctcatgtaactcagaaagaccagagacctgcagcagataggtgcgcatctcccttctggggtccttcatgcgatcctgggggtggggcctggtggtcacatgggggacagcttggatgattccatagtttctgggtctttctggacgttccatctactcctgcttcctcccagcctggacaggtggcgcagcctagcatggcctgacagtgtattcccccccccccccccgcccccgcgcgcgcatcccctcctccagcccttggcgccaggcctcctctcctgggagctcttgtttggttttccttccctgccacaggccaggctgccccgaccatttccagatggtccaagacaggggccagaaatctcacaggtgggtctgtgctaagctgttgcagccaccacaccttgggttgattctctcaagccccagccccatctcagaatggcagcttggccctggcactctgcctgcctgccgccgttcagctgttccttccctctggctcctttctcccctggcctagatttacaggctcagctgccctcacatttgcatgccggtcactttaggacctaggatgttggaaccagcagcagggggaccttagcttcagaagtccaatctcctaatcttaccaatagggaaactgaggcctgaggagagggaagagcatgcctgagattaaagccaggtccaggccttggttttcccagttctgtcttagatgatttattgttatattttatttactactggtgtgtatgtgtaggtgcgtgcacgccaaggcatgtgtatagaggccagaggaaaacctttggcagtcagttgtctcttcttccttgatttctgggggggatgggaactcaggtcgtcagccttggcagcaaacatctttacctgcggagccatctcaccaggctgtcttggatgtttctcagaaccctcctgtttgtttgtctgctgtgtgacaatctcacggagcccaagctgactttgaactctgtatgtagctgagggtggcttctggtcctcctgcctcacctcctgagtataagggctatcgatatccaacaccacacccagcttatgtggggctggagctggggccccttgctcgggtttaccattgtcagatcctgtctgctcattgtcatctggaagggggctgctggtgacatgtctgacactcccctcatccactgagccatacaggtgtctctgcatctgcagactaaggaaaccgctgctgctccagatgtcaaacacacacatgccttgtaaggacaggaagggactgtgtcatagacccagcaacactggctgtaaagctggctgaacttactctgcagtgctacgtctggttttgcatcctgaagggacaagttttcccctacacgctccgacatgctagactcatgaccttctaaatggtggcgatcagcaattcaggagtctgccttttagggtcagttcagtcaggacacttccttgactctaacacaattcaaggtgcatggggcttcgtggtccacgtttccgtgtgtgtcgaggagacatctgatcctcatgaggtctttagaaagaggaagctggcatttggatggggctgctgggagcccaaggtcacacagaggaagagtctaattttagctgtgttcattttaagccaaccagtggtaccacccctggtcccatggcttcgccagactaggtatccctggggtgcctgatttgggcttgttcatttcagcccttcttctcaggagcagggggcgaaagtagaggctgaagagatgcctcagtggctaaaagcacttgctatacaatcatggcatcagattcctactttcatgtaacaggctaggcatctctcctttgctggtaacccagatctgtagggtttactggcttccagtctagatgagaaaaacaaaaaaacaaaaaacaaaaaaacaacaacaaaaaaaaaaacaagaacaaaacccaaaaaacaaaaaacaccaaggttcagagagagaccttgcctaaaagaataaggtagaaagtgctaaaggatgacacatggaccctcttctggcctctgcacatgtgcactggtacacacacacacacatacacactaatgggcacataacacttacatgggcacacacactttaaagatttttaaaagatgttttaaagaatcaaaggccaaataaaatgttcgagaacttgcttcctgggcaagggagatcctcctgcggggatcagacctctgggaagggacatttgtagtacattggaagtcctgaccagacgataggtgtcttccaagctaacacttgtcactgtgggcatcttttatttgttcgggtttattttattttttgagactggggtgcctcgtatcccaggctggctttcattagctatatagacaaagatggccttgaactcctgaccctcccgcccccacctctccagttctgagatggcacgcatgtgccactggtttatatagcatctgatcagtgggtttgacggtcagttaaatgttcttgccctgtctttataaaaagtgaatgagaggaaagactggaaatctatatgcacaatttttaaaaaaaattttttttatttattttgtgtctgtcttggaggagttgtggggtaggtgtgtagttgccatgtctagtttatagaggtcaacgttagctctctccttccgccatgtgcggcccaaggatcaaacttaggtcagtgagcgtggtggcaaacacctttaccttctgagtcaattcactggcccaggaaaagtacttttcattaaattttattatagtagtagtagtagtagtagtagtagtagtagtagtagtattttgaaacatgttttcactatgtagccctggcttacctggagctctatgtagaccaggttgacctcaaactcacagagatcctcctgcctctctagtcctaggattaaaggcatgggccaccactcccagcatattttaatcaatttaaaaatcacattgttattattattatttgtgtgtgtgtgtgtgtgtgtgtgtgtgtgtaagagaggggaaggggtacactcattccaaggtatggctgcagaaatcagaggacaacttttcaggaggttctctcatgaaatgcaaagcctggcttgacagcgtacactccctgggtttggcagttcccttttaaagaattcagagacctttaaagtaaaatgtgtcaccaagtggcacgtcgtgtggtttggtttcaccccacctacctttgcccgctgagccatctctcgggcccaggggacgtctgtgagtgacttgtggtctgagccaagcagcacatgtcggtctctgcagtgagagctttgggcagtcctgctccgggctgctgcggttttttttgtttttgttttttttatgctgcgatcctgggaactcaggattccttggacagttcccagaaagcagctcaggctttgcaaggacagagctcaggggtgggaggcagggccaacaggaaggaggaaccgcttgcaaatgttcccaatatacactggctcccgaaggtccctttaaaagaattcggagaccttaaaaagtaaaatgtattacaaagtgcagaaccgctcttcacgcagccgcctcagttcttcttagaagaaacagagaggcaggagtgggtaggcgccaaatcttactttgatgagtgttcccaaatggggacagtgatggtgttccaaaggaggctaggcagtcagtgtgaggtagggagctggcctggaacccacgtctgcagcacagactgtcttggctgaaggccacactgtgcatgcactaggaacactctttaggaaacccccgctgctatctgtcagcagccctgcttgtaatgctgacacaaagttatcgtttcatcagggctgaagagacagtttaaggtgattaagggcactggctgctcttgcacaggacctgggtttggtttggtctccagaacccacatggcagttcataacagcctgtaactccacttcgagtggaggatcagatgtcctcttctggcattcttgggtacctgcacacacggcacacacatacacgcaggcactcgcatacaagtcaattaaaaataaatctgtttctaaaagcacacttggttcaaaggcagcacttatctagcacccaggcataataacctacttcctgcttcatctctgcttcctcctcctcttcctttaaatattcttgttttgttttttgttttttgagacaaggtctcacacctactcccaggctggcctcatacttgccaagttccccatctcgaccttgaactcctgagccacctgctgtgctgggtttacagacataccctccacacccagtgtaggtggtgctggggttcaaacacagagcttgtgcatgctgggtaagctctcctccagtgaactatatcccagtccctgtctgtctgtctgtctgcctgtctgcctgtctgtctctctctctttgtctctctgtctctgtctctgtctctctctgtctctctctctctctctctctctctctctctctctctctctctctctctctctcgtgtgtgtgtgtgtgtgtgtgtgtgtgtgtgtgtgtgtgtgtgtgtgcgcgcgcgtgcgctcatgcgaccaggatcatcagcctgacttctcccaacatatgttggtagaaccagaactcaaacttcccatggtgggccagtgcctttgcaatcatggtctcatgtaatacccagttctgaaaatctccagaagggtctggtgtgttctctgctggacacttggagtaactgctgggactaaaccctggctggaccttgcatatgctaagcgactaagctacaggtgtatatactctcagtggaatctcacattttggctagcttcttcttcttcaccttaggtctggagaggggctgagaaccgactcaccctcttcccatgtgttttccctgcccccactgtctggcttgagtagggtgtggacctagactgttgctattcggtggaaggagcctgatttgtttgtttgttgttttgttttgttttgttttcttttgtcttgttttgagacagggtttctctgggtagccctgggaacattatttttaaaaagctctcaacctctccctagaagagcaatccgaagagtcttcaggtcgccccgtgaactgctgtttgcggttgggagtcatgggttggaactgcctctgcagttcagcagtgcaagtggttgtctgggttccacgcctaagcatacgtaagaatatttgcataaacaaattgacaaacaaatgcatggtttcagtccttagtgactgagtctgctatctacagagaggcagccccagctcccagggacgcagcctatggtcccgagggcgacagtggggaaagtacctctaagttggaatctgatctggggacccgggaccgggagggagcaggggttaactcaaactcaagagtgcaggaaagagctttattttattttagagacagcatctcatgtggcacaggctagcctagaaccatatggttgataatgaccttgaactccgcatccaccagccaagtgctgagatctcccaccacacacctgtttgaggctaggctgggaattgaaccccaggacctcacgctcgctaggcaagcatgatacctacccgtgctagattccccagcctgagggaaagaactcctaaggaagtggggtctgagctgaactgggaaggggaacgaagttcaggtgacaggcaagcaacctggtggatgtagcaacaagttccggaagtagtagagttaagttcccaagggcccatagagctgggagggtgggctggaaaaaacctacggaatttccttctgcaacttattttagtggtggcactcccctcccacaaattaaaatagagctgagatgcaatccagggctccattttgggatatactcccaaaagagttgagctcagaagagacatttgtgttcactgttatctgtgagagatagaacgtggaaggggtgttcactggcagacaaacagacggaatgtgacccgctacctgaggactttgtgctaagagacaaaagcctgtgaaaagacaggccggggagggggttggttctcagcctgtcatgcatactcaaggacctaaattgagatcctcatggcagaaggggagtgcattgctggtttccagggacaaagggagggggacagtgagctgccctgtgctggggaggggttcggtttttacagtgtgaagaactgaatggatccgtgtgctgcctgtccctgatggttggcctatgacatgagtttccttaatgccagcaaacggcatgcttaaaacttggtaaggaggctgctgagatggcttagtgggtaatgagcttacctagtagtcctaccccacccccatcccccgaattctgttgccagaacccatgaaaaggaggaagccacactggtgtcctctgacctcccacaggtcaataatatttcctaaaacttggtaggataatagagcttatatcacaaagaacaaatttgtgcagtagaatttttcacaataaaaaaaaaattgagggacggaatcattttgggaacatggctctgcattcctcgagttttctgacagatcaggcgaggctcttggttttggggcacagggcacacaggagaggcagttcctgtcttcctggggagcagggaggggcccgtgaactagggagcaaacggttgaaattagtcagcaagccccgcagacagagctgggctagcatcttcagggcgttcttgcagcctgcagacaggcccaggcagccgtcctggttctcagaactggcctcttcagagaccctctgccctccatcctcccaactaatgatggaccactgctcaaccctggacttgactcccaggccttggtcccaagaagctgcgttctacttccttcttcctgctcaccctggtcagggaagtctgatgagttttcacttcctattttctctgcttttctgcccagattgtccaaactatctctccccataaacctaatctagcaaccatttcctgtataattttgcctttgccaccatgttaaaagccccttgccacctgcctttgcctcccaagtgctgggattgaaggcgtgtaccaccactgcccggcctaaaagccccttgccaaggggaggggttgcaattacttggcagacacccacttaaccagtgttcaaggccatcatggcatcatggctgaaaaatatcannnnnnnnnnnnnnnnnnnntctctctgtctccctccctctcgcaatggagagagggtaagtaagagcatgcccactacactgccttctgatttcctgatgtgaaaccatcagctgcttcgtgtttctgtcgtgacctcccagccacgatgggactacatcctggaactgacggttggactcaacccttcttctttccattgccttagttagcgtagtctatcacagcaaatggaaaagaaacggggtctttttctatagcccaggctggtctgcaacttgtgatcctcctgcctccgcctcctgagagttgggattagaggtttgtgcccctctgatcaactctcacccttatttataccaaccacaatgtaaacactgtagaattcttaacctgaatggcttagggaataatgaagagaaggaaaagatcacgtacatgtttaatatagccccaggtatatgtagttggttgaatcctgggatgcggttcccgtggatacagagggcagctgctctgaccagatataagtcacggacatattaccactgaagctatgggatttgtttgcatggctcaggccttcccggtgccatctttccgctctgacaacctaaagcagtacagtgtatttgttgcagctcctaagtctcttctggtccattggagttttcagattttcctcgaattccctgaccttgaaagccaggacctgtgctggccagcacacttaatggtaagctgtccctcagactgggtttattccgatgttttctcaaatctagtcagggcctttactagttcctgcgtggaaaaaggtgctctctctgcactgtatcaggacctgtaggttacccatgtgacatttttcagccacgatgccatgatggccttgaacactgggttaagtgggtgtctgccaagtaattgcaacccctcccccttggcaaggggcttttaggccgggcagtggtggtacacgccttcaatcccagcacttgggaggcaaaggcaggtggcaaggggcttttaacatggtggcaaaggcaaaattatacaggaaatggttgctagattaggtttctaaaatgaaagcatttggtaaactgaggcagtgttctccgtgcacacctagaaagatttgttctctaaacactcacaggagctcaagctgaatgctcttgtccaggcgtgggacatagatgatgctactgcagtgggcacaaggggagacctggagcagcattctgcctgatagtattgaaggtcatgccaattcagaccatactacatcacgtaagaacagaaagtgttgtaacgtcttaaggtaacgggcaggtaacatggctcagtggatgaaggtctccaagtctgatgacctgagtttaatcccagagactcacagggttgagcgcaaaaggcaactctgcaagttgtttctctgacgtccatgcgcatcatgacatttacacgcccacatatgtgtgagcacacacgcacagtagataaataagtgtaataaaaaaccttaacttaaaagtcacgtgggctctcggagtggggctccgttgacagagagtttctctagcatgtactaagccctgggttccatagcctgtgctacgtgagccaagtgtagcagagtatgcaggctatcccagtgctaaggatcagaagtttaagtctgaggccagcctgggctacatgagaccctgactcaaattcaggaaggaaggaagaaatagcaggtagcactttcatgtgttcaaggtgggaatgtaaatcgttggtatcaaaggctgaaaaattagatctccaagcaccggggttacagctcagtagtagagggtttggcaagcatgtgaaaggccccactccacttccaccccaaccccacccccaaggactaaaaataccccaatataaatattaggcctcaaaccatgttttaataagattgtattatgaggggggaaacaaaaagaacacatgttttcactatcgacaagaaagccagggagccccacagatctaatcagtaattaaggactacagtgtagttagttttcattttctttctgccgggttagatttacaaactggtatttaataaacagacgtcgtttggtggctagagaaactgttttctttaaaaaaaaaaaaatctctgttttgttgtgtctactagggagggtggccttgtgtaaggggcttggtgaatattcccggtggctcctttggaattcaaactcggtcccctttaagaggcttagaaagctggggtagcgaacaaaccctctcctaaagtctcctgcctctgcaggtgactgtgtgtttgtctttagataaaatgaacaaacctgcatgggtttggcagtaatactgctaatgaaatagggccggctctttcctgccctgcatggaaatttaagggtccagggagaagacccagaagagaccatctggaatcgatcatccctggccttaagcctttgcctaccttcctgcccccaccagcagatgcggttgcccaactccccgctgggcaggaatctggcttcttcctcaatgctaactcctcccttcccatcccaggcctggaagtaacaatggcttttgtatagttccgaaactatgttttatcaactctgtttctttacaaaagttgtgtgtacacatgaaacaatcgatgtcgaaggctatctaacactaatactaaaaaaaaatcccttttaatttctggacgtcaaccagaggtactcagagttcctgcctccacacaagcacttcctgaaatcatctaaaccatcttcccactgaatgctgcgtgtacctggtcgtacctgagcgcttggcaagcagagcaatgaaatactgcagttgtcagagcgcctcaaaaacgttgagtcattttaaacgtgctctaactcatatcctggtcatagcgccattaagaaccccgggagttaaccacctgggagttttttacgcctagactttcacgtctgccttttagaaagacaagtcagtagctttcctcagatattccaagaggtctgtgcacccaaagaaaagaaaggtcagaaccaggcagggaggtctgaggagcaagcttcagggatgtgggtgacctttgtgctggggtgacctctggactttttgccagcggttcctatttctctgattgcccggccgagaggctgctgatgcaatagctttttttgtcataggtgagagggaccgaggctttgccctgactcacaaatgtggatgcagagtcgccctggcagccaaggaggagcgcacgtgctctccctccagggaggagctggtttcccggaacttgatgaggcttcctgtaagctggctgaacaccattcaagaagtagttagggaaattcctgagggacagagccatcattgtgatgaaagcctaagatgtttggggactgtccttaacaggattgctatctggagaagagggaggtatgtcctccaattatcctcgtggatagggagctattgaatgttcggaacaatcttctgactagtagggaaactgaggcagggggctactacccactgtgcaacatctccacatctccagggtttctgtcctttagatcacaacttgaatagttgtaatttaaatagggatgggagggtcctggctcctcgtggtcattagggactcctgttctttagggacctcctggtcattagggactactgatcttcagtactttcatttctgaggggtcgattaataatattcccagccaggccatttgcctgccatgtggtgggccagttctcaaggaagctaagtatggccagtctgggctacaaagagagaccagtatggagtttggggagacttctggggtaaagaagtggggtgattcatagcttaggggaggtgaccagagtcacagggaatgtcctgcaaatccagtatcaaacttttgggctcctcggggtgcttgtgtgtactcacggcaaggtcagcatgaaccaagggtgctggggttttttgtttttggtttttttttttttttgtttgtttgtttttttgctttctgaccccaaaattgataggttatttctccgacagtggaatgagccaattcaagccagatttgattatataaaatgcaggtttattgggaagctgcactcgagcgagttcactggcccccaaggattgaggccagaggagtcgacatggggatgggggggggggagaaagagagatagggtgnnnnnnnnnnnnnnnnnnnnnnnnnnnnnnnnnnnnnnnnnnnnnnnnnnnnnnnnnnnnnnnnnnnnnnnnnnnnnnnnnnnnnnnnnnnnnnnnnnnnnnnnnnnnnnnnnnnnnnnnnnnnnnnnnnnnnnnnnnnnnnnnnnnnnnnnnnnnnnnnnnnnnnnnnnnnnnnnnnnnnnnnnnnnnnnnnnnnnnnnnnnnnnnnnnnnnnnnnnnnnnnnnnnnnnnnnnnnnnnnnnnnnnnnnnnnnnnnnnnnnnnnnnnnnnnnnnnnnnnnnnnnnnnnnnnnnnnnnnnnnnnnnnnnnnnnnnnnnnnnnnnnnnnnnnnnnnnnnnnnnnnnnnnnnnnnnnnnnnnnnnnnnnnnnnnnnnnnnnnnatgtaaaatatgcaccttagtcctttgtcccagggtccaaaaccaaacaaaaaggtcacatgctggacaccagtgcaaaccagtggtttcaacagaagcaacttgcaagcttctgtataaagagccaaggtaacaactattgtcctcagaggggcatcggagtgcagcgggcccagagatcagtacagttcagtgctcagcagtctgccgcctccgaacctgcgttgtttttcaatgcaactgaaagcctgtgaggccaggaacgggacccctgtgttgttccactgttggtaacagggccaccagctagaaaagaaccccggggactcagctcagtcagcccccttccagactctgtgctctttgtctgtttgctaaattggctttcattaccttccttctttgtgtgaatgtgtgtacacaggggcacgtccatgtggcacggctgcacgtggcagtgagaggacacctgaaggagttgcttctctctccccactttgagggtccctggggtggggctcaaggtcaggcctggaggctggtgtctttacacacagaaccagtgggatgcctgcgtttgtgtggccgaggtagcaagcccctcttcccacttagcaaaaggtgaaatcacgcggagtgtgtgtcttgtaggtgagaatgctcaggataagcacgtgcatagttgctgcggctgctgggtgttcgactcttcctggaggacatgctgctttctgtgggaaggaggcttggctagacaccacccataaggctaaaaccttccccccacaactgaaatattctttcatgcgaattaagtgtccgacacaatttcggtccatccacatgggggaagaagtacgaaggcacagaaagatgattccaactgtaaaagggtgggtttcaaaactgccctggctatttttcatttcaaagatgacataaataatacatctttttaaaaattttgtatcattgactgtgtgagtgaagagcttgtagggaccatgcacatgacacggcttaaatatgacacaactttaaatatgacacagcttaaatatggagatcagaggacaacattctcttacgggggatggaatccaggttgcccgggaagctcttgtacctgctgagacatcttggggaggggggggcagagagtaagccatttaccatacggttctgacagtaaactatgtgaggtttatataccctctgttctcagctgtaccatattccttaccaagaagtatgtattaccttggattatggcaacattaaaattcaaacctttgtcctaatgatagtggtgaccttggaccaatcaatgctcaggtctctcaatagagagaataattttaggattttgtgagatctgggcatgatggcctgcaagcctgtaattccagcactttagaaactgaggcaggaggatagagaatttgaggccaggctggaccaagggtatgtgtgtgtgtgtggaattttgcaaagactaaatgaaccaagtgctagttgtgaatttttttactgttgcatttttaaaagacacaatctcacacagaccaggctagactctaatccactatgtagccaaggatggccttgaatgtctgttcctctcgtgccacccttctcagtactgagaggatacgaatgcaccgccacgtgctgaggacggaactcagggactcgtctaagccaggcaagcgtctccagaccccacgagctttggaaaagctttcccttggggtgagcctgtttgtaattaaaaccagccacatctagcagcccatggggtttcatctcagaaggaccagtgctgtgagcgatccgactaccccatggtgttcatctgctctgcgtctggacacagtggcacaaagaggccgggctcctgctttgctatgtcaccaagggctcctccaactgtcatctcgtttctgtctcctgcacaaagaaacagtttggtgttctgacgtagtgacaaataaggacggcggagtcggacagtagagccctcatctattacccagggagaaggatactgccacctgcccagggtgcggctgaggattcaacattccggtatggatgagctcagccagaaccaacccaggtgacataccacagctcagaaattcacgtgacgtcaaaaatcgctttaaagtaactgattcagtcagttagtatattgataaaccggtgtagcctcctctttgtcatctcaaagtcttttcctcaccccaccccttcggtgaaccggttgccagtgctgggcagaagagcaaaggcctgtgatcctagctgctccggaggctggggctgagcatctcaagtcccaggagcagctgagtgagattccatcccaaatttcaaagtgaaaagggccaggtatggtggcacccaccttcaaccccagcattcccaaggcggaggaaaacagacttctgttcctttgaggccagcctgcgctacacatggaattctaaaccagccagggctataaagtgacagtttgtctcaaacaaacaaacaaacgaaaaccaaaatgtgaagaggtcaaagctacattacagggtagcgtgcttgcctagcaggtgtgagaccccgtgttcaacctccactctcccctccactgcaaagaaaaacccaactctcttaagcaagtatgcaaagcacccccaccccatgtgccggtcggtggctgctggcaaccactaaccccaatgtctgtctggacgtttcctttaaatggagtcacttatcatatgacctggtacaggcagcttcttttttaaaaaaaaatgttattgcatttttatttgtttgtgtgtgtttcttgctcacgtggggtttagagactgatttacaggagctggctctcttccaggggactcaggtctgggggcttggcagcccagtaagcaatctcactggtcagtgcactggctggtatatttatttgagctcatttgcatcacaaacctcgttctttctgttaagccacacctcatcacatgctggctttttcgatgcccacccaagtctcttagatttcaacatgtgttccattcccaaggggcctgctgaagcagacccccccccctccccaaagtctccacagccttaggtagaaaggccagagaggaagatgaggtccctgagggtcgtccagggatgctgggaccaggaatgggagcaaggccatattcaaataggtgggagacagaagacagggctgctgagggtgcagtctcacggtggagaagccaaggcatctacttgcagacgtgtaattcagggagtctagcagggcagcctggtccagccattgtccccctacacgtacccagtcccatggtgggcttggggcttccggaacccatggcctgcctgtccgcaactaggctcagacaccctggagaacttgaaagccactgctccacagtcaccttcctgtgtggccactcagttctgtctccagccagttctcagcaagaaccgaacaggaagggaatcctgggggctggagatcctccagcccgaggacagtttggagggctctgccatgggtcccagatctcacagcaggactggctgtccagtccagatgtgatccatccctgtaacttcctgccaaggtccttggctggaccagcattctttaaggaactttgtagaaacaggtttggctcggtctctgcagtcagatatcagcaggcagccaaagcatcagagttatcaagctctagctaaccccacccattttaaacttaacgcacccacttttctgacaaggtctgtagcctggcgggccccaaacccactgtgtagctgagagtgatcttcggagtgctgaaattataggcattcaccaccagcgcagcaagcaggtttacagtgctgctgattgcagccaggacttcatgcacgttaggcatgcctctaccatctgagctatccccctgccccacctaccctgaacttgagaattctgatcccatggaaaacagagtgctgtggagccaagaggatatgagttacagttctgactttgctagttttgtggtcttgggaaatgactcagggtttctgattgggtgttttttccctatctgtaaaatgggtgtggcaccagccttcctcactgaagcggcgccaatgaaggctgacacttgctacacttctggtgtgggaaatactgtgtagtcaacctggacttacaagtgtccagggctaatgttagaccaaccagtccttgccgtcctcccgggagccagacttggccttgaccccgtgtttacatcataaaagccagacttgcttttcctgcccccagttcacattccaggcagtgtttcgtataaataccgtttgcttgtttcttctttagacaaaccccacaaactctgccgtaaaaaaatatatttcctggccagacccaacactcggttcgctgtatttgaaatcagtttgtttttcggtttttagtggatttgtgtgatttgtttgcttcttcaaatgaggtagcccaggctggacatgaactcactatgtagccaaggatgaccttgaactcctgttcctcctgtctccacctccccagcactgggaggacaggtgtgccccaccatgccgacgatctagccccaggatctaagcccatgctggcagcttctgactgctttccacctgctgtctgatgttcttcgacattgctgcgtctgtgttggccgaaggagctgacgggttccttagactggttcccccatcagatcaaagctgtgtcctaggccagctgagggctgtatggagaggctcggctttgccatggctaccaaggaagtcaatcctgagatgcacatagcagctatgaggagaaaggccaaagttcaacagcttggaggtggggaagggaagggaaacccagtggtcagtgatccgaggaggaggctgggaagatggctcagtgggtacagcgcaagcaaacaaccatgaggacccaagactgatcccagtacaagtgtaaaggccagatatggtggcttaagcttgcaatccgggtgctggggaggcagagacagacagaccttggccagcctgtgttgtctacatggagagtcctagatcctagtgagaagccctgtctgaataaaaaaggtggacagctcccaagaaatgagatcaactcaaggctgatcacacatgcacgcgcacacgcgcgcgcacacacacaagcacacacagacaggcaaacagagaaacagacagagagagagacagagacagagacagagacagagacagagaatcttcgaggtccttgtattgaaggctggcttatagcaattgttggggaggtggtgggacctttaagaggctggggtcttgtggagaaagttaagtcactggtgacatgcccttggaggggatattgggcttcaacctcctttccttcctcctcctcttcctcctcctcctccttctgtctttgcttcctgtcttctgaaataagccttctattacctctgctgtgtgctcctcccatgatggctgccttactggcctgaagcattcggggagggagaggaggaggctaggaggccgtcatggttagcaggggtgaggggaaggccgagttgtctgggtggggctgtcctgtaccttggatgcgccgcagtcttgtactgattttcctgggagggagctcatgcctacccgaagctggtgctgctcggaccagatccagcgctctgttcgaagcgagcgtctaggggtgtggatatagggctgagatagtatgggtggtccagactctcccaaagggagaagtctctgtggagcctgtgaggagcctctgtgatgtgctgatggcatgagctggaggcttagcatgatcagccctggtagctgacaaaggctgggtgaatctggttatgctgtcgtgaggacccaattggggaaaggagggccccaggaaagacgagagctttgtggagaagcagtgagtttggaagacagtggagtgtgcaaagggcaggcatgatgcaggagtgatgcgttcacgtgtccagaaagaccctgctgggaagatgaagaagtcagggtagacacgtggcaacagggagtggtggtgactgtggcaaagtggaggctagaccccttcctcgggcagagctgtgactcattctaggtgctggggtgggtaggaccagtcatgtttgcattcagcatcgctgtgttcccatgtgtagctatcccacagtacataagataaacacgcaacacctcccaagccaaataagaagctttggagaggggtgtgccatcctggagctgccggtctgaggcgagggtgcatgtatgcattgagggaggagcaaggaggcgagagggtgcccagagtcactcagcatgcaagtgcaggtcaccagacctttctgtgtccaggccctacagggggaggatctataggagaggaagaacgggcagagagtagaggtggtcatgggagggacacagaaggtcactagcttttgttacacacaaatgggaagcactgcttgccaaaggtgattgcttcacaggagggcggaggcctgagctgtgcctcatgggggtaggtatggagtgacttctccagctctcatctgtgctgtgtaaacatttggctctgcttgggatgggagaggagttgttttccttggttggttggttggttggttggctacatctggcgaggggtacactagagctggtaccgtatatgcctgagctccacaccctggctggacatgatcttaagcggaggagaccttgctggtcccacttggctgggccttgttcacactcagatggaaatattgaccccacagcccctcccatcatggtagccgcagccttgagtctcgggtgtttgctctggtgagatacatgatccccttaggtcctggcctcttcatctggaacccaggggctcgggtggaaggaaccagcaccctgacctttccactcagccccgccttcatcttcagtatcccctgctcagcatcggggaaggaacacaagggagtccagagtccctaggacacccaagacctagggacaactgagccaccatactccattctttatgggacaagatcattttgtctaatcataaaatagatggttgtgtggagcacactctggtgtgctcactttccatgttttgaggttggtggtggtggtagtggtggtgaagtgtgtgtgtgtgtgtgtgtgtgtgtgtgtgtgtgtgtgtatgtgtgtgtgtgtgatgcagcccagtttgtctttaaattaaaatagcagtcaaagctgcccttgaactactgctttcacctccgaaatgctggcatgtgtcaaccacatgtggcatcagttttaacaacacaaactccaaagatggctgcccccattcggtcactgcaccacagccactgtggccaggcttgttggggtgtttagctccaccacggggggcaccaccctgccccgcaactctgaggagggactgtgtgcagagctgaacagctaaggggtcaggagcaggctagcagttcgtgcgcgcgtgatttgggctcggagttaagtgcagggatgttcactacctctgccagccagtggcagcgattgttgggaacttagatggagcaggtttttcaggataagtgtcttcgctggcatcgccagtgcttgatgaaacgagatcactcttagtgggttaaggctcttgcctcagtctggtgacctgacgtaacccctccaggagctgcatgccggaggagagaggccactcctgtcctctgacctccgagtgcgtgtcctggtgagcgcacacactcaatagtacaatttaaacattggaaataaagctctgtacaaaaacaaaaacaaaaacaaaatgtagccttgaacgctgaacaggccaccacactagtgtctggtgacctgtttgtgaaggtgaccttgggccagacgggaggaggcagaggagctatctcacgcctaaatggagggctgctgttgctcaaacagcacctgtgacatgacacctgcacatctcagggcaacttccctgcagaacctgtgtctgctgtctccctactccgtatactcatggcatccaggggcccccagcgctgctgtgggcactgtttattttcatcggaacccttatgacagtcaatattgtgcgttcatcaggatgtagaattactaggagatgttggaggaactttctagactgggttaactgaggccagaagaaccaccctaaatgtgggtccgctccctggactgaccaaaaaggagagagtgagctgagaaccgtcattcctgaccgtggatgccgtgtgaccctcggcatcacgtgctttctgtcattccttccccgtcacaatagactcttgaactctgctgtgaaataagccacttcgctccttaagatgcttttatgaggtatttacagcagcagctggagaagtaatacagacctcctcaggtctcccagctgagccgcccaggctcttgggcggagccatcatggagtggtgaagccctgaatacacaggccattcagagctgtttaggggaggtgggcgaaagctgagacttgggagagatgcaggaaagaggtggagaccaaagagaagcaagagagtgactcccagggcctccttttatgtgcagaagctgagctctttgcctggcctggaacacctccctcacaaagggtgttgggactcagctgaggtaaccatcagatcctgtgatgtcctgagactccccgtggcctgagactcccggtggcctggctgaagtcctgctggataggcagctgtaggaaggggcattgcagagccgagacaaaaggcaagagaaaaaaatacaccggtcccttttatttgaccctggatttctctggcttgtcctaacttccttctgctccctcctgcaccatctgtgcctgcagtccacactcagccaactcatgagtctcctcatgaacccacactggtggaggccatgttccaaggcttggtgagcatcaggaggctggcgtgcagcccaatttcccagcctctcatgaagacattttcagataacagcagaggctccaattactgctccctctgctccctcacccccatctgctgccctagttactaaaggcgcttcctatacccatcctgtccaccgcagtggtatgagctagcatcggtgatgggcccattctatggacaagcaaactgagggacagcgaggcggcgcgatgtgttacctctctcacattgctgtgacaaaatgcttgacaggagccacttaaggaagggaggcttgagccaggcgtggtggcgcacgcctttatcccagcacttgggaggcaggggcaggtggatttctgagttcgaggccagcctggtctacagagtaagttccaggacagccaggcgatacagagaaatcctgcctcgaaaaaaaacaaaacaaacaaacaaacaaaaaggaagggaggcttattcaggctcacagtcagaggggacacagtcagtcaaccgttgcttccaggtggctgggcttgttgcatctgcagtcaggaggcagaaagaggtaaacgctggtgctcggctcgctttcatccttttatttagtcctggactccagcccagggatgtcgcagccagccttcagggtgggtcttccctcctcagttgaatcgctctggaatctccccgacagacactcgcaaaggtgtgtctcccaggtgattctgaaccctaacttcaggctgacaatggagagtagccaggggacacacctggattcctgtcaacattgctcctgagctctagtgtccctgctgctctcattggtcccctggaggccactgttgggtgtagaggagcacggagagctatccattttaacagttcatttgacatctagactgtccgggagagaggcctaaaccttgggaagccctcgcatctggaatgttcccgtccccatcatcttgatggcttttagccctagtgtgaacagctcatcgctagtcagaacaaaccgtccagatcggctcacttttcatagccaaaggaagcagagagtagcatgacatgactgatcccgctgtgacccaaatcctcagaggtatctcatctggaccaagaatgcacagatagcagactggagggtcccagcccctagggacagctgcagctcccgaagagacctttaaagacaagctttcctttatcacccagtaagcccgtcctgggtatttgtcaagaaaaagacctgctgtgcaggcctgccagtaccatgctcactgcagagcagctgcctagggagacacagctggtgccaacagctgtaagcaggtgtatggtctgtgggtcggccacaggatggaccacagctcatcaggaccaagttcttactgtagtgcacgacaccccatgggcaggagaagagggtccccacagggacatgtgctgtctcgtcctgtgtatggtgacttctagtgcaactggaaggggcaggaaggagctcttgagggtcagagaattgtctatcttctctctctctctctcatacacacacacacacacacacacacagagagagagagagagagagagagagagagagagagagagagagagagagcgcagggactgtgcctctggcttccatcccctgcaccacacagaacaggcatgtagatacgagcctgaaatcccagtactcaggaagtagaggcaggaggatcagaagtccaagggcctaggctacatgagaccccatttttttaaatagtttttttattatgtattttcctcaattacattcccaatgctatcccaaaagtcccccataccctccccccccactcccctacccacccattctcactttttggccctggcgttcccctgtactggggcatataaagtttgcgtgtccaatgggcctctctttccagtgatggtttactaggccatcttttgatacatatgcagctagagtcaagagctccggggtactggttagttcataatgttgttgcacctacagggttgcagatctctttagctccttgggtactttctctagctcctccattgggggccctgtgctccatccaatagctgactgtgagcatccacttatgtgtttgctaggccccagcctagtctcacaagagacagctatatcagggtcctttcagcaaacgcttgctagtgtatgcaatggtgtcatcgtttggaggctaattatgggatggatccctggatatggcagtctctagatggtccatccttttgcctcagctccaaactttggagaccccattttataaaggaaaaaaaaaaagagaactttaacactcatagaaactgtgtggcccacatctgtcaccccagagctcggaggcaagggagacagctcagtggctaagattgtgtactgctcttggggtgtggttcctagcaactgcttgtaacttcagctccagagggatcattgtagagtgcacatttgtgcgcgtgcgtgcgtgcgtgcgtgcgtgtaggggttgggaatgtgtctctgtggtagagccgttgtctaccccagctccatccctagcactgcaaaaaacaaataaccaaacaaaaacaccaaaagcccttaataaccctcagcccctgcagggcgcattgcacgttgcacaacttgtgtctttagcaaatgggagaagcagagcccttccctcagtcctgcagcgcacagtcagcaggtctagggcgggtcctgcagcctccgacacacaccacagacagccctatgcccagcctgagcgggcatcaccaggctccaagccaagtcacacagccgagggtctgaggatatcagacactcgctgaggctatttttaagcctaggtctaattaggtcagtgtcgaccccagggctgtctcctggtcttcagagagccctgctctaagcctcagacaaagcaccctcagttacttggcagctctggctttgtgccctgcatcacagggcctgcgtgtcaggcgggcagagggtgggaccgccgcacggccaggatatcctccaggcacaagatattgggcaggactagacaggccctctctgggtcctgtctgcctggctgcaggtcaaatgataatggcagaggctgggtgtggaggagccagggttacaaatgtggagctggttatttggtgcgaaagcttcaactcaagagaacagcctaaaaggaggctcttaggaactctcagccccgcgcccccatcacatataggtacattacataagtacatacattgtgtacttgatgtacatatattaagtagctgtgcacctttgtgcagccgcttaacctctctgcgcatgggctccttgtctacataaagaagatcacaatagtcacttcactcacacacacacacacacacacacacacacacacacgtgcacacgtgcacacgtgcacacacacatacacagaacctatagcctaggaagcatttaacaaatataaggtgttcttactataattatgataaccaccaaaatgctttgagcacttaccaagttgacagtgatgatcagccaccttaaggacaaagagcctttccagtattgtatattttctttttctctccctccctcttccttcttgcttgcttcttcctccctccctcttccctccccctccctccttccatccctccctctgtcatttcctcctccctccctaccatccttcctccttcctgcctctttcctcccccgactcactttttagtgagtccctcaaactgttctggttcctctgggtgggaaacaagaatacaagacgacctatcaccacgctgcctgcatgaaacccctcaatgtttggtttcataaattaaaaacattggaccacctagctggaggcagattggaatacattgtagaacatcccttctggagtcagttctctgcttagtcttggctggggtgacctccctgaacctcagtttcctgctctgtaaaatgggcacaattttgtcacctacttcaggagctgtcatgagactaaaatgttgaggccctctgatcatcacacttttgcactgactaagccaagctctgggaggcttgctgaccagttgtgtggctggagagtgacggtgtaataggtccctgaaagggcacagaactacccagtgtttgtgaaccccccatgttagatttgttctgtgtttggcagtgaactcatttctgtcagtcatcacggggagggtataggtaacagatgccgtttagatatactcagcaaacaaagatgtcatttccctaaacgcacatgaaaaactagttggcctttcagaaaattcttcttttgtggccagagagttgggtcagtgagttaaggaggcttgcaaccaagcctgagaacatgagttcaatcccccagtgtccacctaaggaaagaagagaaccaactccttaaagctgtcctctgacaccccccccatgtgcactgtggcacacccatgagtgtgtgcacacccacacactaaagaaaaataaagtacgtctctacttgtagaagctcttgcatgagctccttttgttgtgcgcccctcggctgtgtaatgccgcgctgtgtgatttctcagggcactgcagtgtgtggcaggtcacagcaccagcacaccttgcctacccctcctctgcttctcacaggctctgagccctgaccacacctccattacatcatctgaaaaatagagctccttaaacccagttcctgtctgagctcaggactgagaaggcaatgatcgcatctctgcggagatcactggccatcacccagcacagtagcaactggcgcgcctggccttcatagtgataccatctgcctagtgctttccggatgtctactgcagtccacactcgtctctcacctccctagagctgaccccaggggacagtaagggctaaagtgaccaggctcagccgataaaggtgcttcctgccgtgcctgacatcctgagttcaaacccagagacctacatggtggaaggagaaaactgactcctgcaggttgtccttgggcctacacacacacagacacacagacacacagacacacagacacacacacacacacacacacacacacacacacacacacacacacgcatgcacgcacgcatcacttactcaagtgcaagtcaattagaaaatctggcacagcctgggagctggaggtaaggctcagtggaagagagtgatggtcagggatgcacagggccctgagtttcagctccagcatgaagaattatgtggggctggtgagatggctcagtgggtaagagcacccgactgctcttccgaaggtccagagttcaaatcccagctaccacatggtggctcacaaccatccgtaatgagatctgactccctcttctggagtgtctgaagacagctacaatgtacttacatataataaataaataaatctttaaaaaaaaagaattatgtaataataacaacaacaacaacaatagcagctgcaggtgtttggcttgcaaaccccattctgagttcgaggccagcatggactatagagtgagtcccaggacagccagggttatacagagaaaacctgcctcaaaaaaaaaagttattttcgtgtgtgtgtgtgtgtgtgtgtgcgcgcgtgagcgtgtttgcacacacgctcatgtgcatgcatgcatgcacactcacctaagatcagatgcctgcagagactacaagggggcaccggatcccctggggctggagttaacagtggttgagttgcccagtgtgagcgctgggagatgaacgtgggacctctgttcagtgagtatgcataattgctgagtcatctctccagactcatgagtgtgacatttgagtgacaggtccgtgggagccagcatggcgtgctgcaagggtacagtagttcctcatgctcccaacctgcatactttggaaaggcaggctgcttcccagaggcccaggctgccctgtgcttcccactcaccagctcccctccataccatactcccaagtcctattcaaagtaccttactatttttattttatctatatgagtatactatctccagacacaccagaagagagcatcattacagatggttgtgagccaccctgtggttgctgggaattgaactcaggacctctggaagagcagtcaggactcctaaccattgggccatctctccagctcccatcaaattaccttatttccttattcatgcgcccatccattcatttttagagagagtctcgtgtagcttaggctggccccaaactgctgtgtggctaaggctgaccttgaactcctgacctttctacttccacttcctgtttagattactcaggcactgcacggcagaggtcatgtagttctagggattgagctcggggcttcctatgctaggtaaaccggctgcccactggggctgcagcctgagctcatggcctttcctttctcctagctgcatctccgcaactagttgtgttggtagccttggcaacactgtttgatggacaggcttacttaaccctctgtctccaactgacagcttccaggcctcacatctgggtgatctacagtaagtaaagtaaggggtgactgtaataggactgggaccagagtagatgcctgcttccagccctgagtggtgtccttccttagtcaccaacttagtgaccttaattaacagtcacttgtgcgagcagaaaggacattgtggggacagtggttttagctgccagagaggccagctccctccgagcagctgggctgtgttggtttggctttgctctcttgtccttatttgggtcacttagtggaagcaagcagctgcaggtctcgggggatccctgggtccaggtcctctctggctcacccctatcctgcctcaactgtcatgtgtccacagggaatccctagaagagtggcagtctcttctctgggggtgacatgctggtccccagcagctccagaccctgctctgtcttcctgggaaccagagagtttccagaagagagaatcaggtggctctttttgggttctgacaggggagagaccacaccttcagggcaagggagtgtgtgtgtgtgtgtgtgtgagagaggaaccagaggaactgattggtcaggctggccacgcccagtcttagaaccggaagtgcacagggatactagatgctcacaggatcgtttgagtattcagggaatagctctggtcaacctgctcccccaatctggtgtgtcagtaccccagccttcaggggactcccacccccaccccgggcatcatttatgtgacaagcttggacagcttcacactctgtagagataagggacatatttgaagtgtccctacagtggcctattttataactaacagttgttagttataatatctattttcctgtctgccatttctccctctttgaagtttcctaaagatgcccacacccgtgtggtgctggggtctgagttgtttctctgggatacttgtcgctgattccccagcacctgggtacttggctggtgtctgttggcccaagggaatgggaacagatgacccagggctgtacaaatgtccagagcaggcaagagccctgagcctgtgggttaatctcaacccctggtcctctgctgatgtagctcagtgagggcagagtcctgggacacgagacaggcttcaggcatcctcgtgaatggccatgagcctcaagttgagggatcatgagactggtggtaaagaggccctggtcagccttcggtttggacccatggtagctgatctaaggccctggcattcaacctcactattgcttgttttctatcaggcctttatccctctctgcttctgccattggcggatgaagttcgtttctcacgggagctgtggatagaaggtttcgagcagggggggggggggggcggagacaaacctgcagggcatgggcgtgggtcacgtgagggggcggggcagcgggtggggagcggattctggactcttgactctggtttgcaaccgagctctgttactgattagcaagcttctttgggcagagtgagatagctcgtggggcctcagagtccaccgcccccccccccgccgccccgtggtgggggggtaatggccacagtgtgttcgtttaatcgcaaggatgaaggtgatcacctggggctagtgatagcatcagtgcatgttagctattccgaagattttgaagacgctccccgtaggaacaaaagccccctccccagtaaagtgtatgaccctttatgtgtaacctgaagctcactacatgcgtgtggcataccaggagtcccaactactatagaaatcagcctaatgacatttaactggaagacagccaatcatggagtacctgtggccatttgggctggctaaattacacccttaactctccctggaaggctacaccatcttcccagaatcgcatctctgttaaccttcaggctggtgacatggtgattcgtcttcaaagttcactcttgagacctgtgtagttgagtttttaaaaaagggaaaagtccagccgggcggtggtggcgcacgcctttaatcccagcacttgggaggcagaggcaggtgaacttctgagttgagaccaacctggtctacagagtgagttccaggacagccagggctacacagagaaaccctgtctcaaaaaacaaaacaaaacaaaacaaaacaaaacaaataaaagtgtcttcacattgtgcttaaagtaagtttacagttctgtgttggactacattcatagctgcccaggggagagtgaagctttcgggccatggctagacaagcctgcgttgtgatggggtccttgcgtatgtgactgcatcatagatctcgaagggaaaaaggtacctgtggctcatctagttggcttcagcagtccctgagtctgaagagagagtcaagcagggagggccagggtgccaaggagcatgtttgcaagatagatagagctgaagtcaggggatgctggtgacatcgggaagccatgaaaggctagacagtgggtttccatggaatggtagccctgcttctcatgtaggattctggaacttctggaaaaatagactagctttgctttaagccgctatgttactggatgtctatcctggcagccacagggcacatcagaccttctcagtggcagggagttgagagaattctatgatcatcctgttttcactgtgaggacagccaggactgtccctgatgcagagcatcccacctggcccctggagaccctgctgggtgtcaccacaatacccttcctctcctggctcccagctgggggctactcctgtgttgagcctcctctctgttcccaaggccttctgggaggtgtggcttgcaggagagacccgggacactgctgaggcacttctcctaagagaagctgcctattaattctggagggaacatcagagccttgaaacatagtagccatgtcaagacgaacaggaccctccccacttgagttcatcagggactgaatagcagggatagagttctcagagcaccattgtgcatgctcctgcctaccctgtgctcaggggaccttgtgctggctcaagctggctacaacgggaaggtttacaccatagtcattggccaaggccactgtggttgtcatggtaaaatttggaagggaggtcagaggacacaatttctgtataccaccatccatccatagagtgcacaggagactagtaatagatccaaaaccagggatgcccccgttccccgtcttgtttgcactgagcctgaaacatctgttcagggaacgagaacgaggaaaagcccactgcacaggtgcagtaccacactacccccccaactctgggcagccctggggatgaacttggagccttgtcagtcctgggcaagcacattacctaacactgagctacatcctcagccctctttttacttttttattttgagataggactcactaaggtacacaggctggctttgaactcactctgtaaacaagggttatctttggatttgcctgcctcagcctcacccagtacctctgattacaggcctgcatcaccaggccctgctcagacactcctctcaccagcccctgaaatactctttatttatggttgattcaatccccagatttagaagggaggctctagagagctgcctgcctccttgctcctggaaggctttattttatttgtggggtgtgtgtgtgtgtgtgtgtgtgtgtgtgtgtgtgtgtgtctgtctgtctgtctgtctgtctgtctctgtctctatgtgtgtgtgcacgtgtatgtgggtatctgtgtttgtctctgtgtgtctctgtctctgtgtgtgcatgtatgtctgggtctggatgtgtgtgcattcctctcagaggccagaagggggcatcatctcctaaagatggcgctatgcaggtgtttgtgaacttcctaatgtgggtgctggaaacccaacctcggtcttctggtagagtggtacctgttttaactgtcaagccgtctctccagccctggaacgcattgttattatcaatttaaagatgaggaaaccaaagctttaagagacacagggaatacctggtggtaagcccaaaaccaagttgttgttgatggcagttactgccttggtccttcacttccctgaggccaccacctgtggggctagaaaaccacctgccttcccctctggcttctgttcccagccacccccagcctcagttcctacatgatcaatccctttggcccacctcactccagtttgctggtctccccagcccttacacagcccacgcccagtcattaattacccagtccatgggggcccctcagcacttccgcaggcgagcacatgcctcaggctgattagctaacatttaatattttatcttcgtctgaggggtttaaggccaggcatgcatgacccggtccatcctcggccattctgtgactggagtcctggagaccaaggttgtctgctcatctgacagtgaaacttgggaagagatccacttccaggctcactggggtgtagggattgaccccgcccctaccctcagacataggtgtaggatgaaggctgtggtctttggggccttcttcctctgatcccttgctaagtgaatttcttctccaaatggcccacctgcttcattgaagcagaggcattgagcagcagaccgtccctttgctcataacaccacccacacaatctcctttatctcatcccctcggccatatcttaactgaccagaagcaagctgtgtgacccgcctacactcaagagcaaaaccaagaacaccaggggctggagagatggctcagtgattaacagcattggctacccttactgaagacctgggtttcattcggaacaccacgtcgtggttcacagctgcctgtaactcccgttctgaaacatccaacgccctcctctgacctcctcaggtggcaggcacacaggtggtgcccagacatgtctgcaggcaaaacacccacacaatacggaataacataaaatcagaagcgagaacccaaccaacatgagtaccgggtggcagggatatcgaggccaccttcagagtttgtttagagaaagaccctacaaagggggacaattccacatggctcttatgatgatcaaataaactcatgtgggtcaatctcttcatgtctttgatgtagaaaaatcctcattaatgataacagtactatattatcatatatatgatatataatgacatatatctttattaatatcatgtatatcaggtggaggtaaattgagcaactcctaaggagggaaaaaaagattgaacaagatttttaagacatgcttcccttttcgtggaaatagaggccaccgggtcaggtgtctggggttgaaatggcagctctgtggccatcaggagccacgcctctccttatcttctcgctcagtcattcattacccctgccaagcctgagccccagctgtcacatccatagtacaaccaggaggaaggaggagagagatcctttccattgaagaacgcttcctgagtgggcgcccccagccctctgctgcttggaactcattggccagaactcagtcagatgaagcagctcgctggggaggctgagtaatgctgtctgggttccgagaaccctggggagttgagtgtcagttttcttaccatggaagaagggaagagtagacttcaggaatggcctcactcactctccacaggagaatcccagccagcgaacaacatcacatctcttctccagcccccctccaactcaggtaggaaaggggataatattagccagctcccctgcttccatcaaagcgagctgggctgtacagtcctcttgggtcctgctgggtccttcaggctgaggaggggcaggcagccagtatcgcctctgcacccctctgatactactttccagctcaggagttctgctgggcacctgaggagacaaggcagccttgtgctaggaggtatgctacagagatcacaaagccaagtggtcacaggagcctggggcatgggtcttccttccagagcctaggagaggttaccggtactgtctcccctgcaggtctgcggcttggtatttactgttcaaaccagttgctcatctggagacagagctggggatttcattctctgtaaaagtgggcggctgtagaaggtacccttccagggcggcgggaagagacaggaggtgaggtgggaaaggctttggccttggaagttgtcagctgatgggagagagggatcagtagtcaaggggagcagacccctgcagggttgggttctagctgactggatttgtgtgttgaagccctccaggacctcagaatggaactgtgtttggagacaggacctttaaaatggtgagtgagctgatacagaatcatatggctatccttctcctttcaatgcaactggtgtccttatacaaagaggagaggccaagccaggcatggtggctcttgtccatcatccccagtacgtgggaggtagaggcaggcgaatggagaattcacagtcatcttcagctatttggcgagtttgaggctagcctgggctccttgagaccctgtcacaaacaaaataaaccaggagcagaggacacagaatcaatagaggggtggccaaggaaagtggcctgaaacaaagcaacccagtcagcaccctggctttggggaagtccccgtgtgtgtacctggccacggtgaccaagcagactagtccgggccatgactcctccagctccttcaggctcccacctcagcctgctaccaggtttataattaaacaacccaacactggttacttaaaccacagccagaaaggaccagagctgtgggggccacagtgactcacacctggacacaattcaaggagaaaggaattttccctcctgacctggcaagggcttctgggaaggagctgtgaagggtgttgggaggccttcaataggcggggtatcggcttcaaatctgtgccattcactgtggggccttgagcaggtgtctgagtgtctctgagcttcaagtttttctttgaaattattcttgaaaattcatcaaggaggtttgggaaatttgaacatgatcgtgactcaaagtgtgatgatattagagaaataacgacttgttgataaaggtacatgcataatgagtaaaaaaataatagagggcataaataaaacaaaatagtgatattcaaacactaatgataataggttgtaaataataaagaacacctatgaaacacccacgtggtgcctgataagccagtcagattctcagatgagcagttagagaggaaaccggctcaccaactggctacgtgggcagtggggcaggaagagcctgcgctgggggaactcgctgtggtccactgctccagggagagaggcagacaaggctccagaggcagagagttgcgggaggctcttacaggttccaccctgcacaagaacgattttttgtttgtttgtttgtttgtttaaggttttcaaacagcctccaccaaggaactaagatagatagatagatagatagatagatagatagatagatagatagatagatagatagacagacaaagtccagatattgaaagacaaatgttcccccgtgtgccctcatggatagaaatagccaagaaccacagagggctgtctctcagtctgccctccccaacgtgccttggttagagccatacttcctcatgtgttgggccctttgtcttgtttggtctcaggtagcccaggctagccttgaacttactactcagttgagaaatgaccttgagtttctaatccttctgcttcggtctccctggtacctaattacagacacgaatcaccatgcctggtttatacgaacctggggtttgaacccagggcttagcgcatgctgggtaagcactgtcccagctgagccacattgccaggctcgcacctgggactctggaagtgccgttctgagaaagcagagtgtctgtggatgaggtaccagagctttcctccctcaagcctttgccccaggtgggagtcagcacacacgtttgcccgggtcatggcagagccccagttaaagtgcaaacccagagcgagggttacttgctgggcctgatgcacaggctccagaaggagtggctgcaagagggttgtgtatctggaggaaagcactgcatggtgcctggtgacaccgactaccgactgccgattgccgtggaatggagggccatgtggtgacaggtgtaggaatgttgcccataactacatcctgtggctgcaggaagaaattccccaaaggtgctaggtatgcacacattctcagagttcccagagttcagacgtctaagtcagtgtctgcggatgttaaccagttgggcgggctctttcctcaggctgggagtaaaaccagtttcttccattttcgtccttctagaagcttcccgcacccctcactgtgcctgccccacgtgccaccaccctcttagctgccacttcctcctatgacctcttcacccctgtcatgtaaaaaacatgtgtttttttggactcacccggcctgcccagagaaatctgccctgctcagatctttgcctcgatcacagctgaaaagtgctttggccacataaggttccagtctgaggttgcggggattgctggggatgtggcttagttggtagaatgcttgcctaacgtgcatgaagttccaggttcgatccccagcaccgcataaactgggcacggtgctgcatgcctgaaaccctagcactctgtaggtagagggaggaagctcgaggtcatccttggctgcagagcgagttggaggccagtttgggctgtgtaaggaagactttatctttaaaaaataaaaaaggaggagggggaagaagaggaagaggaggaagaggagagatccgatggttatcttggagggtcattctgtgggctactgtgtgtcacctcccagggcagacgctctcagcaggagtccccaggtcagcaggacagagagttaaatagggcttgtagcctccctcccagtcccagtccccatccttcaccttctcagacttggccaatgcctctgaaagtgtcactgctgctcttggggacatgtcagcctcatctccagatatccagaagatgcctgagcccttggaggcaggcctctgatctggctgttctgtttcttcccatgagcggaagtctgggcttctgcccccaggagtgaggaaagcccacgagaggaggccagtggacaaggttacagctcttcagcggggaggccccagacaagcttcacagcctctgtgtactgagtgcccctcccctgtaaatgagcagccttgggacgacacttcctttaggttcacagtcggggcagcaggctcagctgtacagagcgtgcggtgctcagcacagccagggcaggagctcagagccagcctggccatggcattctcccacctttgccagggcggcaggacagctgcagcccgtcttagagaggccgatgggagtggacagcgcggagatctggtggctgctctgtgcccatggactctgttccccctagagaaagacaggccaccagtgtaatgctgaccagggaacacaaagtgctctgagcacttatgtgctgggtccccggtgccagtctggtccatagggctatatatacatcagccacttgctgagagaaaagcttgagacaaactcccatgggagatatgcattactgagcctgcctcctggggactgcatcctggggactgtaggtcagacttgatgactttaacttaacagacgcttaagcgaattagtgaggggcctggtgatgtcagcttatgaagtccaccagcgccgtgtgcagggagcctaggcaaggagctgcctctcttcccagcaaggctggtgcattctgggagatgccggcttttctgttctatggatcacacaggttgtttctctcttggactgccccatctcctaactcagactccatcacaggaacgtcaacatctcaagacactagaggtgctacctgggttaaaaaaccaaaaatcacaagttgttgaacgaagtatacttcacctcccagccctgtactggctgtgtgactttggaagagttgctttgcctctctgaacctgaatgtctttctttataaaaccaaactagaagctatcaaatagttgctatggtttgggtatctcttgactgagtttttttttttttttttttgaaggttcttgtgttaggagatagttacccaatatggcaaccttgaggccattgggtccctagagatgcctatggtctataagcaagtcattgggaaaggactcatagttcagagaagttggggggaacacggtgaggtcagggttttacagtatagcccaggctggtctggaacttacagtgatccttgtggctcagcttcccaagtgctcgataccaggcaagcaccctgctgtcactcacaatgagctgtccccccagttaggcattctctggtctctgagatgggctctgaacaaacgtcacacgcctgtccgtctcctacaccgcatcacacagaatgggtccaggaatgacataaagcaaactcttccaagtcaaaaagccgttcattcgcctgtcagtctctgtgcttgtgcgatgacagagtgcagaacctgtctgcctagcccagggagtggcctcggggactcagccttatgagagccattggcttgggacacagggttggccagatttgattgggaatcttgacccaactttttactagttgtgtaacccaggatagagactctggggtggtgggatacatcacacctccaggtggctgggatttctgggtgagtgcccaggggtgcctgactcgcacagagctggcagtgccatgggtgtttctaaggccacctgtctcttcctcacagatgactcctggacttcgtagtgcctgcctagctgccctccggcatcgaagccctcctgccctctctcttctgttttcccaggtgcctaaccacagagatctcctgagctgttgaaataggcacatgatacctttggccctcagtcctcagggatggtggtccaaaattccctgattgttgcggccgccagcagctcgcaacatgaacaacggttcgactgagaaggctactcgagctgtaagagaggaatctagacggggcgaaagaagaaacggagctaagacaaattcattctgatcaaagctcaaattttattgttgcgacactagttataaaggaagggggaggggacccgattcccgctgaataatctctggtccagtagaaaggtgcacgtgtgtggctccgcaggttctagcagtgggcgtggcagaatgaatgagcaggaagctccacccctgagcaagcaggtttcaggctgggagaggagagactacacctgatgaataggaccccaagagcagcagcaactcagaggtttcctgtccccccaccaggtgacaatgggccttggtgtcaaaacaactatgggctagacttggcaggtcccactggaattcctcagtggtgtcaatgcagcacagcctgtgtccccagagcaaaacccctctcccaattttgcagctggacaggcagtgggtaatgccggggcagtggccagcagcctctgaggtgcagcaagccttcaccttggtccggcaagccctcttctcagtgaagctgagggaggcaccaggaagcctcagtgagttcacctcccagttcctaaactgcagagcagcccagccgggctcaggagaccagctcgggctctctgccctgcagcagctgagaagtccgttttcagggtttttttgttttgaagtcacagcgctgggaaatgggttatagcagtggctctcaacctgtgcggcatgaccccgttggatgtatcagatatcctgcatatcggatatttatgtgacgactcatgacagtagcaagattacatttgtgaagtagcaacgaagtaattttatggtcgggggtcaccacaacacaagcaactgtgttaaagggtcgcagcgttgagtgggggtcgtcgagaacagctgggaaacagggaggcagggcccccagcactgagccagtccccagcccttactgtctggtttcattttcactgctggtcttgaagttacagtccatggaaactgggtccggctgagaatgagcagcggtggcggcggcgactcactggcctcagccaggcagaggaagcactctgatactggagcagagacttcctcccctccccagctgggggaggctgatctctcctggggaggaccagagagctgggctactgcaacctcaggccttccagggagtgtgataggatcacctacacattcattctcattggcatctgagaacaagatgcagataccccatgattgctgagttagaccttaggaatcctttcctgtccctgtccacctgggcctggagttaccgccttgatggagatatgagttcaacatttaaacctgctaggtattcatttgtccagtctacagatacttattaacggcctcttgcattaccgccatggtgtgccggcagtcaggcagacaaaagctgcctttctggaaattgagactccgatccagtggccaaggagagccaaagtgagatcatcacagactgaggtggtagcctccgtccgtggggaggaatgtcacctggaaaccaagtagaggttgtgatttgggctgacacatcagattggcctatcatcttcctcttgggcgtgacctttatgcctgatggttttgctggggtgctcgtccgtccatcagacagtgacctggatgtgtttctattttcttctgtggtgttgtggttagcatggagaaggccatggaagagctggggaccagcgtcacctgtgggcgtcacctgtggactgtcttcattctgcagcctagggtagttgactctctgtctctctgtctctgtctttctctttctctgtgtgtctgtgtgagtgtgtctgtgtctgtatgtctgtgtggtatgtgcacatgtgtgccattgggcatgcccatctgtgcatatggtgtgacggcagaggagggtgtcataagtcctgatctatcactcccccttttatgcccttgagagagggactctgctactacacctggagccctagcaatcctaccatctccaccttctacaatcctagagttacaggtacactcatggctgtgcctggctttttacctgagtcctggggatttgaactcgtgtcctcgtgcatgtacagcaggcactttattgaatgagccgtctccacagctctctttgacttttttgcactacccctttgtatagaggcctacctcatgctcccagcctcccaaaagatgtctcactatgagtacctcacagaatcaacatgtccacggcttccttagaaccccatcgcttgctttcactggtgggtcagtaactgaaggtttgagcatggcacctgtgcaggagtctgcccagaacctccccagtagccccggggaggtgacccctcttctctctgctaacggtgcactttaaaacccaagatacagccgggggtggtggcacacgcctttaattcccgcacttgggaggcagaagcaggcggatttctgagttcgaggctagcctggtctacaaagtgagctccaggacagccagggctatacagagaaaccctgtctcaggggaaaaaaaaaaccataaacaagatacagcatcactcctgcgtcgccagagtgtctccaacgtgagcggtgaggggcaggtccagctctgggctctagagaacagcttgtcagagccagatagccttatctgccttatccccactctaggttgctacttgttaagggcatgctgaaggctgtgtggcccaaatcgtctaagcataaaattagcttctgtgtatattcagcaagggaaagcaaaccaggctaaatataccacagatccacgagcggtcaacaagccagatagaagacaaacagcaggccagtgggaacctgattttcccagacccaggggctcatgggttggagaccatgggttctgaagaaccctgctaggtgttctcagatggctcagtgcttggccagtgtgcatgaggccctgagttccagcccagccccacataaaccagatgtggtgctacatgcctgtgatcccagcacttgggaggtggagacaggaggatcagaagttcaaggtcatcctgggctatataataagtactaagcccgggtgggctacatgagatcttgtctcaaaaacaaaaacaaacaaaaaacaaaaacaaaaaaaaaacaaatcaagcagcttgtatgtatgacaaggtggcatcctggtcctgctgtagctgtctgtgctctgtataccgcgaacacatagcttctacatgccatctgcacatgtaaacatgtcatgtgtgcccatacacacctctgatcatgcattcacacacgtgcatgtgcacctgtatgtactagccatgcatatatacatatacacttgtgcccatgcacacaactgtggcttctgcatgtgaccctttcataccaacggaacttcccttctttgaagcttccagaagccccagcctgagctaaaatacacacacacacacacacacacacacacacacacacacacacatgcctagctccagagctcacacgcattccctcatttcttgtcattctttgtctctgcttcctgcgcgtccccttccttccttcacccaggcatctgcagtgtctcccgtgcaacctgcaggtagccagatgcaccagaaacacttactgggtggaagaaagggaaggcgaggccttcaagctgagagaggatgttgtcccagatatttttagagtgatttttaacaaagcggagcgtttcagatgaaagtttaacgagaaaacatctccgcagcatcatgtttcaggctccctgatcagctgggctttcagaaaggttggaaagaatgcaggattgaaaacaaggcctgtccatctaaggtcaaccgggcgatcctgctcggcaatgttgcctgcccaccctctgactgaaagctgggcagactggggccttgccatctcctcctccatgatctccaaatatatcctaaactacagccccgatgccttgcctctaggctccttcagtcaccgagggctctggaatcccagctcccatgagtctttgagcagcttcaccggaaaagtgatttggttgtttgggttggtttggggttctcctggacacagaagatgaggagtgtgaagacttctgcctcctttacgaagtcggggagacagggctagggcaacgcttttctttctgagctgcctcacggtctccgtccatgtcactggacgtgagcacacacacacactcaattgagacgtttgccctgtggagggctgagacaagcaaggggccactggaagacaggcccgcccaagtagctagtggagcatacccgaatacccagaaagagggtggtctgataactgcaggggtacttggaggggatatgcagaccaaggtagtgagaccacgtgaccaaggagggcacgctcatcattctaagaaaagggaagtttttccccctccaagacaataaatcaggagccagcgagggtagtatactgagcccagcaggctaactggataggactcatcgttaactcttgcaccccgaacctcttcccccaccccaggtgactggggtgtgactgaccctggcccaagcatgccaactctcgctctgctctcccacatctctcccatgagggctgagagcggaccacacttcattaaacctcacagcatgttgcagctgctctgagcactggcctcactgctggcctcctgcagggacagctctggttttcccttctggcacaggggtggtggttggaacatctggaatgtattagaggtgaggccagggtggaggctggtggcccagccctgcctggtaggtacctccttcacagagaatctccccaagacagagctgataatctctcattccctctcctcttcagatctctcgtctgctccatccacccgggatacctggcatttgaagagagccatcgcttgagagtctacggatgactttccgctgtgacacaggagagtctctttgctgcatggacacagtgtctattggcactactgctttctgatttattttctctctttgagccgggtcttgccccgctccgctgtcatgatggcccaatccaaagccaacggctcacactacgcactgacggccatcggcctggggatgctggtcctcggggtcatcatggccatgtggaacctggttcctggtttcagccctgcggataagccaacgtctcagggcaacaagacagagggaggtggtggcatcctcaagagcaagacgttttcagtggcgtacgtgctggtcggggctggcatgatgctgctgctgctagccatctgcctgagcatccgggacaaaaggaggatgcggcagagtgaggagctggctcgaattcagcagcaggcaggaaccgtgccccactcccaagaagaagacaggtaagacccaagtggccgctccctccatacttgtacacagagtcatggagagagtactttgctccacgagtctgtatttccactctcctcatatcatttttacaaatacccttgtgcttactagatgcaggcttcccaaatcccgtggctaagatggattatcagatgtagcacagaaactggtggggccgagggtcatggggctctaggtttcttgtttgtctctctgtcccaggtgctatgtgtatctactttgattttaaaaggtcaaggcacaaaatttcgcttagcccaaaatatcaggaatgtatttaaatgatagatagtagatagaggcatatatcataagagttggcgtctcccttacggttcatttcattgctgtgatgaaagcactctgacaaacgcaacttaggggagaaaggatttatttagctcacaattgcaggtcagggtctgtcattttggggggagtcaagaaggcagagcccccactgtcaagaacagagagtgatgagttaatgtatacagacagccctgcactcggctctgtgcctccttttcatccagtcatgaagtgctgccacccatattcagttcccacctccactgacatagtcaagaccacgccctgcacacccagacgcaggcgttctcagaggcctgtctctcgagtgacgctaaatcagtggatctccatcccttctgcaaatctctatcttcaaaagtacttatattacaattcataacagcagcaaaattacagttatgggaataattttatagctggggaaccatattaaacatggggagctgtattaaggggtcgcagcatgaggaaggttgagacccactgctctagcgtgtgtcaagcggacaagcataggcagtcagcacagcatctgaccctagatgttcttctcattgctctgaccaaatacgcagagtcggcttaaggatggaagggtttattccgtctctcagtttgaggctggggtcattatggatggggaggcgtggccacaggagcctggggtagcagctggttacatcatgtgggaactcaggaagcagagagggatggatgctggtgttcaggtccctgtcttcttttcccgcttcattcagaccaagcccataaatgatgttgtccacatttaagtcagagtggatctattctactccgttaaccctctctgagaacacgcctgtcctccacctgcctggctttggactcaatggggccacagggaatgaacacatgacaaccacaaggaaatctgggattgagtgggtcatgcacactccaatggagagggaccagcaacagtcaggaaactcaccacattagggggtctctgtgggtgagtagccttaggctgcagtcatggggctgaaactgcacccagtactttctgctcctactggtcgaccctagaccaggaagaaggccttgccatccctgagtctgggacattggcttttttttttggtttttcgagacagggtttctctgtgtagccctggctgtcctggaactcactctgtggaccaggctggtctcaaactcagaaatttgcctgcctctgcctcacaagtgctgggattaaaggcatgcaccaccacccatcgacattggcattcttgacatggcccaattcatgtaaacaatgcacattgacttgggccttcgtctactcccagagaccctcacagacattccagagatgtgtctcctaagtgatgcttaatctcaaggtgacaatgaggatgaaccccccccccatccatcataaaaaaaaaactctgtgaatcaacacaaaaggtaaacacactggtcaggaaacagacagaggttagaaacaattatttcatagctgtcccacctcattagtcctgggatacaaacaaaaagacacttgatcctctctcacctacattagccaagacaggcaggttctagcatcagagaattacaaggttgacgtgccacggacattatggggccagtcggtgggtaaaagagcctgctgccaagtctgacaaccttgatctcaggaacccatatgaaggttgcctctcacctccatatgtgtaccatgacacaagaacctgggcaaatgcacatgcacaaataaatgacaggtaggtagatgatagatagatagatagatagatagatagatagatagatagatagatagatagatagagagacagagagacagacaggcagacggacggatggatggatagttggatggatagtcggatggatggatagatagatagatagatagatagatagatagatagatagatagatagatagatgactcccccagccaccaaaggccagtgttctttaatttggacccaccccacaacactgagaatgagacatgatcttggcatagcctttaggaaggccccagactgtgagacaccgtgggtgggctagagacggacagtggcagacagtcaggggccacggtactcagcatgattgcctcagggtggaaagattttggtttggtttggttttagggaatacagatggagggatttgcaaagtttgtattttcttcctttagatgaagtatataggaaggggagagcgtgctttatgtcagaaatactggtctcatctttctttctttcttccttccttccttccttcctttctttcttcctttcttccttccttccttccttccttccttccttccttccttccttccttcctttctttctttcctttttcatctctccttctcttttctcctccctcctcctctctcctcctcctcctccttcttcttcttcttctccctgcccccctctctcagatactatagatactatgtagccacaactagcctggaacttgctatgtagaccaagatggcctcaaattcacagagatccacctgcctattccttcccaacattagaattaaaccatacccttgtctcattttctgaccatgaaaatacacattcagactaggcatgtaccacactggtcttccttgggtgaggtcctgggtcccatccctaccaccaaaagaaaaaaaaaagagacaatatttgctatattactcttagtccaaagaagcggagccagctacctgttgcagtatgacaggaatacattctgagacatgtgtgcttggtgactttatgtgaactgagacatctacagtgtctccaagtcacatagcccatgtaccagcaccctgtgtgctgtcccctattgagccaaatataatagcataaaagaacacgtgactgtatctatgattaggaagaggagaatccgggggatgtggctcagttggtagagtctttacctaacatgccatagatcctgggttcaatcccagcaccacatacactggtgatgcacacctccaggtgatgccaggactctggaggcagaggcaagaggctcaaagttcaaggtcttcaaggtcattctctacaacatagggagttcaaagctaacttaggccacttgaaaccttgtcttcgaaagagtgagagcagcctagtatgaggaattagaccatggtcttttggatgtcagggagtctcctcctcccctgtctgcaagatggaagccaaggaaactccctgaaggtgcgaacctgagatccagggaaccctcggggaccacacctggtccagggcatgagaagactggcctgcccagtcccacagtgagtcagaacaagggcagaactcctcccagacacctttgttctgttgaggcctgccatggtcaggatgatcctgagacctggggggggtgggggggtgggggggagagcatcttttgggattcagctgagggtctcctctgggaaggtcttctgcccttccatgttcatcatgcagaattaaccagcacacacacttagtctagaaaacgtggggaataacaggaaagaggagaatcagttacccataattcccacccctgctgccgtgtgaacaggtgagttccttaaaaatagggccattaagaagtaaaagcgtggtagcgcatgcctttaatcccagcactcgggaggcagaggcaggcagatttctgagttcgaggccagcctggtctacagggctatacagagaaaccctgtctcaaaaaacaaacaaacaaacaaacaaaagaagtaaaggccagggggctggagagatggctcagcgggtaagagcactgactgctccttcaaaggtcctgagttcaaatcccagcaaccacatggtggctcacaaccatccgtaatgagatctaacgtcctcttctggtgcgtctgaagacagctacagtgtacttatgtatagtaattaataaaattttaaaaaagaagaagaggaggaggaagtaaaggccaaggtgagggagacgttaacattatcgcttggatggatgttccttctctacttggatcgcttggatgtgtcttctctacttggggacacccatcttgtttaacatccacagatattttaggtaccgcacctttggccaaaggacccggcttggcgttgagataaatattcctcccagtatgttataaagtatgaaaggattgcagccaagttcacacccaaagaactatgtgtagtagtagttctgcgaggccttcaccttctgcccttccatcccctcaatgacagaggtgcttgatcttcgtattaatttcgtttttcagtatctgacaaagtccacttagggaagaaaggttgctttgggcttagagttgatggcacagctccctggggagatatgtatgtagtgggagcagagatggatgctggcactcagctcagtgtctcctcttattcagttcagatccccagcctaggggatggtgccgcccacatttagaatgggtctttccacctcaattaacccagtctggaatcccctcatagacaggctcaagggtttctctcttaggtgcttctagatcctgtcaagttggcaatctcattaaccatcacaaccttgatgtatttgtttccccatctgtaaaatgggcataatggaagcccttacttatggtgcggttggcaatggaaaattggttcttctatattttattggttcccttatgctaaaatgcttactgattcattctagagcctgcatatggtttgcagagttggtatgtgtgaacctaatattcaaatgcaacccgaacccactttttgtggacttccagtgacttgagtgtgtactgacactctgtctttatcatcccgcagccaggaggaagaggaggatgtctcctcacggtactacgtaccgagctacgaggaagtgatgaacacgggctacccggaaaccagggggcaggagcagaacccaagactgagcatttctctcccctcctatgagtcgctaacggggctggacgaggcaacccccaccagcaccagggcggagacagagaccagcccagggcatgctccggacaggcaaaactccaagctggccaaacgcctgaagccactcaaagttcgaaggattaaatccgaaaagcttcacctcaaagacttcaggatcaccctaccggacaagaacgttcctcctccctctatcgagcctttgactcctccgcccctgtacgatgaggtccaggcaaaggcgcccgatgcccggccacccgactgaaggactctctgactacactccctcctgtctcaccctccacaccaacagacttcgccaaagccacttcagccccagtcgaggggtcaaggcacacttagccactgtgatggggattgtgggtagagggagagaacggttcacagagccccgcagagtaggggcatcagaaggatgctgggagtttatgatgctctgaaccatagcaaggggtgtggccttggcatccccggcatctttctctcccacttgggatcattgcccacacacccctctcctaagctgggacacgatccctagtgactcgtttagaccgaggtcgtctcctttcgcttcgaccacagttgctgcgtttcaaaaagaaaccgtgttttgtgcttgctttcttcactggagccttgaaccagtggagaacgtggttctgccttggccaaaaggacctggaattgtcttgtgaataaaatgatggccgtgtgggggtgagctgtgggggaggtccctaggggccccaagtgctgctggttctttgaaggtctaaggcctgatgaccttcagcgtgcgacacagaaggtgattgtccggttcggtacactggtttcctgtgggtaacgaaaggcaagagaggaagtcgctgctccatgccttctcaaacgccatgcagttgggcattttataataaagtgttttatatgtagcacacctgacctcattcagtcattttagcagggacatgaataataacagctggtcaacaagggcacctaattcacaggatgggggtgggactatgttctaagtaccacctgtgttaccccatgtcacctgtacccaagcctggttcccttgtaactctgtgggcttgctcacaggtttgggttagctgaagcactccgtattgcaccactaacaagtagctctaagctcagaccctctgggtccagaatccgagttcttactttcgctctctggcaagaaacttggtaaaagaacattgaccacttggaaggagacttgaggctgccctcgtcagcccacaggctacatagaaggcgctgcaaacttagagcagtgccccactcccaggctcaagcagcccaaaaaggagctcagcctgtcacctacccccagaactgactggagagaaatatgtcacctttggaaagggacagtgtctactgtgcagtacatacactatgaaataccccagtgaccacagactattaaggaaggggacagagacctctgtatccaggtcttggccctggaggaaagccgaggacagagaccttgagtccaaaggatttctgtatggagtggcctgctgggagtcccgctcactccttgtgttctgggctctgaaagtctcacattaataagctccaggaaagccgggtgtggtggcacgcgcctttaatcccagcactcgggaggcagaggcaggcggatttctgagttcaaggccagcctggtctacagagtgagttccagggcagccagggctatacagagaaaccctgtctcgaaaaaccaaaaggaaaaaaagaaaaagaaaaagaaaaagaaaagcttcaggaagccagaaagcaaattattgcaggcttagccccaagtgaagatgggctgacattttgaggtacaagtcagtatgagagtctgaactagggatgtggcgcagttggtagaaggcttccctcacgtgcaggaagccctgagttccgacttcagaaccccataaaccaggatggtagtaatcccagcactccggagttaggggcaggaggatcaggaattcatggtcaccccatcatctgtgagttcagggatagcctgagctatgtgagagccccccccccatctcaaaaactaggacctagagaagcagagtccatgcgtgtgtgtctgtgtgtgcgagtgcgtgtgtgtgcgcgcgtgcgtgtgtcatggtgaacctgtggaagtaaaaggataacttgtgagagtcagtcctctccttccatgctgtgccacagggattaaactcagattgtcaggcacattgtgggaggccacagaatcttttatggaacttccggctccccctgggacaagaactgaggaccaccagcagcagcttccttctgcagtcagcttcattctctctccagagcatcctcccctgcttccctccctcaccttggccctcatgacggtgcccgggagaccctaatctccgaggtcccatcacccaccattttgtctgttcacactggaataaggagtccattcctgtaggttgccctctggttctccacatacacaccatggcatgactgtgcctatgcacaacacaagcaaaatcataaactctcatccttagcaatcagcctgaacgtgccacttaagtcttaaaaaaaagtgtgtcttaaaaggcacacgcctttaatcccagcacttgggaggcagaggcaggtggatttctgagttcaaggccagcctggtctacaaggtaagtttcagatagccagggctacacagagaaaccctgtctcaaaaaaaaaaaaaaaaaaggtaacttataaagccttttttcctattccccattctagactgaaagtataattctctgtgacattacaggactatacctctggtccctctctcctatctgcatctgtccctagcttgcctgtaacagaactttacaaagctgtgataacctggaatttatgaacattctataaaagacacagcaaagataacggccaacggtgcctacaaagtcacagacactctgggaatttgtagattgctcaacagcatcctcgaagccaacggaggacagggagcaaaataaaacaaccagaatacaattttggaagcagaaatcatggcgtggcttttctgggttataaatcttctcaggaagacgaaaggaagaaaacttcagataagacggtgtggcgcccggagataagcctcagcgctgcggagaattcagaaacggtgtgcagcttcaaaagcaggcaaatgtcctcagtagctgtccttgggctgtcatagctgaacataccttcgacgacagtgcccagcccaaaacagtcaccagcgtctgtgaggaaaatgcagagcatctgtgaggccactgcagagacctaaaacttacttattgaggaaaatccaataagccgtgtggctagtgtttgcatgggaacgaggggggatttgatgtaagctagtacttaaatgtagccatgacatcgaattttctgcttccttcaaaaattaaatgatagagatcgagagctgaaatctcttgttcctgataaatttcttgtttgtttaaaaaaatcgaatcccaaggactagaccacaagttattttgttgttgttagtttggggtttctgtttgttttaggtacaagcacgccatgcaagcctttgtggagagtaaattcagttttgtgtcagagtctgcataaaggcagccgagaaagacgggtcttacaggagaggccacagaaggaagacaactgctttagtgactttaaaggtaatgctgaggtagacaagatggcccagcaggtaaaggtaattgtagcccaagccagatgaactgagttccatccctgactcttacacattgtcctctgacctccacacatgggctgtagcaagcatcacacacacgtgtgggtacattaaacaaatgaataaatgtacttaaaaaattggtttaacagtaatacagtgttggggagatggctcagattgtaaaggtgaccggagttcaattcctagtgtcttagttagggtttctattgctgtgatgaaacactgtgactaagagccaagttggggaggaaagggttgatttggcttacacttccacatcatagcccatgactgaagcaagtcaggacagacactcacacagagcaaactgatgcagaggtcatggaggggtactgcttactggtttgctccccatggcttgctcagcctgttttagaacccagggccaccagcctagggatggcactacccataacgatctatcactaattaagaaaatgccctatggtcttgtctactgcctgatcttatggaggtattttgtcaatttcaagtttcttcctatttgatgaatcaagcatatggcaagttgacagcgcacccagcatccacagaggttctcctctgacctctgacctctctgtgcaagctgtggcatgttcccttacccatgggcataatgcacacacacaataatagataatttttaaaaagatgatgctaggttaattcatctcaccaatcaaaatgccacaaagcaagccacaactggaaccacaaattttaagacttgattttaatgttccctttccaagtttaaaaaaaaaaattctgacttaaaatgtttccatttgctgaaagcaataaaaattgtccattaatcttttccttaatccaataatagaaaggtctcaagaggctaagttagggccagaaataagaccaaagtagaagctgtggaggcatgtcaatggctgctttccataaatatgccgaaggcaggctgtcccacgggtctattttctggagactggaatacttagatatgcacattttttccctctgagatagggtctcatatatcccaggctggccttgaacctacttgctaggtagcttagggtgaccttgaacttctgatctacctgcttctacctcatgactgttgaggttatagacataaaaatgccaccttacgggctggagagatggctcagttgttaagagcactgactgctcttctggaggtcctgagttcaaatcctagcaacaacatggtggctcacaaccatttgtaatgagatcagatgccttcttctggtgtgtctgaagacagctaaagtgtatttacatataataaataaaaacatctttaaaatcaatcaatcaatcaatcaatctttgggctggagtgagtggggccagagagagcagaaacaaacaaaaaaaaaaagaagaagaagaaaagaaagaaaaagaatgccaccttaccagtttatgctatgcaggggatccagtccatggtttggtgcatgacgggagagtgatcttcccattgagtcacccccaagcccagccacagatgagcacatttttcacacatcctttcattgagtacacattgacctgaaccaatacaatcgcatctccatagcttgtctcacatcgatctcatcacagtcggggttgggtgacgctgacaaaaggactgccagcagcaacctcaatgtctactcatgagatgccaagagcacctcccaagtgggctgttattatttggatcagagttgtccccaaaggcttatgaaaaggcttggccagcagcccgtggtaccactgaaagatggtggatcctataaaaagttggggtctagctgaaggacttcaggtcactagggtatcatggtttgaatctaaaacatctcccataggttttcgtttcaaatactgggtcttcggctatgttaccatctgaaggctgtggagcctttgaaacagggacctggctagcagaagtaggtcactagcagtaggtcctttgaagttatatccactgtgatggttatatctattgccaactagacagaatctaaaaccatctaggggcatgtttataagcaagtcagagtaagctaatcaaggtgggaagatccacactgaatgtgggtggcgccatcccctaggctgggatacgattgactaagaaagaaaaagtcagcggagcaccagcactgatctctctctgcttcctgatcacggatgccatgtgaccagccagctccctcccattcctgctgccagttgtccccagcacaatggactgactgcaccctcaaaatatgagccagaatgaaccctcccttccttccttccttccttccttccttccttccttccttccttccttcagtggtctgtatcaggtatttttgccacagcaaggaaaaaattttaataaaggggttgtgctttcaagactctgaccctctctcctctctctctgtcacctgatatgagcagccatcccctgccacatgatcccacacgatgacccatgatcccacatgatgacccatgatcccacacgatgacccatgatcccacacaatgacccatgatcccacacgatgacccatgatcccacacaatgacccatgatcccacacgatgacccatgatcccacatgatgacccatgatcccacacgatgacccatgatcccacatgatgacccatgatcccacacgatgacccatgatcccacacaatgacccatgatcccacacgatgacccatgatcccacatgatgacccatgttactccacgctccaaagcaacctgatcaacagtcatgaaccaacacctctggatgagcctaagtcaacttttttcattgaagttgatagtctcaggcattgtatcacagcagcggaaatatgactaattcatgtgccagtcaaatatgtttgcagacactgtccagtgtcacctggattgaggaaaatatccccagattgaaaatcacatggaagctgggcatggtggcgcatgcctttaatcccagcactcgggaggcagaggcaggcggatttctgagttcgagcccagcctggtctacaaagtgagttccaggacagccagggctatacagagaaaccctgtctcgaaaaactaaaaaagaaaaaaaaaaaaaaaaaaaaagaaagaaaaaagaaaatcacatggaaaaagtagggggtggggagaacgactctaaccaagtggtaatttccatgtttatacaatgcaattttgcaaatgactctgggtcaccagacagaaaatcaaaggagtgagccaagtgtaaaggcgatgttgagggcagggcctggagtagagaggttctagagttcaccttgcccaacttcctagtgcaggaaagtagaacacagataaagatctaggctgacagagcacaccacactatgcaaatatcagcagttatggataaatactcagtggattccatctgggaagacaaagggcacaggaaacatcccccacagggtccccatggaaccctacaagaggcaccccatgagcagaagacctcatcatggcttccaagggtgaagcacagctacatggttgttcctgttttatttttgtgactgtgataaaaataccttgaaaagaaagccacttacggagaacaggtttatttcagcttacaattcgaagttactgtctattgtctcgggaagtcattgaggaacagatattcaaacagatagtatgtcacacccacaatcaggacaaaatagaggtgaaagtgtatatgctgagcttacttgtgctcaactcaacctctttaccctcatataactcaggtcccatgactagggaatggtgctgcccacggtgggtggtgtctttccatatcagttaacttaataagacaccaccatgagcttgcctacaggctaacccaatatacacaatccctcattaagactgctaccaggtaattctgagttgtgttacaaattgtattttgtgataaacagtggaagaaaactctttatagaaaagctctagttaacactcatcaaaggaatcgccgttacagaagatggatggtgcaaataatgaataggcaaaggtgccatggagtgttaccttccttaaaacaagcagaaattttgaggctttctatgtcacggtgaccttgaggacttttatgccaagtgaactcagacaaaaagggctgggagatagatggctcagtgatgcttgctgtgcaaataggcacttcacacccacaatcaagccagagagaggcaaatgcacgcttgccggcttgcttgtctgtgctcagctggggcttgatcggtaagcatgaaggcctgagttcaaaccctcatcacccatgtaaaaagccaggcatgcttcacatacctgtaaccacagcactggggtagtggggacagctaatcaccagagctcactggccagacaccctaactaaaacagtgtcctgttcagtgagagacaccatctcaaggtagcaagcaatagaagacacccaatgccctagtctggcctcttgtacacttatgtgcactcagcacacacatatgctcctgacataccccacacaaataagtaagttttaaagacaggcacagagactcatatttacatgaggaacaagcaggagccaaatccccagaagcagaaagtgaaagcctgtgctgagcctggggagaacgggaagaatgtaaggggtgtggcttcggtgctacaaggcttccccacagcacacaaggacacttaatgcttgtaaatgaatgcttctgtgggtaaagcagaggctggagagatggctcagtggttaaggacactgactgctcttccgaaggacccaagttcagttctcagcacccatgccgggtgactcccaacctgcctgtgacttcagctccatggcatccaataccctcttgtctccatgggaacctgcactcatctgtacgtaccccccacccacccacacacactcacttgtgcacatacatatatgtatgaaagcatgcatgcatatgcatatgcacacaagtgattaaaagttatcaaaatcatttctttatttttttaatggtttttttgagacagggttactctgtgtagccctggctgtcctggaactcactctgtagaccaggctggcctcgaattcagaaatccatctgtttctgcctcccaagtgctggattaaaggtgtgcaccaccactgcccggcacaaaatcttttttttaaagatgtatgtatgtatgtatgtatgtatgtatgtatttaatgtatatgagtgctctatctgcatgtacacctgcatgccagaatagggcatataactcattatagatggttgtaagccaccgtgtggttgctgggaattgaactcaggacctctggaagaacaacgggttcagcactcttaactgctgagtcatctctccagtccaaaataaattcttaaaacacagaaagcaggaaatgttacactgtgtgttattttaccacaatttaaaaatgaagataaggttattaaaacaaacaaacaaacaaacaaacgagttgatgaggactttagcatagctacatcagtctgtcatcactgatcccacttaccaactttggcctcattaacaatagaataactgggttggcaagatggctcagcaggtaatggtgcttgctgccaagcctactaaacccgagttcaatccctggtaggagcagggaagaagtaacacctacaaattgacctctgacctccacacacacctctgcacgctattctctgcccaccctaccccaacacacaataaatagatgtgaaaaagaatgttttaagtagactaactagagttacagggtagttcggtgcatacagtgcctccctagcacacatgaagcctgggttctgtcctagcagctcatcaactagacaaggtagtggatgtctgtaattctccacactcaggaggcagacacaggagaaccagaaattcaaggttatccttggctacctggtgagtttgaagctagcctgggctacatgaggcaagcggaggaagccctgagagaatgtgtaaggggcagaggaaaggctgaggggatgtgtgttgttgacataacatgaggagagagagagatcagtaaaccagaccaggtctacaacccccaaagccccgccccgtgacgtacttcctccagcaaggctccacttcctaagctttcgtcaaatgggtgacccagagttaagatacatgagcctgtggggctaagtttctcattccaaccacaaggatcaagacccagactctctagcaaatgggtggtgtgggagcagtctacaacctcagccgtcgggacgcatagaaaggagcattaggagttttgaggccagcctgggctacatagtgaggtcctcctcctcctcaaaaaaaaaaaaaaaaaaaaaaaaaagtgggggtgagaatactgttgtagaataaagaggtttctgatataccagaaccaaatttagctttgagagcgtggtactgctggttctggtggctcaggctggtaggatttgcggaaggaggcagaagcaggaggatctggcgcgcatgattctaacaggaagaggatggcttagagaaccggaagtagagaaccggaactagcctaagccaaaagtcaggcgctcccggatcctcgttagcttgattaaatgtgacaatttcacaagggaacggagtggaaaaatagagagattctcttggtgaggaagtgacagtgagaagtggcctagctggctttaaattaccttagaaaaataaaaaaataataaaaagggcatgctgggaaaatgtagaagacgagcaacgggcacagcagggctgaactctttctctgctttcattaagccgcaaaggttttgcaataaaaaccgaattccttgtaaggcaaacagtcccaaaggcagatgtgtacaaacatactacatggtcacaccacatacaaactatatacagccgctcacacacatatacatacactgcatacactctcatatacaacacataccacacacacattcacacatatgcacacctactcgtacataaattatgtacatatacactatacacagatatacaaacaacagtatacatacatgcgtacatcctacatatgcatacacacatacattatactgatcacacatgcatatacacacaacacaaagttaattaattaaaatgtaagataaatgcccatattataccaatattcatcacagagctctacccactggggatgaggagggctttaaataagttttccatcttctggaagcagaacccaaggaccctgtagggaaaacagcactaatagtcacgtgataatgatggtgaagcgtgggagagacttgctctgtacgtcctgagctcaatccccattctctcaataaaatagggaagaaaaaacaaaaaccaaccaaacaaaaaatgaggccagagatttgcccccaggggtttgtgcgtcccccaccctaggcatttgatcccaggggtttgtgggtccccaggcatttgaccccaggggcttgtgggtcccccccccaggcatttgacctcaggggcttgtgggtcctgacggagaactccatgggacacgtgtactttgaacatttcccttctgtggagagaaacaggtcactctgtgcaatccaggtaattgagaagtaaaaaacacaagcccctgcagaacccaaagaaatgctaatatgtgcattgcactgagtgtgtgcagagagcggtcttgccgaggctggagcaaactattgctcggtagacaggaagaaagtctaacagatgatctggttctccaagggaggggaagtctatgcatccaggactggggagatgctcagtgggtaagagcacgtgctgtccgggcatggggggcctgagtttcggtccccagtgatcatgttaaaataaaaaaacaaaaaagtccagtgtggctaggcgcacctataattacagtgctcaggagtggggtgtaggcagtggggtagctggaactcactagcctccggtttagccttctgggaactccagactcaaagagaaagaccccccctgccccatatcaaaaacaaacaaacaaacaaacaaacaaacaaacaaaggcagaaagagatgggacagaacacctgaatattctctggcctgtgccctgacacacaaagacaaattaaaaaatctataaatccagattttcaaagtaaataaaaatagttggcccacattggcctttgtgtaaatgccacaaagttacaattcttccttagaggctgcctccttcactacactcagactttacacaggcgtggggaattcgaactcaggtcctcctgtccttaccagtctcaggccagtctctcggtctctttgtggcagttgagactccatctctagctgtagggatggcatgtgagccaatcagagacactgagaagcagcgagatcttcaggtggatcctctcagtagggcgcctggggtggcaggggaacttcacggttccctctgggattcaaagctgagaggatgcaagggctggagctatgactgccctgtggtaaccaccctcccgagattccatctggggtcagaacaattgctgagagctaaagagcggcaagacctcatgacatctgtttatggtgaccagtgagtctgttctcatgctgacccagttcatgctgttgttgggttctgtcatgctgcaagaagtttttgttataatatgaaaaccatcagacttgagctgaccaggggccatctttgagtcccagtacctgcctcctgcatcctgccgcacccagcctgtctcccaccctctgtctcctcagctttttcctccaccttcccaaattctctccctctctgcatcccgcaatcctgtaagttcttcaagactcaggtggaattctcctcttctgacccatcagaccctagaggcagaaggctgtctcgcctgtgtgccccatcttttcctcgatgttagaaaacaacctagactaccagcttaccaaaccagaaaggtttgtttgtggtcctggttttactggttccagccgacatgtttcaggccccatgttttggccttgtgaagccgcagaacatcaggcatgaagtatgtgtcaaagtcagtttgcacagcttgtgatggctgggagggagaggaaggaaggggtgtggagaaggaaggagaggaggaagaaaagagagagggaggaagagagactccctttaagggcatgctcctcccgaaattcccaccacgtctcaataacaccatgaactggagatgaagccttcaacatgagtgttgggagtcatttaagaacaaggccgcagccccccttctctactccagttccaagtcccacagggcaatgagtgcttctggaacccagtgaccggggatcattcctgtctctcagctcttgactggtccaaattcagacctgggttagaaaggactatctctgaggcttaagtttctgaacaatactcggttcccaggagagatgagaagacagggtaaaagatgagggtggaccagggcttggagagaaaagagcgattgttctcagagagaaagagagtctttgctgggcgtggggaggagaccggatgccatcagtccaaatggagtgattcagaggaaacctgaggagaaaaaaaatgaccagcgaggccccaaccaacctgttcgggaaggaagggaaaagttagagccaggaatgacacaaaacagtcacctcacgccccacatctgcacctctgagatgacaaaggcaccgggagagcatccttgcaatgccataaatcctccaggaggtgaggggtgacaaagggtgaggtcacctcaagctgctgcctggaacaagctttctcacctgaagcggctctgccactgacagacacacacccaaagccttctagaatcttctgtacggagacaagggcacctccatgaaacgttcctcagagagccactgtgtgcccgagtggactgggcgtcgctcactcatcggtcacaagtgggcgagttatctgttctcacttcctaatctccctgggcacacagtccccacgcctccttcccttggggcccatagcttctgtgagtggcagagcggctaaagctgacgtcatcagtcagctgcgaagaagcccacaaaggctccaggctccgactgagatagctcagctgatgaaggtgcccgaggccacgcctgatggcctgagatcaaccccgggttcctacacagtgagaggagagatttgactcccttgaactgcctctgaccccacacccatgcactgtggcaagcatcccttcccccacccccgcaaataaataaactgcttaaaacagcataacttattccaaacaacaaaaagcttgggctccccactactgtacacccctgcttggggcaccactcttctccccatcccagtggctcccaccttctcatttccctcaaatctgactcactcacttataaaagaaaagataatgaatgtagcacgctccagacgttgcccagagaacctgcgacattgggggaacagaaagacctttgttaccatccggttccacacagtctgtgggtccccatggtggtcccggtctggggtcccatttaggatctgttgcctattggagctgaaatgcgatgggtaatatcgatgattgactcaacaaggctctgggagcatcaaggagactgacttcatcaggagactgacttcatcgcaggcctgggagggaggttctagatcagcttacacaacctgtcacttcctttgatccaagccatgaagccttacagctctcctggctggagctgaagccgggattcacctcctgctggaatgcagggactgaagggggaccatccagaggtctccaaggaggggacaaggatagccaggagaggtggctgggagcaatgagattttgtggaggctgaagttgcaggcgagaagtcagactctgaatgcagtgggaagaacagggcgctgagggctccccagcttggaggaggggtgcagacctgagatggccccttctccctagacggtgtctctgcccagagggcggggtagcaggtagcaagcagatatccttcttttgacagctgtcagttatggtgcctaagaattgacccttcccctatcactcatctatcgatattccctgctttacaaacaggttatgattcaatatgcttgaaataaattgaaaatgtccaactcaggagataggacagcaaagtgctgagctagcataggaccatgagcttgtgacctcagcttgtaaactcggggacatgagcttgtaatcccatcgctggagaggtgtagacagacaggggcccctggcctcactgaccagttgtctcagttttatggtgaattccagaacaatgagagaccctgtctcaaaaaaaaaggggggggtttgtctcctgaagaatggcagtcaaggttgtcttctggctttcacatgcatacagacatacatgcaagtcggcacagacatccacaggaaggaacacctgcacactagagggggggatagtgtaagcagaaatgccttgtgggtacacttaacctgtggaacaccaggcaatagagcccattatgcagaatacgatattttcctcagtgagggtgtgacagacagctgtagcccacggctgctgccaagcattgagaaagggggtcatgttctctagcccaggaaagatcaaaatgcagaaatgcaaattttgactcctcctaaacacataactgtgtcacacctttgtcacagtcagcagtcacagatcctgccccccaccacacccccggccctgctctgtctccaagcttcattctcaatcaaaaggacagcgatttctcagaaattacgaatgtcaccgacatttccagtaccccgctgctgcagtcactcccttaagtgtgtctgtgggtccccatcccctgcctccaagccactcagaactcaatcaaacaagttggttatagacaccggagccttggatattttcttctaaggcggtatttttgataccctcccactgtttaaggaaaaagccttattcctctgccctggaaacgctgttataatgctccatataatctgaaagtcagttgagctgacagcttagcattccttcactggagatggctggcagccacgtaggatgcagaaagtcgaccctgggcagtggtcccaggtttcgctgagtcctgtagtatgaacagatctttactggtgatgtctgcatacagatgcgaatagaggtgcgtcttcccagaacatccttgccctgtgcccactgggcaggcaagtcaggtttggagtcacagtctgatgtgtatagggcccctggcaatgcttggagagacaatgatggaagggaggggctgtgaagttggaaactgttggtccctagcacagagaaagaatcccggttctgtctggctagttcactttacacccaacaccatcctcaccctagaggaagtgggtaagactgggtgctgacctccaagattctccaacctcccaacccacctgtcaccacaccctctccacaacgtcttgatcacactgttataaaagcttgtggggctcctgagcctcgtttcttcctctaggaaatgaggcgtcctcgggttgcctgaaatacagtcatacccgactcctacccgcgcgcgcgcacacacaaacacacacacacacacacacacacacacacacacacacacacacacacacacgggcgggagagaaagagggagagggagagagagagagaaagaggagagagaacgctgcatgcggccacgcccccgcaaggccacgcccctcacctgctgacctcgcccgccacgttgtcatggcgacgcacgtacacaggccgggcagtcgcgcggggcgcgggccaagctggagactcggcagagcgcggcgggccgcctcttcctgggtctggcaagcagctcctagtccgcagggctctcggaggagaacagagccccagcttcctcctcctgccaggtgagtgcggttccagggatgactggcagaaagcagtggcgaagataggaggcgtgtccctgcccggagttctccaatacaggctcctgttacagggcactgttcagacaccaaccattccaccttaagtgcagtcacaccctgtcgccagacgcatcccacatcccttaggccccaggatcgccccctggtgccgctggaattagaaggggactctttcccttagggggtcatccaccagcgggcagagagatcccttaccagacctcacatgcccagctataactcaaaagaaaatgtacagctggctcccacactaagtagccctcatcagaatatatcttccaaagtctgcctctaacccatctctaatccatggttgacggaagctgtttggctcatatcacagtatcaagagagaaccaacacagtttaacaccctcaaatgaatacagtactttcaggcagatgggggactgtacaggactagacaaaggtggagaaacaccacctaaccaaggcagtgagagaaataggctgagcttccaaagctccgtctaggattgatcccagagagggagggaatgaaaggtagtgtcctccccggccagagctgagctgccttccaggtatcattttggcctttcagtatttacagaggacttccatctgcctgtcgaagaagctcctggcttaggagatgaagtagtggcccaaactgtcaggatggcagagggccccaagatttcaccctaaagcgagaagctgataagggagggaataaaggcagagactcctagaccctccccataccttgtctgtcctgcatcagctctggggtccgtcatgcaggtgggtgtgctgggaacacagttcccaggaggtcaaggcagaagagtgagacgttcagggtcatccctgaatgcctgtccccgatgaggctcagtacagggtggtgatggagagtagagaccctgagtgtccttgtcacagctagagggggtttcgtttctatctccagcctctgtaactctgctttccagaagtttctcggaagaaacaaaaatgaggacttgttcttagacctggcgttgagatgtctcccgggcgcctggatgcagctcggttattattaaaacagaaagatacattatcatcaatgttttaggaatgtcggatgtcactgaagtgttgatttttttttttacctgtgcagaacttatttggtgtgtgttataagagagaagtagggatggatgagtgggagggacagaaaacacggcattctggtcacagtggtacacacccataatcatagcaccgggaaggagactggaaaatgagttcatttatactcagctatagagtgagtttgaggacagcctgggctaccttgagaacttgtctaaaacccccaaacccaagaatgatgacaaaaatattagcaaactctccaggtagtgagctcagaggaattacacctctaccccttccttttctttcttttgatgtgtctggggtgggggtgggggcatggcagcactgttcacactcagtgccacaaaggtcagaagaggggattagatccctgggaacctgggtgatggatgaccgtgagccaccatgtggatgctgagaatcaaacctgagccctttacaaacctgagaagacagtgcttttagcctctgagccatatttctggctctcttcgcttttgtttctttctttgtaccctcacctaccctcaaactcacaatcctcctgtctcagcctccccagggccaggtcacaggcacgcaccaccacatctggctctctgtccactttaaagatctccgtatattcgacattttcctcataagatgatggagggaatctgtgcagagtcctgatcacatagaatccttcatcttcgtactttgcctttagaagtcagtccttggaccagggagatggctcagcaggtaaacgtacttgccaaaggagcctggggaggtgtgtttgagttttgatccccatcacccacccacagcggaaggaggaaacagatgcctgcaagttgtcctatgatctccatatgcttactgaggtgtacagatatctcagtaacacacacacacacacacagttttaaaataaaaatcgaaagcatcctttcctaatttcagtatatggagaagtgcagcaacttacaaagcaagaatcagttgaagcctgctttttccattggctgactcctggtgctttgaactcactgggagcctgtgggtctctgacctggagtgtaagaggcccaacttagcatcagtaatagctgatggagtctgttgttgccaggcaacctgggagagagtaactcacccgcagtgtctgaactagtaagcgctgggtcataaccaagcaaaaacgagcagtgggtgtcacgagcagtgggtgtcacggagaagaaggccgagggagggggcagccgctgtctgtgacatttgggttgtggttgggatatttggagctctgttttgtttctctagttaagaaaaaacatcgggaatctggagaggtgactcgggttagttagaggttctggagaggtgactcgggttagttagaggttctggagaggtgactcgggttagttagaggttctggagaggtgactcgggttagttagaggttcttactgctcttgcagagggcccaggttcagacctgcgcacccaggtggcatggcaggtcacagccgcttgtaacttcaatgccaggggatctgatgccctcttctgacctctgcatgcccctgcatatacctggtgcacatacataccctcaagcacatatatgttcacataagataaataaataaatttattttttaaaaaaaaaagagtacattctgctgatgtttaaatggaccagtcatgtgaaaccgcgccaattcctcccccagccccagacccttttctataaaaaacccatagctttcaagcctcatggtcgaatccactgtctcctgcatgagatacttttcgacccggagctccaccattaaactaccttgtgtatttacagagagagagagagagagaaaaatgccttgaatttgattatcatatttcaatgcttctctgttagtgatcactattaggaaagatgaccttcaaaagacagagctagtccatcacctggacactccctgtctccctctccctcaggactccatgacatcaggagaccccaattcatccactcaggcttagaatgtgtttctctaaccaaaccctttctggaccctcctgtagggaaatcagaaagaatgaaagcgtatttgaagagcgctgatggcttttttgtcctgaataaaagcaccacaatcggcaagcatgcagattcagacctcgtcttacaggtgaggtacacggcgtacgcctgtcccatgcaccccgcccccccagctctcctccatgtgaggtagacttgagtctccctaagcccaactgccacaggtagcaagcagccaactctgtccttggacagccaagatccatgcaggaatcttcccgatggcagaggggagctggcatttggtatcggaaggtgatgggccttctgttagttaacaaactcatgtccttacaggtcccaaattgcccccctgtccagaagcagcgttctgggggagcttagaaggggtgcgcggggcaagtacattgaagtgttcttctttaccatgtgcccagggaagggtctctttttccaacacccctccaaggccttccctttccatagcttggctctaaggggcccctggagcccaggaagctccaaggtgaagccttgggcttagccgtagtctctcgtaattgaacttcattttctgacgagctgtggtttggtggtccaaagcctcaattcactgacagctgaggaagtggaagaaagagatgaataatgaaaacagagactcagaagctctttaaatattcaagcaggctaaaatattttagagagacgtgggatggggcctcccacagcagaggagctagcttccctgaaaccttgcgccacaagcctttaataagctttttttttttttttttttgaaaagggagacggagtgtgcccctcacactgtttcctgggtggttatgctagtgtgatgtatgtataacagcatcaaagcagtccagagcacgggccgtatgtatgtgtgtagcaggggttgcctgtggagggtaggtacccatgattttatcatgggtgcagattcatttgcagaagccaagatgccaaacagctcaccaccggagatctagacaccacttcctagttacagtggcccctcccacaaccacccctaagccctgaaaccagtactgtcttctccacgtcgataattctgttgtttgaggaaagttactttaattaaatcatacggtgtgtgattcagggtttgatttgagttggtttccctttccctcaggcctagagatgcacttaggttgctagcttgtttctttttattgctgagtagcagaccacggtacagacatggtgccgtttgcttagccggtcatatactggaaacggtgattatctctagtttggggtcagcatagtaaaataaatagctgctcattttagcttgctgtcaattgctctgacaaacactaagaccaaaagcacctcgaggagcaatgggtttacttggctcacacttctgcagcctagtccatcactgaaggatgtcagggcaggaactcaagcagggcaggaacctggaggcagaacctgaagcagacgtcataggggacacccatttactgcttgctggcttgctcagtttgctttcttaaacacttccaggaccaccttgtgcggggtcagcaccatccacagtggcccgggccctccacgtcaatcattaatcaagagcatgccccgcccccaggcttgtgcacatgcagatctgatgcggaggtattttctcaattgaggtccctcttccaagatgattctagacggtgccgagtttaccaagcatctactcagcacggtgctgcgtgctggacacagcttctgagtaggcatgaaagcctgggtatgtgatggtagcgtcacatgtcacatggaaatgtctgcatggtacccagggaaaccaccaaacttgtccaacgccgctgtgcggctttcttctccaccagcggcgtaggagatggcctccctcgcctcaccagctgcgaatgccatccgcagctgtgtggttttaagtactgagagtgacagaggcagtataaacctataaatctccttatttgtctcatttctaattccagagagagggcatccagcatcctgccattacatagcaggctggttagcatttctgcaaagttcgcctaatcttagaacacattcattccaatttaacaacagctcaccacatctcctgtgttacttttctcacggccaggaccaaacagccaacagaaacaacagagaaccttgtctgagtgcatggtatgcaggagggttcactccattggaacttggcccctgtgtggggtcagagcgtcatggtggcaggaatgtgtggcagaggacctgcagacctcatgacagataggaaatagcaggaatgtataagacaccagggcagataaaactcaaggacatgacccagtgacctgcttcctccttttaggtctcacccctacacccccccccacttcccaccactaccctagtcatcccatcttactacaaagccaatcattgaattggagtcttagcacttccatgcaaaccaccatcccatactctccagtggtgtgcttcattaaggcccagggctagctttccccatcgagtcaagttgaccatcaaaatcagctgtcacacccccttttgcatggcctcctacatgaccatccccatgcaagagcacagaaaacccattcagtacccacagtgggaaaaccaagagaaagaagcagtatttcttcttagcatattgagagactttaagccaggcacggtggtgcacgccgccgttaatcctagctagcacttgcaaggcaaactcaggtaggtctttgagttggaggccaacctggtctacagaggaagttccaggacagtcagagatacacagagaaacccggtctcaaaaacggggggggggggggagaaacgtggaaatcagagggagttttgtggagttggtggagtggggtccctccttccaccttcacacgggtggcagaaattggactcatctgcccagcctgacatcacaagcccttttacctgctaggccccagggatctttctttttgaaccaactctaagactagaaagtcataaaggtttgagaaggcacaggctttgagaacagagatctgggcctaaacctctttgagccgtttcctggctgtgtggcggtaagcgtgtgttcccatctgtaagctgtgtacctttctgggttcttgtgttgaccgagtgaggaaaggctaccaggcgcctggcacacagtgctgagtaaattacactgtgatcattacgatgatctcgtaaaatgaggccgagagaaattactcaggggtaggagggggcacctgtggagcccggaggctgcttgggaaaggcagctaatgagacgagttattacccaggcagaaactgagtggcatttgacataaaaataatgggccatagagtgtccttggcctcactcaaatggaaggcaccagggtggagagacagcgcaacagttaagagagcaggctgctaatagaaaacccaaacacccacaagtttacaaccccctgtaactccagttccaggggatccaacacctagcaagtacgcatgtgcgcagaaccacacagacccgaatacactacggaggaggaggaggaggaggaggaggaggaggaaaggaggaggagaagggaaggaagggggaagaagcagctggagagacagcttagagtttaaaggccctggctgatttcccaaaggacccaggttcagttcccagcacccacatgagactcacaaacacctgtagctccagttccaactttttctggcgtccaatggtacttccctaacacacacacacacacacacacacacacacacacgcacgcacgtgcacgcacactcacgtgcacgcacacacttgtgcacgcacacacaagtaaaaattgtagaagtcatgctactgaataaagttcagaaaccaaaggaaagagagggaggggaaaaaagaaaacacaaacaaaaaacacaacagctttgaaatcgcactggagctacacttagcaaataagcacacgaggtttttataggccagtggggtgtgaggctcagtgaaaaaggttttatcctcacagatccacttcacagatatttacctgacatgacaggtgctaatggtcacatgacaggtgctagttaatggtcgcatgacagggtctaaaggtcgcatggcagcatgtggcagcatcacggctctaaaggaaaggccagaaaaggtcaaggaatattcactacccacgggagcgagggaattccatgtgcaaaggccctggggtgctaggacgcatggtgagtgagcccaaagcactgaaagaaaagcagtaggctcataaataaaactgggaaggtggctgagaggcaggtggcacttctcatgcgcccattagggttctggtctaacctggaagagcaaggggagaaagaaacggagggactctcagcaagggaaagtatggaatttctaaagggccactctggctgcagtgctgactcagaacttcctctcccgacttaacccagctcagctcagtgctggaccctcctgaagcggattgtacaacttaacatcggagaggtctactggctgtcgctctttctctctgtctctctttctctgtgtgtgtgtgtgtgtgtctctgtctctgcctgtctgtctgtctctctgtgtctgtctgtctgtctgtctctgtctgtctgtctgtctctctctctctctctctctgtgtctctgtctctgcctgtctgtctgtctctctgtgtctgtctgtctgtctgtctctctctctctctctctctctctctctgtgnnnnnnnnnnnnnnnnnnnnnnnnnnnnnnnnnnnnnnnnnnnnnnnnnnncagcaaacaccctaaccactgagccatctcttcagtcccaacttgaattttagagacagcttctcattgaacctggaactcaaagactgggttcctcagatccacctgtcttcacacacacacacacacacacacacacacacacacacacaaacctacagctagagttacacatgcccctgccacaactggcatttacagtggagatcagaagtcaggtcctcctgcttgctgtgagcacagtacaaacagggctttctccctggcctctctttctttgtttatgagatgaactcccgcactcaagcaatccccctaccacacacacacacacacacacacacacacacacacacacgtttccgtgacagttgtacatcactgtgcctggtgccatgattgttacttaagctttgctgagaagggacttcagctccttttgaatgaagaaatgtccccatccagtggctgatgggcttttcacaggtttaggattatgctggttaaatgcaggctcctgactttcagaatcctccgctcgccacacgccagcctcttctggggagtatcctctcgccctcctcccttatttctgtggcaaataatctcattgccaacttgacaggttttagaaccccgtaggtggcataccttttacaggtctgtctacaaagctgcttccacagaggagtagctgaggggacccctggccagccagcctagccgtactgacaagttcctgaccaataagagaccctgtcccataaaataaggtagacagcacctaaggagagactcctgcgataggcacacacacacacacacacacacacacacacacacacatgaatgcacacacatgcacactccacatatggacacatacacataatgtccccttatggcatacaaatcaccattattattaccctccctcgtaccaaagtgtgtaaacaggtcttaaaaggttaaaacagcacagccagccaggagtggcaaagcagtttcacacgtgagactctgactccaagcttttccacatggctttggaaacactttaaaaaatcctgtgagctcatggagacaataaggcagccatccaaagctgttgaatcctcaatgagagttaacagtaagccagggaagcgcttcctttgaggcaacatattgggctggcgccccctgctgggcatgaagtgtaacaacatgttttcctacaagtgccttgaggctgtattggggataccctttaggtcctatctggtgtacaaaagacaggtctgcagagtaaacgaagcttctttaaacagaagcctgtcagcatgtggctggaaaggatccagcttgtcagcatccagctgtcaaggcagctagtgtgacggtctggatccggtgaccaatgctccggcttggcaaaacaagaaccagagatccttggtagagtgggcgcacaaggctaagcagtcactgcaggacttaacctggaagatggagccttctcccaaaaggctttacagctgagctatctcttttgctcagagagaggaatcttgagcaggcagaatgaacgggaaaatggtcggttggtttctggtggtcaagtaggtgaacacggctgtgccctagtgggatgcaggccgcaggcaagtacagacacctccagtccccattcctgagcatgtgcagtgggtaacctttgcaatggctgtctcatgagactgcattgctgggaggtggtaggaccgcctctggcagctaagttagaatagaacatttcatgtgttcactttctgctccaaagaacaaatccatcatctcacagctcagaagtctgggcggatccagtttctgctctgggtcactcaaagccaagatcaaaatgttggtcgacctggagtcctctccgacatcgtggggagggtgggcctccaggtccattcgggctgttggaagaatttgattccctgccggtaccaagatgagaccctattttcccggcttgctgtcagttgtggggcatcctcaggttctggaagctgcccacattccctgggtcctggcaccttcatcctgaaaaccagcaacagtggctggttgcctgtggattcccctccagtctcttctctctagtctcttctttcagctactgaaaggccagtctggtttgtgtgtgtgcgtgtgtgtgtgtgtgtgtgtgtgtgtgtgtgtgcgtgtgtgtgtgtgtgtgtgtgttatgactgtatatgtgtgtgcacacgtttgtacgcatgtgtgagtttgtgcacatgtgagtgtgtggagatcagatgacaacttcgggtgttaattttcaggtaccacctccccacaacacacacacacacacacacacacatttttttttaagggaacatagcttcagcccagaatagtttcaaagtcatgtaaatgaatgcaattaaggtattgcttatcaacgtccatagttcagacggaaccttactggatgcagaggcttgtttgtctcatgaggaaggtcagaataaggttaaattgtattacataaaatgatacagggatgtttttattaagctgattgaaaaaaaaatgtcataattgaaaaaatcctaatgtttttcccctctaattatctgaatgtcttcttcatttttttttcctttttgttagttttttgtttgcttgattattctctggaataaacaacactttcaaggagatgtcttttgtctacttgtaaagccttggattgggacatcttactcagttacaattctaggtgtaatgacgagcacagctaagctgacaacttggctgctgatgggaggtggctctgggcttgctaatgtatgtccttagaagacttgtgcagtgttggttaccaggcgaggtgacacgggacatttaaactgtaggaaagacagtcccactacacgggtaggcctatcgtctgtgggatagacagagctccaaagtagaccctggaggctgtatggagaaagggctgaaagtgtgactgtgtggatataaagcaannnnnnnnnnnnnnnnnnnnacacgtttgtacgcatgtgtgagtttgtgcacatgtgagtgtgtggagaatcagatgacaacttcgggtgttaattttcaggtaccacctccccacaacacacacacacacacacacacacacacacacacacacacacacacacacatttttttttttaactcaatctcaacggcccaaagctcactaagtaggctaggctggctggccagtgagcctcagggatccatgattgggattcgccaccacacctggctttttacgtggggataaactcaggccttcatgcttacaaggcaaggcactttaccaacagagtcacctcctcagtctttgaaagacctctctcctctcctctcctctcctctcctctctcctcttcttcttctcctcccccaccccccacacctctgagtcaggtactcccagttggattaactaggcctgcccacagattaatagtcttcatcatatgtgcatggtaccacttgccagacagtagagggtagtaacagatctgtgggtcggtcccctctactctgaaaatgtcagtctgtccagaaacctgttgcggctgatctccgttgtcaacttcacatacctgggaagagggaagctcaactgaagaattgcttctatcagattgacctgtggacctgtctgtggggcattttcttgattgctgacgagtgtgtgaggatatagccctctctgggtggtatcatcccttggtaggtaggcctgggctgtataaaaaaatggcagctgaatgtgagcctgggggcaggccagtaagcagcactcctccatggcttctttctgttcctgcctccaggctcctgccctgacttctgtgggtaatgaactataactgtatggaagaaactcttctttcccccgagatgttttaaagatggtcagtgattatctcagcaacagagatgaaaactaggctaggatccgagcttagattctcagctgccacaggaaagccaggtgtggcagcacacacgccattgaggcaggacttgggatgtacagatgggaggagccttgggcctgctagccagccaggctgtccaaagcaaagactcagtgagggtctggtctcagaaggtaaggcatggagtgacgctgatatctgtggtgtgacagtgttcctgggagactcactccagacagggaacagagacagatcgaactacaataccatcaaactccaacgtggtgaaccaataagttttattggggttatgtacaagaatatcggtgaggagtgacttgcaagagcccaccccagtatgagtgacagctcacaaagctgggaacatggaattcgatgcacagcctgcagtcaacccaagagattggagtgtcctttcggggacgcttccagatatcttagcttgtctgggtgtctgagtgtctgtctcagcaagccttactgcttacataagcttggggagggagggaaggagagagggagggagggcggaacctagtgtatctggtcagtttcaggaacttcctgaatgatccctttgagttgtttacttcctgagtttaaagctccgggatggaatgtttcatctctcttagagcactctgttgtttttaatctccattttaacatctggtgtcttaagtaccttccctccaagatggacagttgtatcttggtgtaaacttaagcacaccatgtagtgttggtctctgtcctccacacgtgtacatacacacacacacacacacacacacacacacacacacaaatgaggactgttgaggacccagcaaggaggctcagtgtgtgtgtcctcttctggcagcccgtgagcagcaagtatcagggatgttgctattttcattttcctgaccaccacttcctccatctcagtccgcagatatcgacaaccaccatgccctcattgaattcaacgaggccgagggcaccttcgtccttcaggactttaactcccgcaacggcacgtttgtcaacgagtgccacattcagaatgtggcggtgaagctgatccctggggacattctgcggttcgggtctgcagggatgacctacgagctggtcattgagaacccgtccccggtgagcccagcctctatgtggtggtgtgtgggggtggggtgctatgctggcttgtgcatgctgtcctgttctcagatgcagccaccggaagcactgtgcaaccccacactgcccacacatggcatagcaacaagactcaactcaatcccagttctggtggcccaaagggggcttggggagggaggtgtatcagcgccccatgatgggcactccaccacattacatgcaactgccacaaagtgcccagttcagagcctgagtaaggtttcagagaggctggaaacagttggatagttttgagagcagagagataggcgcctcccttccgggctgctcagcaatgctgctcttctctgatcgcacagattctctgtgggacagtcttctccatggtccctggcattgacagggtatatctataaaccatgaccgcccatgtccaagtaggtgatcgacacaggccagttgatattttggcccagatcagaaatacatctgaggtcacagtctaaattataatctcgatttaagttaaagagaactgaaaactcaggaagcctcaggcttagggaagctatggttatgaggtttggaggcaagcgcctcacccactgagctatctcccccgtccagtacggcttactaaaaatgacactttatcaaggtgaaatcgttctacaacgaagtacgcgtgttttgagagtggggctggtggttttgaggtgtgtacccctgggaaaatatggctaccactacaacagggagtgaacttcaccatccccgtccccaccacccctgacggcctccccagtgtggaggtccttggcttgccagctgccatcaggagcgccacccaagggttgagttactcaaaatgaacgccacctgtctatgattgtaaatcaaatacattctcagtaaattcaaaagtcctcacgaggcatggagcccccacaaagtgctttctaaatactcccccccaccctgcacccccccataagaacccctcggtgttactgacccctttcatcagggcttgcgtttccaatttctgccaagcagatccacgagagtcatggatcttctccttttgagtttctgtagatgtatgtccacacacaaggactcagttccccagctttctatcttaaaaaaaaaatgtgtgtgtgtgtgtgtgtgtgtgtgtgtgtgtgtgtgtgtgtttgccatggcatatgtgtagaggacagaggacaacctcaggtgctgtccctcatcttccactttcgagacacaggatgtcttcttcgtcaccgtgtataccaggctagctggcccataatcttgggagacgcctcctgtctcgtcgaaatgcaggtggttacctgaggcccagacagcacacactcaccccatgtcaagtgggaagaggcagagaatcaagtggagccagagttgcttaaagataaatcctgtccccttaaccagggcaggcagggagcaagctccggtctctgagtgtgggaaatgtgctcccccccaccccgccccgtctacccccccccccacacacacacaagagcactgactcagactagtgaactcgagggaggacagtttacaacttaacacttgcctcaatgctgaccagcgtggctgacccatgactgagcacagagaacagttactgtgaccccagtgcaagccctttcctcattggctgagtgaccacgagtacaatcccagcggtcggtcgctggagccttctcttttcctttcctgcttacatttgtctctatttcatttgtttaaaagatttttattttattttcacttgtgtgtgtgtgtgcgcgcgtatgtacacatgttttatagcctgttcattttaaagcttgtcaagcacaataatctttatagcaatactatataatatataaattattatataccacatattataatatatcacatacaatatgttatataatataatatataatgcattatattatatagtatgtaatatataatatataaaaatatatgatgataataataatcttgataatcttatactctcattttgttgctgtttgtttttgcttttgtgacatggtctctctatgttgctctggctgacctgaacttactatgtagatcaggctagcctggaactcagagatccgcctgcctcagcctcccaaatgctgggattaaaaacgtgcgccgccatgcccagcccttcctctgtcttgagttcatgtggacaggcaattagagtctgggtgaggagccagagtctctgtttgtctgcatttggacctaagctggctcaaggcacttttnnnnnnnnnnnnnnnnnnnnnnnnnnnnnnnnnnnnnnnnnnnnnnnnnnnnnnnnnnnnnnnnnnnnnnnnnnnnnnnnnnnnnnnnnnnnnnnnnnnnnnnnnnnnnnnnnnnnnnnnnnnnnnnnnnnnnnnnnnnnnnnnnnnnnnnnnnnnnnnnnnnnnnnnnnnnnnnnnnnnnnnnnnnnnnnnnnnnnnnnnnnnnnnnnnnnnnnnnnnnnnnnnnnnnnnnnnnnnnnnnnnnnnnnnnnnnnnnnnnnnnnnnnnnnnnnnnnnnnnnnnnnnnnnnnnnnnnnnnnnnnnnnnnnnnnnnnnnnnnnnnnnnnnnnnnnnnnnnnnnnnnnnnnnnnnnnnnnnnnnnnnnnnnnnnnnnnnnnnnnnnnnnnnnnnnnnnnnnnnnnnnnnnnnnnnnnnnnnnnnnnnnnnnnnnnnnnnnnnnnnnnnnnnnnnnnnnnnnnnnnnnnnnnnnnnnnnnnnnnnnnnnnnnnnnnnnnnnnnnnnnnnnnnnnnnnnnnnnnnnnnnnnnnnnnnnnnnnnnnnnnnnnnnnnnnnnnnnnnnnnnnnnnnnnnnnnnnnnnntgaagacagctacagtgtacttacatataataataaataaaaaatctttaaaaaaaaaaaactagggggctggtgagatggctcagtgggtaagagcacctgactgctcttccgaaggtccgaagttcaaatcccagcaaccacatggtggctcacaaccatccataatgagatctgatgccgccttctggagctgtctgaagacagctacagtgtacttacatataataaataaatcttaaaaaaaaaaaaagaagtagcaactaaaataatgttatggttggcgtcaccacagcttgtggaactgtgtgaaagcagcattaggaaggctgagaaccactgctggaactggggtttgtggctatagctggttgattagctttttatttacttcctgttttgctaagttttcactacccgtcttactctaaatctctccctccctgggctactattttaagtttcatgtgcaataagcctgtcagaacctgcagcgcgccttgcctgtgggcacagggtggcacttgcgtgaagtctcagggagcattttgtccaggaagtattagtgttgtcacgtgtcaggaacccagatggaaagcatatgcttcgggcgtggcttgatccaggtggtccacggatgctcagaaatccatctcttccagctttactcgctcactcactgtctcagcagattctgcaccgggctcactgggagcaagggctcgccagcagccccagcatcagtttgggttgttttgttttttcattgttttgtcttaggtggtcatgtgactgatgccagaggctctgattggccacaccctctcataggcattttcctgggtctgagagggatctgtgtccttattggaggaagtgtgtcactgtggaggtgggctttgagaccctcctcctagccatgtgggagtcagtcttctagctgccttccaaacaagaggtagaactctcagcttctctaggcgattaatgataatggactgaacctctgaacctgtaagccagccccaattaaatgtcctttataaatgttgccgtagtcatggtgtctcttcacagcaatgaaaccctaagacaatgtgggagctgggcagtgcatccaagcaagctatagtcaccactgcaaggagaatttgtgctatgtgtgtttgtgtgtttgttttggtctttgaacttaaagatctaaaaatcaaacaaacaacccagagctgaaggggatatctcaggtgataaagtatttgtttttgcagacatgcagaattcaatttcatccctgtgtggtggcacttgcccttaatcccagcactcaaagaggctgtgctgggtagcctgtgagttcaaaaccagcctagtctacatagggagttccaggacagctaaggctacattgaaagtacaatgatcctgcaaaacaaacaaataagcagacaaataaaaaaaactgagatccagggcaaggagagactttgtttcaaaaggaaggaaggaagggaaggagggagggagggaggaagggaggaagaagggagaggagaggggaggagagaggattctgtacacacacagacacacatgtgtacacacatgcatacacatgtatatacacacatgaacacacaagtgtacacacatgcacacacacatgaatacaccagccttattttaacataattatagaaaggctgtaacggtaactgttcactgacactttttccagttgccccactgtcaacaaatgtcatgaacacagataggatccactgtgtttcattactataactgcaccccaggatccacaccccagccaggacctatgctgcattcaactcctgcaccccacactatgcaacattttctctccttggcagtcctgaggagtcctggccagacatcctggagactgtcccttagtctgaatacaccagataccttcctctgattagactgggtcaaagctttcagaaggccctgaaaaactaaggtgacatagacttagtgccccaccctctcaggggcacccgatgtctactgactcccacaggtgtcaccttctctctggatgagggcggtgcctgccaggtttctctgtggtagagtcattatttctgcttggaaacaagtagtaagtcactagttatagctcagcctccacaggggacctgagacacctatgggggaagtgtagtcacagggatttccattacagaggtttctgcctaccctgagatcttctgcaagaaagattcctcctctctctcagtgtttattttactcccttgtatatagcaggacagtctcgggtctatttactttacacattgaattataattaactgttatttatttctatggagagtgtgtgaggcttcagagcatgtgtgggtgtatgtggaagccagaagacaaccctctgagttattaccatctgccttaccttgagacatggtctctcagtggcctggagctcactggctgggcagtgaatcccagggatccttctgtctccacttccttggtgctacaattaagcgcgtgagccagcacatggggctttttatgtatgtgcgtgttattattgagcttgggtctctgcgcgtaggcagcaagttggattttaccaactgtgccatctccctagcccctggcctgtcttttatcctggcacgcaaattggtctagccttggatactgagtgctcctttcaggccgggtgctggtctctgcaacacacccacaccgttttctcagttgcttttgttttgtcttgcggtttccctgttttctgctattgcaagaatccctggggctcagggcatccttttccctgccccagccccagaatcagccaaatccccttttttgccaagtgtgaatccaaggtgggtgggcagacgccatcagtgtgtgtctggcactatgccaggccccagacccagccagcaacctgtcagtcagcgtttaatcaggagctctctggaaaaaaaaagaagcctgtgtggatagcatggggttaccgatagagtgcagaacacatcccctacagtcacgtggacacttgcggttgtgactcccagaccacactaagtctcaaaagtgttgccattgggttttgtctgcaaacttggatccccactccagcacacagtgacaacgggcacgtgagtgagttacgtaggctaagtattggtggggtccatgtgaaagaagccgtgatggggagggacctcacctgtccatcaacagccccaactcccagtagccttctctggtgcatcaaatgctagctccacgtaccggaagagcgtgtctgccgtacagaatgtagcggctgcagatacaactcttgtcccctgtattgttaatgttttctccatcactgactttgcaggggagcgggggtggggcaagtgtgtgtgtgtgtgtgtaggtgcactcttgcctgtggaggtcagaggttgatgttgggggtcttcctccattactctcgacgttagtcaggtcgttccctgaacctggagtccactgttccaacttgaccactcacccagaaggctgtggggatctatatgacccaaacagcaaggttcagtgtgagaccccgtcttaaaaaaatgattaagatggagacgcagttgaggaggacaccccaatgtcaacctctggccaacacgcacattcacacaggcaaatacacataaacacataaacacatgtgcacgcacacacacacatgcacatacacatgtgtacacacagtttctcactcacacatacacacacttgtatacatatgcatgccagtgcgcatgcacacacacactcgcgcacttttttaaaaaaataaaggctgtcattcaccctaggtgtagtcaaggaaggtctgatgctcagctaactctttgagatccatggtgcttgggtctctctctctctgtctctctctctctccccttctcgcccaggcactcactcccccttctctctgaagttgggggctgcataatcctaaaaccactgagccacaccccgttctgaggcaccacctaggtctcatctagattgaaagttgactgacagacatggccttaccagtgtacacatggctgtttagaacatgcatacctgagagggtccttcctggggacttacaacagggaacaacagcacatccatttgattctaccgcagacacctgcagcagtgctttaactctcgagggcggtgcgctaagagaaataagccagtcataagatgacccagctcaggtctggagaggtggctcagcagataggagtatgtactgctctctcagaagacccgaattaggtccccagcaccaactgctgctcctactctaggagccctgacacctctaacttccatacacagacataaacacatcatctttaaaaacaaaacaacaaacaaaaaccacattgttccattagcccatatttgagtgggtaaaggggttcggcttgtatggcttacgcagagctgtcaaggtcaaagagagagaaaggaaaagggggaaggaaagggagtagaaagaacctgagtttataagacacagtgcaaagcagcgtgagtgatatactgaacactactcataagcacgctttaaaaatgcctacaacagggtgcatttggggtgttctttgagacacatagccctcaggctctacctgcctcagcctcacaagctctggggctacaagtgtgcacccccatacgnnnnnnnnnnnnnnnnnnnnataacttaatcatcccattatgctgttcaaagttcggccctttggctggttacctggtcctcagttacatgcgatcgtcttcctctgtgtctggggccgaatcctctgtctccagcctgtttcttcccccatagtcctatctctgtcctggaacttccaccctccctagttcctgcctaagccaataggccaacagcatctttattgacaggtgattcttcttccaaatagtactagagatcctctcgacactattgtggatagaggaattgacttgtgggggagggggagggtccctggggctggcctgactctcagttacctgcctcacccttcccttcatgcccctgtctgtgcacctagcgctcactcgctgcaggagctgcggatatggatacggggtgggtaaagaggagggaaggcctggtccctgctgtggcatcccgtcagctcagaggctcagcgctatgtccctggcttgggagatgtcacgtgtgaaaagtcctggatgagggactcaggaggacaccaaccgagatggatcgatgtgggtctagaacttactaccatcatttgctaacaccacggacagacagacagacagacaaacagagcgacaacgggatgccaggagctctgaggagagatcaaggccccagaaccaagattgacaacacgggcagaagctctgaggagaagaatcaaccccatccccaccccccaaccccatggcaaaagtgagatctccagttagatgtaactgaggataggaaggctgcacagcaccggcctgcagccaggcttctctggttcctaggcaggaggcgggggagcgggtggggagcagggtgtgtggccacagtatccactttgatgtgaactcactccccagggcagagaccttggcccctggcagtgtggtaggtgcctgtcaggctctgtgagaagggggcggtgtgtgtgtgtgtgtatgtgtgtgtgtgtgtgtgtgtgtgtgtgtgggtgtgtgtactgcaagtgtccaggcctgattctcacatcacatcttcacaatatgaccttgtccagcctcagggtcaccaacactgactgcataaattggggagctcttgctggagtatgacggtgacctggcaccccaaactcgaggaacatgcaagaaggtttctcggagggagcgactcacaagctgggtcttaggacaagctgtgctatgcctaaacaccacctcccctgagcctcccatctgtcccacaggtctcctgcccatgggtgaggggcccagcaccttggccaagtccacagccacacctgtcgtcctcgccacccgacatgcccttccaccacggtatccagccagcaacagtgcagagaagttggtcacagggttgtcccagacccaccatggt

SEQ ID NO: 1545 - DNA, 1704 bp, Mus musculus
gggtttacagacataccctccacacccagtgtaggtggtgctggggttcaaacacagagcttgtgcatgctggatctctcgtctgctccatccacccgggatacctggcatttgaagagagccatcgcttgagagtctacggatgactttccgctgtgacacaggagagtctctttgctgcatggacacagtgtctattggcactactgctttctgatttattttctctctttgagccgggtcttgccccgctccgctgtcatgatggcccaatccaaagccaacggctcacactacgcactgacggccatcggcctggggatgctggtcctcggggtcatcatggccatgtggaacctggttcctggtttcagccctgcggataagccaacgtctcagggcaacaagacagagggaggtggtggcatcctcaagagcaagacgttttcagtggcgtacgtgctggtcggggctggcatgatgctgctgctgctagccatctgcctgagcatccgggacaaaaggaggatgcggcagagtgaggagctggctcgaattcagcagcaggcaggaaccgtgccccactcccaagaagaagacagccaggaggaagaggaggatgtctcctcacggtactacgtaccgagctacgaggaagtgatgaacacgggctacccggaaaccagggggcaggagcagaacccaagactgagcatttctctcccctcctatgagtcgctaacggggctggacgaggcaacccccaccagcaccagggcggagacagagaccagcccagggcatgctccggacaggcaaaactccaagctggccaaacgcctgaagccactcaaagttcgaaggattaaatccgaaaagcttcacctcaaagacttcaggatcaccctaccggacaagaacgttcctcctccctctatcgagcctttgactcctccgcccctgtacgatgaggtccaggcaaaggcgcccgatgcccggccacccgactgaaggactctctgactacactccctcctgtctcaccctccacaccaacagacttcgccaaagccacttcagccccagtcgaggggtcaaggcacacttagccactgtgatggggattgtgggtagagggagagaacggttcacagagccccgcagagtaggggcatcagaaggatgctgggagtttatgatgctctgaaccatagcaaggggtgtggccttggcatccccggcatctttctctcccacttgggatcattgcccacacacccctctcctaagctgggacacgatccctagtgactcgtttagaccgaggtcgtctcctttcgcttcgaccacagttgctgcgtttcaaaaagaaaccgtgttttgtgcttgctttcttcactggagccttgaaccagtggagaacgtggttctgccttggccaaaaggacctggaattgtcttgtgaataaaatgatggccgtgtgggggtgagctgtgggggaggtccctaggggccccaagtgctgctggttctttgaaggtctaaggcctgatgaccttcagcgtgcgacacagaaggtgattgtccggttcggtacactggtttcctgtgggtaacgaaaggcaagagaggaagtcgctgctccatgccttctcaaacgccatgcagttgggcattttataataaagtgttttatatgtagc

SEQ ID NO: 1546 - protein, 249 aa, Mus musculus
MMAQSKANGSHYALTAIGLGMLVLGVIMAMWNLVPGFSPADKPTSQGNKTEGGGGILKSKTFSVAYVLVGAGMMLLLLAICLSIRDKRRMRQSEELARIQQQAGTVPHSQEEDSQEEEEDVSSRYYVPSYEEVMNTGYPETRGQEQNPRLSISLPSYESLTGLDEATPTSTRAETETSPGHAPDRQNSKLAKRLKPLKVRRIKSEKLHLKDFRITLPDKNVPPPSIEPLTPPPLYDEVQAKAPDARPPD

SEQ ID NO: 1547 - DNA, 1004 bp, Mus musculus
ggccgcgctggctgatcaccacagaggtccccgggctgcgcgccctctccacgctgtgctccccggctccgactccgcggcccgcgattgcctggggtgggggtgtcgcgaaacccccagccccgggcctgcggacagagaccaagcgtggccctttgccttcgagatctctcgtctgctccatccacccgggatacctggcatttgaagagagccatcgcttgagagtctacggatgactttccgctgtgacacaggagagtctctttgctgcatggacacagtgtctattggcactactgctttctgatttattttctctctttgagccgggtcttgccccgctccgctgtcatgatggcccaatccaaagccaacggctcacactacgcactgacggccatcggcctggggatgctggtcctcggggtcatcatggccatgtggaacctggttcctggtttcagccctgcggataagccaacgtctcagggcaacaagacagagggaggtggtggcatcctcaagagcaagacgttttcagtggcgtacgtgctggtcggggctggcatgatgctgctgctgctagccatctgcctgagcatccgggacaaaaggaggatgcggcagagtgaggagctggctcgaattcagcagcaggcaggaaccgtgccccactcccaagaagaagacagccaggaggaagaggaggatgtctcctcacggtactacgtaccgagctacgaggaagtgatgaacacgggctacccggaaaccagggggcaggagcagaacccaagactgagcatttctctcccctcctatgagtcgctaacggggctggacgaggcaacccccaccagcaccagggcggagacagagaccaccaggctgtccaaagcaaagactcagtgagggtctggtctcagaaggtaaggcatggagtgacgctgatatctgtggtgtgacagtgttcctgggagactcactccagacagggaaca

SEQ ID NO: 1548 - protein, 186 aa, Mus musculus
MMAQSKANGSHYALTAIGLGMLVLGVIMAMWNLVPGFSPADKPTSQGNKTEGGGGILKSKTFSVAYVLVGAGMMLLLLAICLSIRDKRRMRQSEELARIQQQAGTVPHSQEEDSQEEEEDVSSRYYVPSYEEVMNTGYPETRGQEQNPRLSISLPSYESLTGLDEATPTSTRAETETTRLSKAKTQ

SEQ ID NO: 1549 - DNA, 87924 bp, Homo sapiens
tgcggttttatcatttctgcagatcacattcctgtgtgtgagattctatacagttttatcatttgtgtaggtttgtgtaaccagcatcacaatcaaaacacagaactgggccaggtgtggtggctcacgcctgtaatcccagcattttgggagaccaaggtgggaaggaccacttgagttcaggaattcaagaccagcctggccaacatggcaaaaccctgtctctactaaaaatacaaaaattagctgggcatggtggcaggcgcctgtaatcccagctactcgggaggctgaggcatgagaatcacttgaatccgggaggcagaggttgcagtgagccgagattgcaccactgcactccagcctgggggatagagcaggactctgtccccatccgcccaaaaaaacaacacaaaactaaggagagaatatggagaatatggagaaaagggaaccctcatacactgttggtaggaatgtaaattagtatagccacaatggagaacagtttgcaggttcctcaaaaaactaaaattagagctaccacatgatccagcaattccactcctaggtatatacacaaaagaaaggaaatcagtagattaaagagatatctgcactcccttgttttttgaggcactattcacaatagccaagatttagaatcaacctaagtgtccatcaacagattaatggataaagaaaatgtggtacatatacacaatggagtactactcagccataaaagaggatgagatcctggcctttgcctgtttttggatggaactggaagtcattatgttaagtgaaataagtgaggcacagaaagacaaacttcacctgttctcactcatttgtgggagctaaaaattaaaacaattgaactcatagagacagagagcagaatgatggttaccagagactgggctgggtaatggggagtgaaggggaagtggggtgggtaatgggtacaaaaatatagttagaatgattaagatgaatgaatgaataagatctagtatttgatagcacaacagggtgactacagtcaacaataatttatagtacattttaaaataactaaaagattagaattagaatgttcataacacaaagaaatgatacatgcttgaggtggagaccccatttaccatgtgattattacacattgtatgcatgtatcaacatatctcatgtaccccataaatatatacacctattatataaccataaaattaaaaataagacattttcaaaaaatatagaactgttccatcaacatgagcttcctcaggtgaccccactgtggccaccttcatccccaacccctggcaatgttcttcatctatataatttattccaagaatattacataaatggaatcatagagtatataaccttttgagattggtgtttttttacttagcataattcccttcaaatccatccaggttgttgcgtatgtcaatgatttgggggttttgttttgttttattttttgagacagagtcttcctctgttgcccaggctggagtggagcgtcacgatctcggcttactgcaacctccacctcccaggctcaagtgattctcaagcctcagcctctcaagaagctgggattacaggtgtgcaccaccactcccagctaatttttttgtatttttagtagagatggggttttgccatgttggccaggctggtcttgaactcctgacctcaagtcatccaccccatcctccatctccccaaacgttgggattacaggcatgagccaccctgcccggctgatttgggttttttttttcctgtgtagtattccatggtatagatgcactacagtttaaccatttaccattgaaagacatttggtttgttcccagtttttggctattacgaatctttatgatttataaaattaatttagaaaatgtcagctagtggctgttgttttctgagtttgaatggggtgcaatatttcctgtgacccctcagtcatggaagttcttagactttttcatttgaaccctgcagaagccctgggtgtgggggaggcggagcggagatagagttcttcagtcaacccatctgtatagagtacttcctatgtgccctgcgctattctaggtattgggggtactgcagtgaacaaaacaaatgaaaatccctctcctcatttattattccccaatatacgtatagggaaactgaagctcagaaaagctatatgatttgctcaaaatcacgcaagacggaagtgatggaactagagcttgaacctaggtcttctgacctcgaggccaccgattttctgactaaattttgctctctatcctcctagacatcaattccagagcaaaagccatatgccggggatcctgtgttcaatgttttaagcaatagttcttttgtttggttggttggtttttattttttacacagggtgtcactctgtcacccaggctggagtgcagcggcgccatctcagctcactacagcctcgacctcccgacttcaagccatcctctcacctcagttttccaagtagctgagactacaggcacctgctaccacacccggctagtttttgttattttttgtagagactaggtttcaccatgcccacgctggtcttcaacccctggcctcaagtgatctgcctgcctcagccccccaaagtgctgggattacaggcgtgagccactgcacccagctaagcaaccattattaactggggctgattcctctgccaccaggggaaacagttggcaatgtctggagacattttgattgtcacagctggggaaaggggtgctactggcatctggagagtagagccagggaagctgtttggcatcctgcaatgcaccagtctcccacgacaaagaattcccagcccaaatgtcaatagtgccaaaactgcaacactctaatcgaaagatctcaaagagtcacaacaaagacaactgctacccagacaacattgtgtaatactgaacttccacccaagtacacacaatgacaggtagggtaagagcaggtacactgttggttgagggcttatggtcgttatgaagtaggtacaaagaaccatccactctgctgtgtcaatactgggaggcttttctgcagaggaggggattgggacagtttggatggtaggaaggagagactggtgggctgctcacaagaggatgcagaaagggcaggaggaatattgtgacctccactctatgactctgccacatctgtttctcctaaagaaccctggtaacctcctcctttgtgtagaaatgagcaagaaagcagagcaggacatgcaaagccctttgaggaacagcagggaaaccagaaggaccttcagtcacatcctagaggtgcaagaaacacaacttccactctcaaaattagattgaatttctatttcaagtccccatttggctggtagaaagacatctagccataattaatcagggcctccctacctcttgccctgggttgcgtctagatttgtttttggggtagaggaggctcagaaagtgccaaggcctgggcagaggtcagtgtctggtgtcccctgacatctgctatgttggcctcacttccatcttcctgatggcagatgcagctgcctaggcctcctggaagtctctgtgcctggcctctttctcctcctctcagcttcttcctccctcctctggggcacacgggagatgttggcagagcttggtaaacctctgcaaggctgcgtcacccctctgccaattactccctcccccactgcatctgtgccttgggaggggaggagcaggcactctcctgagcttgcccgaaagccacacttatgaagctagtgtgggactgccgcttgggcaccacccacctccctagccccacatcatcatggctcatccactctccttagatcctctgtccagacccctggcccagggcacttgacctcatcttggtcatggggaaatgacttttgcatcgtgctcagtcttcaggatgtcttgttaatgccacaaattttattcctagaagcctctgggacttctacttttgaaactcaaagcccaggctcttgtaatgccaaagtattggttcttgaaactcaaaagcgtctctgcttttctgctggatgaggcttcccctaaaggaagaagagccactgtctggaaagaacaaaagggaggaaaaaaaactttcatcaagtgaaatattatcacactacagcagcaaggcggagtacgcgggcaaccaggaccgtggcaggtgtggaagatactgtcattgcttctccctttgggcccctctgtccccaggtttatgacccattctccaaacctggatcaagaagtcccatctgaagggtgtcacaagcaaccagttctatgagagccagggtagagaagctgcaagaacacagcctccaggcagcctgggtccatgcccagaccccagctttgccagctcggtgttcatggtcaggtcatttaacctctctgtttcagtttccccatctgtgaaaaggggaaatatagtaccttcctcatgtggtgacgagcctgatcaaatgcagcaggccttgtacagtgtgtagcagactgcctggccctggtcagcactgtatgacggttggctgctattattgttgtcattggcttatccaaggggtgagtggatttccttggaatcccatcacacagggcccttgagcagttagttaactagcagaaggtcagggcacccatgcctggcctctggcattactcctcagctgcttgtcgaagcttcaaagggactctcttagtgtccttttatttcaagaaacagaaactcatcaggaaaggaaattcctgggaaaaacagaacaggagggccagcagtaatccaggcctcctggattacacattaagagtaagtggggactggcgcggtggctcacaccagtgatcctagcactttgggaggccaaggcaggtagatcacttaggcccaggattttgagaccagcctaggtaacgtagcaagaaccccatctctacaaaaaaaaaaattaaaaattagccaggtgtggtggtgcatgcctgtagtcccagctactcaggaggctgagatggaagaatcacttgagcccagcaagtggaggcttgcttctttctcctgctccctctgcagttggctttcctgcttcagtgtgtgccagtccaacatggcagcttccctgggctcgaggttacctgctgcagggacctgctggggtcttctgacagccattggcattgtttctgttgtcaaagcctccatttggttcaggtgtcttcaccaacccccaggtgactccaggtgaatcctgagagcctatgcccattttgagcgtccttgccagtgacaggcatatgacccagttccggcaaaggaggtatcaaggaagtttactgggagcttctgggaaaggtttcgtcgctgatgaaaaagagacccacgggaagatgagagagcatggagcccaagggatgacgagtaatgaggctgagcttgtgagaagggcccacccccttaggaagtcccacatgtccttgcagagaaggctggactgcatgaggggacaacggggacccactgaattgctgactttacaatacagagaatggattaaagggggagggtttgggagcaggacaccagttaggaagcagccagatgaactgcaatcatgctgaggcttagagggaagtttctacaagctggagcacaagaggagatggggtgatagggaggtagaattgctagctggctgttctcaggggtctcaagaacttgtaccccaatgcgacgatgtcctcagaagctccattctgggctgtctacacaggtccagttacactggtaactcagatagaaacacatttccagaatcaacatttttcagcaaacgggacaaaactgttttatttaaactaatggtccaactatccaattttgctttgcgctacgtgagcacaatttgtctgccacacagacctgattcagccttcagtggggctgggccagtatatcaccagtgaaacctacacgcaagacacatcccttcccggtgactaatgtgcaccgtttcaggaaaaggccaggttgaaagtgcacatacgtgatttactgctgactttggcaagagtcatacagcagagacactgctcagctcctcacaggtttagaaataagcccacattaagagtaagtgggggctgggcgcggtggctgacacctgtgatcctagcactttgggaggccaaggcaggtggatcacttaagcccaggattttgagaccagcctgggtaacgtagcaagacccccatctctacaaaaaaatttaaaacttagccaggtgtggtggtgcatgcctgtagtcccagctactcaggaggctgagatggaagaatcacttgagtccaggaagtggaggctgcagtaagcagagattatgccattgcaccacagcctgggtgacagagaaagatcctgtctgaaaaaaaaagtcagtgggaagagagagtgacctgctcagaaccaagcaagggtaaagaatgacagatggcagagaacagagcaagcaagggaggatacagggacagataataggaggatatgctcctggtggacaatacaggtggtttccagccaactttattattaacacattctcactaaaaaataaaattacctccccaacacacacacaccccccctcagtttctaagggtaacctgtttggtttgattcctcccatagtctttctgtacataatcaaatatatgtatgtgtgtctacatctttttaaaaagtcatttgtgagccaggcatggtggctcatgcctgtaatcccagcactttgggaggctgaggcgggtagatcacttgaggtcaggagttcaagaccagcctggccaacattgtgaaaccccatctctactaaaaatacaaaaaattagctgggcgtggtggtgtacgcctgtaatcccagctactcgagaggctgaggcaggaaaattgcttgaaccgagaagtcagaggttgtagtgcaacctctgcaccactgcactccagcctaggtgacagacactctgtctcaaaaaaataaaaaataaaaaaagtggtttgtgtagtatcatcatatttagtgcctttctcggtgaatgatataacttggacgttcttccatgtcagatagctctacctcattctttctggtgacttcatagtgtgccagcatgagtctatgccacaatttacttagcatagctcctagtgctgggcattgaggttggtaaccacttttcaccgttacaattaatcagcaatgaaaacccttggacgttctgttcctgagcacatgtgtgagttgttctgcatgatgatctatttctataagctgattttccagcctcactttcattgatgtgcctggaaagtcagtagcatgacagactggggtcttggtcactaaccagggacagtcgaatattttaaaactgtcgttatttacccattcagccagaaagaataaaaatgtaatgccacgggaattctcagaacagcatcctctcctctttgaattcaggctttcagaactagacaggctaatgctcccacaactcatgttcaggccacactgggtactttgtcacatactagttcacctgatccccgagttggtcctggaaaataggtattattagcatagaaatgctaataatttttttttgacacatgaggaaactgaggctcagagaggacaagacatctgcccagggtcacacaactcacaaatagcagaggattcagaaaccaaagacaaaggtgatggaatcctgccttctttctaaatccgtgatgtaggctagatcatggtgcctcttcagaagtttacagtggacagttagccaaaaaagcaggtgaagtgaacatctgcctaggtgactgagtttgcaggatgtattagtttcctcccgctgctgtgacaaattgacccaaacttcatggcttagaacaacacagtgaactatcttcttacagttctggaggtcagatgtccaaaacggatctgcaaatgccttcccaccttcaaatcataaggcagacccaaacttgcctttttgtggatgccaagagctccttctggatgctctggctgacactccattcctttccttttctagctcctagaggctgcccacattccttggctactgacccttgtccagcaactgtatcattctgatctctacttctatcaccacatctccctctctaactctgaccctcccgcttccctcttgtaggaacccttttgacaacattggacccaccaggaaaatcaaggataacctccccgtcccaacatctttaacttgatcccatctgcaaagtcccttttgccacgtaaagtaaccagttctggggatcaggttgtgaacatctttgggcagccattattctgcctatcacagaagggggttcctagcttagtgatttagagcaagggccctgcaaagaccccagattcaaatactttgtcacttgctagcagatccaggtacctaacttctctgagtcttaacagcctcatctgaaaaactagaataatagaatcttccttctagggctgttttgaaaaccaaagaacacaatgtatgcagtgcacgtgaaacacagggttcaataaatggtagggaagattcagagaaactaaccatgtagagggagagggctgtggaggagaggaggataaggagagacatgcttcctttggtagcttcttcagttttgcctgggcctcagctttgcctgagaatttcgtcagtctctccccagatcagccagggtgagcctgcttaaatggaacactctgaagatgatatcctgtgataaacaagacctgcccagttgggtctgcagcagagtggggcgggtctgggatgaccctggcatggaaaagcacagcagctctttgtcttcagattaggagctgggacagctgttctgacatgatcaccccccgcccccaccccaggcctctccaaagtccatcttgcagagtcaaatgaaaaccagattcctggtcttatctgagagctacgtgactgtttcctgtcactcctttggagcctgggaaggtccccacatgcattgtctaaactttgggatgaatacgcacagctcttaaatgggagcatattattataggtacctgcctacacaaagggtcctccctattcactaaaatcatgggttattatttagggctttcattcatccaacaaatgtttattccgcatttgcaggtggccaggcaaggtgaacattctctcagggtggagagtatgtgcagacaggaggaattatgctatgggagggagagcagaagctctggagtggatcatcttgggtctagatcctgatacttcccagctgtgttttcactgggcaaaatgacctcacctccttaagcctcagccttctcttctataaagtgggcataacaaataaccgcctcctaggttatgaggattaaatgagatggttcaggggatgtgggtggtaaccccgcccctggttcatagcaaggatgtgaggaatagcagttgctgtcatagacatggagactgtttccccaaatgccttcccacccccaaatcataaggcagacccaaacttgcctttttgtggacgccaaggttctgtcgagctgttagggtgcaagttaagaagccagaatggcgggctgaggggagaaatgcccgcatgttacaactctgcaggtgtacacacgtggacaccatatgtacccatgaattccgcctttggaagtgaacttgattgcagcctattttcgtctggaggcggtggattcccggtaggaggcgccttcagtcctcggctcgatcctgtgacgccagccagctgcctatcggcttctcagtgtttgaacttcaaagggctggacgctcacccaagaaggggaccccggcctgacctctctcggaattcaaaaaaatctaaggctcagagagggaatgggagctggctcttccctctgtgtttagcatccacgttttttggcggtctggctgaaaccagcccaccctagttcgggcgccagagcaacgcagttccgagggcagatctccaaggggcggaggcagagccgcgggtaagaggcttccgcgccgacttcgggtttgcactccccggagccagaactccgtggcggctccgggcctccgtggatccgagcagagactggctgcccgcctgccactcgcaggctgggaaaacgccagccggtgcctcgccgggaaagttctcggcaaagctggggatgagccctcagcagggcaggctcccggtgcagcgcgcccccatccattgcccgcgcgcaagaacccggaatgggccccacctgggccgggactcgggcgtgcgatcccgagggcgccctggggaccaggcatcgggtggggaccctggccgagggcgtgagctgactcagtttttaaaaactcgcttcctccttccctacttgtgccggtcactcacctcgctgggaaccagcccagggcagaagggggagagggaggcggtggcctccccaggaaggagaggtgagtatcccgccaggtaaaggcggggcggctggcggagctgtgcctcggcgtctgcgcctggtgtgggaggaaagcgggtctcccagctccacttaaacccctaaaacctgggacttctagcttgagacattccccgaccaccacccgtcacacacacgcgcgcgcgcgcacacacgcatgcacaccgattctctgggccctagggaggaggggggatcagggctctattttctcccgaccccctcttatccaactcggctggcaagggttggggagaacttaggcccagccccccggcacacgctcagcgcactccagcggcatacgctggggagtgggtgcccgcctcgctcagctgcgatccctcgcctcgggcccgggggtggtgccgagggccgggagggagggtcggccggtgggcggtgcttctccgggctggaggccgctcctggccggcaccgccctccgcctcccgcggtccctccctcccgcacgccggcgctcccaggccgcgcttcctgcgtccccaacccggtccctgagagggcactgcgccctctccaccactgcgttccctcggctaagaatcccccgaaccccagccccgcgatcgcggcgcccaccgaggaggccgcccgggtggggcgcgggggtcgcgaagcccgcagccccggaccgcccagccgagacggagccggacccgccgcctcccgggtgagtctcagccgccgcgccttgcgcccgctgcttcccgcgtagcgctgtcggttccccacagggccgtgtaagggggccgaggcccgtttgggtctcctgtccgtccgtctgtccgccgagcgcttcccgcctggggtcgaccaccgggaggactccgctccccgcaccctctgcggccgcgccccgccggcgcgggacgctcccgcctcccgggcaccgcgcctggccagctggcctcggctggggaaggcagctggccttgggggccccctgttggcgggaacaggtgctatccgcccggcgggcttcgaacccttggcttcgccagaagcgctttcagcgcgtggttaggagcagaacttcccagtaggtcccaggaaaccaccttggcgctttgctcgcgcatcccttactgtatggaagtcggggccttttagggatttagattcgtgtgtgtgtatgtgtgtgtgtcgctctacaagcaaacacgggggtaaagaatcgggcatgagcaaagtggattgaaactcgagtccttccctgagcgcgtcggtttcttcatctgtgaaactgacatgacaacgtcccagggtgcggcggggcattcatgcccagcacccagcaagcactcagcggtaagttacgttaccgggcctaggggagagcagagtacaaatcagatctcaaatcagcgcacaaacgggaggcgcttggcccggcgcgcctggtctgcattacaggataatggtctctttcccaaccagcggtgggggcgagagacctggcccctcccccacggtttccccagggagcagcccgtggggtgtcctgcgcagcgctccgaggtgcctgtgacggtgcatgggactgcgggtccttcccaacagcaggggaggtctggctgctgggaacccgggcgctgccggagtggggtgggcggggacgaggtgggcggggcagggacccgaaccgggaggtaagtcagcgggtggaaggcttgcccctctaggaccggccggcttctggctttccttttgaatgggttacccggagaacagcttgtctagggaactgttggccctgggaccgtgaacagctttcacaccccggaaacctgtcacaagaggatcctgacctattgggacagagcccctgcccctccaaatatctcactccaccaattgagaggtacccccagactgggagaaaaggccaaagaaagagagaggaggctagtggtgaacctgctcctcacggcttcggagctgacagctctctgatggggtgtctggggcctgccccagtgacccagagcccagaagcctcagggagcccccagcctagtgagggagtcagggatactcacgacaagtgttgcagaattggcgatacagtcaggccacaccacttgctggctgtgtgacctgacctctctgagcctcagcttcttcatctgtaaaatgggatgatgatctccaagggcgaggtggggtatttatgcctagcacatgaagtattctatagtaagttatgtcacagggcttagacgagaacagaagaaaggaaataactcaggaggtcctgctaagaaaagagtattggaatattcatcagggaactggagtccccccagggaacaggggaggaagggtgtctgggcagatcgaacagcacaggcaaaggcacagcgacaggagagtgcctggggtgtgctgggctggggaaggtgctcaggcagtggagggtgtggaaaagtaaagggaatggaaggtccggagtgacctggactggacaggtgggggctttcttggaatcattcaacatatgttggccgagcaccttctgtgggccaggcgctgttctaggtgctcaacaaagatgaacaacatggagaaagacgtccctttcattcaagttctctaagcagggaagtcgtctgatcccatccatatgttaagaagataatcctggctgcctggaagttggcgaggatcctagagaagactcctaggagagagaggctggcctgtgggttggtgagggcagtgggaatgaatgggggagctggaggagaggcccatacaggaagcagagagtaatgtgtggccttcactcatgactgttggtcaagggtaagattctggggttctacatgaggcccaaactgccagcctggtcccctgccagagagaagtagtgagtgagtgtctggggtattggcaggacccaagcccctccagctgcgactctccggctcgctggctccagatgtcacgaggcctgggagtttctctgtctgcgtgagggatgggaaagctggaggcagaggccagctggagcttctggggctcccgttttaataggttgtgtttctggtcaacgttcctccctccctctgcaggcctggctgtaaacccctcaggcttcttgggctggaagaggccagagtgtgaggagctttagtgtggattctcttcccccagccccaaattaaggtgggagtcatgcaaaagagaagcattgtctccctcggtgctgggaaagtttcagaagctcaggtgtcttctgacttgggatgtggtatgggggctgctgacttttgctttcacttttgtttctgctctgaagctgggaggaatcctcctcttgcagcgaaagctgtgagaatatccttctccatgcttcaagtctccctttgcttggagggaaaaggaaggtcctagaatgtctcaggtggaggggaccttcaggtcatcagagacatcattctcatttgacaaacaaaactcagagaggggatgggacttacccaaggacacacaacagttcagcagcagaactgggactggaacccagccctcctgactcccttctagggccctttactttaacccaggagacctggccacattcgggaccaagactgttttgggccccaggtttctcaacctctcagtctttcaagcggcttcatagagttgagctcctccccagcctggacaggtggtgcagcctcccctgccaatgttttattctcccttcctctggattgagccctcgctgccatggccacccctcctgggagctcttgctcctgagaaagaaaacaggccgtttgtttggaagaaacaagccacctgtttggtttcccaataccaggccacacagccctgtccctcccagacagccccaagatgctgaccagagatagccctctgagggtctctgctgagctcccctgaccctcgactcctcccctcagctcccgtctcaagactgctggttggtcctcaccttctgtctgtggtgtttacttgggcggagcaacctaaagtctccacattctctcttgccctggatttatcagacttagcagcccttaaacctgaatgcgtagcttcagatcttagaatatcggggccagagggatcttagccatcagaaaatccactctgcttatttgacaactggggagaccaagacccagggaagaggagatttgcctgagatcacagccaggaccagaacccgaggttccagagtttgtcttgaatgattttgaggatgattcttgaaaaacaaaacagggcaccctccccctccaagatcccctttctgtctgcacttcacactaccaggtgtttttgtggcatccgtggtgacatggtcaggaggagtaagggccaagggtcctgaaagatgaggtgtgcacattgaggagtgtgtctgcgcatttccaggtcctgtctgttcaaactggcattaacaccacggcatgagctagtgagtgcatttatctggcactcccttagccagacttgataatgtgtctttggatggcaggcttttaaagttgtcttcgtccacagattacaaaagaagtaggtgctccttgtaaaaacgagcagatgacatcgtgaaggctggcgaccactgttaatatggtggcgttttattcaggtttttgtttgctgagctgtttcatgtcctggtttgttgttgttgcttttgaaaaaatagagacaaggtctctgtgtgttgcccaggttagtcttgaactcctgggctcaagtgatcctcccacctcagcctcccaaagtgctgggattccaggcaagagccactatgcccagcccgtatcctggtttttcaactcgtcattacagtgcctgttatcttcatgagataatgtgagtgacttcacgcaggatctaacctgtaggtctcacgtgcttccaccccttgatggctagcaggtattcccttggccaaaaccctgtgacgctgtgcaaagtgcaaagacgtttccaattcaccactgtgggagtccagagggccgtttttctgcatcaccatggggtttgggaaagcaattctctctgaactcttagaaatggaagccacgggccatctgggtgtgatgcgtgtgacccaaattcatacagagggagggagacagctttgtttcttctgacttttatgtgtttatttttgctgtgtttgttttaacccatccaagtgccgccaccccaccatcactgccccttgccccaaatctccctgggattaggcatggggttaggcaagttgcaggtctctagaaaaatcggtatttggcatgctcatctccaaaccctggctcttgcagagtaggcgtttcaatagcaaagatgtgcagagaatttgtttcctaatcggtgattcaggtaggacaccccactctgggaacaggatggggcggggtctctgtctctctctaccaggatcacagctttgttaatgccataaatcatcagtactggaagtactcgtatcttggggattttctaagctcatgttcacagaatggacagccacttactagtggatttgagcatcgttgagtggttttccgctggatttttaaaagtgaagtagaagacagtggactagaaaatagcatgcatttcctgtcacgagaaatattccttagtaaaactttcagttatctgtttgtggatgtgcactgagtcactaggtaaaaacgtctctcctcctgcatggtaagaaccttgcgcaatgtagctccggttatactgtgatcctgggaaaccttggatgggtcctagaagcaactcaggggtttgcagggacagagctgagtggtggaggcagggccgacaggaaggaagctcggcttatgctaaggatacaaaacatccacttttaaaactctgtgactttaaaaataaaacagaaagttggaagccattgttcgtctagcctcctcaattcctagaagaaactgaggccacaaaacagaggctggggcctttgctgcaggggaggtagcactcaggcctcacattgaggagaatctgcagatgtagacccttgacccctccacaaatgagcgactcaaaacacacgttcacggtgcagcctgtgacccccataggcctcactgttgcgtgcactaggaattcatgtttatcctaaagcctgtcactctcgtgccaacaacccaatttatattgctgagatgcacaaagcattaattttttcaatgccacatttcaaacaaagaagagttaataaccctgttctggcatttctttttttgttttgttttgttttttgagacagagtctcgctctgttgccaggctggactgcagtggtgcaatcttggctcacagcaacctccacctcccaggttcaagcgattctcctacctcagcctccctagtagctgggactacaggcatgcgccaccacacccagctaatttttgtatttttagtagcgatgggatttcaccatgttggccaggatggtctcgatctcttgacctcgtgatccgcctgcctcggcctaggcatgaaccaccacacctagccttcttctttttttaatgtccccagagctttaccaatggaagcttcccaggcccatcccctggcctgagaggcctttgagatgataagcccagggtcaccaaatcctggcagaacctggcagaatgagaactcaccacagggagcaagttcttttttttaagatcgtggactcacatgatgtgcagttctggatgtctccaggaggttttgctatttcctcaacaggtaaaattaggtggctctaaatcttgggcaattttatgtcttttccatgtttttctcctcacatgtggtctagggaggggtgtagagaagcaggtggaatttacttgccttaccttatcctaccttttcctggaacccacaggttgggcctgtgctggttagggtgtggggcatgatttgttgatatttggtgagggaaaatgactttattttattttatttatttcttttgagacagagtctcactctgttgcccaggctggagtgcagtggtgcaatcttggctcactgcaacctctgcctcctggattcaagcaattctcttgcctcagcctcctgagtagctgggattacaggtgcatgccaccacgcccggccaatttttgtatttttaatagagatagggtttcaccatgttggccaagctggtcttgaactcctgacctcaagtgatccacctgcctcagcctctcaaagtgctaggattacaggcgtgagccaccacacccagcaagaacatgattttaaaaaacaaaacaaacactcaaactttcttaagttaccataagaggcctcacatacagcttccttaaaactgcctgcaatttggagagaagcagttaggtactggaactgcctgtgggtaattattgttttcaaacagtgacagatgcaaattctcttcttttgggggaaattgcctgtagctaaacaccggcgccatcactttaaacaaatctcctgatacatatggtatgccaggcgctgagcccaggaacgagggagagtcagcccccgccccccaccccgatggagctgatcccccacgggaggcagcagggattgtaccttaacaacatgtgaataaagatgaggaagcacagcccgtgaaggaggaggcttaacccaaacttggagagtcaggaaggattttcagaaagagtgcagtctgagctgaaatggggagcggggagggcaggtgcagccgccaccgccaaaggtcttcctggtggaggcaactgcctgtgcaaaggcctcaaggtgtaaaagagcttcgttaacacaggccaatactgagtgtagaaacgctgcactcagggcagatgctgaaggcagaggtggaaaaagtattttatatagtttcttcttaaaagtcattttgggggctgggcatggtggctcatacctgtaatcccagcactttgggaggccaaagcaggtggattgcttgaggtcaggagttcacgactagcctggccaacatggtgaaaccccatctctactaaaaatagaaaaattacccggtatggtggcaggtgcctgtaatcccagctactcaggaggctgaccacaggaatcgcttgaacctggaaagcagaggttgcagtgagccgagatcgtgccactgaactccagcctgggcaacagagtgagactcatctcaaaaaaacaaaagtcatttttctcaaaaaattaaaatcgaataaccataggatccagcagtttcacttctgggtgcatacttgtcttagtccatttgtgttgctgtaaagaaatacctgagattgggtaatttataaagaaaagagatttattggccgggcgcagtggctcacgccggtaatcccagcactttgggaaaccgaggcaggcagatcacgagatcgagaccatcctggccaacatggtgaaacccagtctttactaaaaatacaaaaattagccaggcatggtggcgggcacctgtagtcccagctactcaggaggctgaggcagaagaatggcttgaacccgggaggcggaggttgcagtgagccgagatggagccactgcactccagcctagcgacagagcaagactccatctcaaaaaaagagagaaagaggtttatttagcccatggcatctcagatgcatcagcatctgcttctagtgagggcctcgggcagaaggacagcaggcgtcatgtggtgagagagaagaggagagaaggagtggggagcagactctttaacaaccagatctttgggcaccaagccattcaagagggatccactcccaacaaccaaacacccactaggccccacctccaacattggggatcaaatttctcttctttttttgagacagtcttactctgttgcccagactggagtgcagtggcacaatcttggctcactgcaaactctgcctcctgggttcatgcgattctcatgcctcagcttcccaagtagctgggattacaggcatgtgccaccatgtccagctaatttttgtatttttagtagagatggggtttcaccatgttggccaagctggtcttgaactcctggcctcgagtgatccacatgcctcggcctcccaaattgctgggattacaggcatggccaccgcatccagcctggggatcaaatttcaacatgagatttggagaggaccaatatccaaactatatcaatgctcaaaagaattgaaaacaggtttttgaagagatatttgtacacccatgtttatatgagcattactcataatagctaaaatatgaaaacaacccaagtatccatcaaaggatgaatgaataaacaaaatgtggtctatccatacagtggaatattattcagcctccatgtggaaggaaattctgacaccatgctgcaacatggacgaaccttgaggacatcatgctaagtgaaataagccagtcacaaaaagacagatactatatgattctacttgtatgaggaatctagacatcatagaaatggaaagtagaatgttggttgccaggggctgggggaagaggaatggggagttagggtttaatgggtaaggggtttcagttttgtaaaatgaaagcgttctgtgaatgcatgatggtgatggttgcacagcagtatgaatgtacttaatgccactgaactgttcatggaaaaatggttaagatagtcaactttatgttatgtgcattttatcacactaaaaagttggtgggtgggggagtcattttggaaacaagactcagatagtcatttggccatatcattgcgttctctctacagaccaggtgttcttccaggctttggggggaaacggtgcctaagacaggctcagttcctgccctcttggagcttacaccttattaggcagcagggaggagtcagtcaagtaggaaaccaacaagtaaaataacaaatcaataacatgtcaaatgcactgatctgaaatctttgccccttccctatgctggcaggatcaagccaaagctaagctctttaactttcaacactataaagcccggacttcttagagtcagcctctgttaatcttttcagacctattactgctgccttaccccaacttcaactgcatcagtcacaaggaactactttccacccccacctacctcgtacccctgctcaaagccaggaactttggcggcttttttccttcctgttctttctgcttttctttctagactgcccagaggctttagaaaacaccataatttcaattctagaagtttatcctaagaaaacagttaatgagtataaggagttagtttcgagactgttattttttgtaataatagcaacaaaattagaaagccattttgtttttaatctgtccagagatggtcctagccacgaccctttaaataaatttttgtttaattttggaataattttagatttatagaaaagttgcaaaggtaatatggggcatttttgtctacccttcacccaacttcccctaatgttggctttttttggggggggggaggggggaggggacaaagtctcactctgttacccaggctggagtacagtggcgcggtctcggctcacagcaacctccacctcctggggtcaagtgattctcctgcctcagcctcccgagtagctgggatttacaggcatgcaccaccatgcctggctaatttttgtatttttagtagagacagggtttcaccatgttggccaggctggtcttgaactcctgacctcaggtgatccgcccacctcggcctcccaaagtgctgggattacaggcgtgagccaccatgcccggcctaatgttggcatcttacataatcgtattatacttatcaaagctaagaaattgacatcacaactaactaaactacagactttattttgatttcgctggatttcccactgcatttttattcaccaggatccaattcaagatgccacattgcatttggtcatcttgtctccttagtatcttctgaactgtgacactttctcagtcttttcttaaatttcatgaccttgagaactttgaagagtactggttagtgttttgtagaacttccctgaatttcggtttgcctgatgtcttctcgtgactggactgggcctttgggttttgggaaagaatcctacaaaggtgaagtgtgcttctcactgaatcatgttaggatggagataatatcaatgtaacttcttattgatgacatcagccttggtcacttggttaaggtggtgtctgccacatttctccactgtaaagttactacagcccctttttggaagggtattctttaacatgagagcgaaaggcaacattataaaagagattattgaaacgatttttagattaggcacctaaaatttaaaaactttgatatatcaaatgataaactggggacaatatttgcaacacagaacagacaaagagttgtgttctgaatccatgcgggagctttgctttttttttttttttcctttttttttttttgagacggagtctcgctctgtcgccaggccagagtgcagtggcacaatctcggctcactgcaacctctgcctcccgagttcaagcaattcttctgcctcagcctcccgagtagctgggactacaggtgcgcgccaccacacccagctaatttttgtatttgtagtagagacgaggtttcaccatgttggccaggatggtctccacctcttgaccttgtgatccgcccacctcgacctcccaaagtgctgggattacaggcatgagccaccaagcccagcctgcttttctagttagtaaggaaaagctgaatgccctagttgagaaatgggctaaagaagaaatgctgaggccaggcacagtggctgacacctgcaatcccaacgttttgggaggctgaggtgggaggattacatgagcccaggaggtagaggctacagtgagccgtgactatgccactgcagtccagtctgggtgaccctgtctcaaaaaaaagaagaagaaatgctggtggccaattagtacatgggaaaaaaaagaatcagtattcagcctcattgtattaaaggaaatgccaattaaaacaatgccgtctttcacacaggaaatctaaaatgttttaaaagttttaaaattttaatttaaataatgctaactgggaggtagtgctttcaggagctcagcatagaagtgtaaactggagaacagtctgaaaacgcaggcccaaacctttaaagcacttagctttaaaacacttttaattccaagattttaaccttgttattaatatcttcaataccaagattttatcccgaggtaacaatttatggttgtatacggagttaatttcaacagtattttttataatagcaataaaactaaaaatcaaatatatttgcagcaacagggaattggtgacataaattgcagctctttcatatactgaagtggtcctcaaccactaaaaattccagtattgatgaatactgatgatacgaaagattgttcattgtacatcaaatttttcaaaattaaggttatactgggaggtggaggttgcggtgagccgagattgcgccactgcactccagcctgggtgacagtgagatttcatctcaaaaaaaaagttagggttataaaacatattgcagcaatatcccatttttgtaaaaaacaaaaaagtattttgtttacacagcacacaagaaagcatggataccatcatagatatttatcagcagttatggatgggggtagccatggggggtttcgatattctttctgctaatctgtatttaactaatttttatttcttaaacaagcattgttttcataacaaaactgttattgataacaccttctcctcccatttggaactttaatgacctgtgctgaagacccataggcttgttatgcatcccacagggattactgccaggcaaggtgctttgggaactgtagagagctttgaagacatcagctgccactcctggtggttggtttacccttcaaacttcgagtatctgggcctcccttctgagacttaggaagctgagataggagcatggtggaagccacagcagccgactcataggcaactgtgagaaaatactcacccaaggctgggcacggtggctcacactgtaatcccagcactttgggaggccaaggccggtggatcacttgaggtcaggaatttgagaccagcctgaccaacgtggtgaaaccccgtctctactaaaaatacaaaattagctgggtgtggtggcaggtacctgtaatcccagatactcaggaggctaaggcaggagaaccccttgaacccaggaggcggaggttgtagtgagccaagatcagagcactacactctagtctggatgacagagtgagactctatctcaaaaaaagaaagaaaagaaaatactcgcccagcattgtattttatatatatgtatgtaattttccatttgaacacagttcgatgagttttgactcacaagcaatcatgtaaccaccaccacaatcaagatgtagcaaagttccatcaccccccaaaatactctcctgctgcctctttgtagtctttcctgtctccaccccccagcagccactgatcttttttctgtccttatagttttgccctttccaggatatcacgtaaatagaatcatacagtatggtgcctttggagtctggctgcttctactcagtagaatacatttgaaatggctgggtgcggtggctcacgcctgtaatcccagcactttgggaggccgaggcgggcagatcacgaggtcaggagatcgagaccatcctggctaacatggttaaaccccgtctctcctaaaaaaacaaaaaattagccaggcgtggtggcgggcgcctgtagtcccagctactcgggaagctgaggcaggagaatggcatgaacctgggaagcgcagcttgcagtgagccgagatgacgccactgcactccagcctgggcgacagagcgagactccatctccaaaaaaaaaaaaaaaaaaaaaaaaaaaaagaatacatttgagatttccccatactgcatttattccatggtatgaatgtgcaggacgacagtttacttatcccttcacctgttaaaaggatatttggattgtgtctactttttggtgattacgattaaagctgctataaacattcagaggttttagtatcaacatatgatttcatttctcttggggaaatacctaggagtggaattattgggtttgtatgtgagtgtatgtttatctttatatgaaatgactaaacttaggaggttagggccagttcctccagccagcaccagggctatgcagggacctaatgaaacattgataatatcctcccctcccatttggaacttcagtgacctatgttgaagacccggtgaaaccatctgtcttttctggagtgatgctttcactttgccagctgatgtgggtttcaccctgctggtaggaggttgaccacctccccattgatgactctccctttcccatatcacaggcatggaaatgacaatgagtagtgatcgttcttaacttaaataactttttcattaactctttttctttaattaggaaactaatatatgcacatggtataaaaaaatcaaatggtgtaaaaggatgtccaatgaaaaaatatacatctccctctcattccaggctcccagtcccttatacgagcgtagccaccatctgctatttcttgtatatacttctagaaattgtctctgcatataatgatgcttttagatgctgcttttagatgtttgcctggtcatcaaagcaataaagtattatagtggtcaggatcattatgaaattgttgggtaatttcaaacttgtaataactcctatgagggtcctcaatcacctttaaggacccactaaccacctgaaatggtctgtcaagcattctctgtcaagtattctatctctgcatttttctgtggcaggtcagtagctttcatcagattctcaaaggggtctgtgcaccaaaagaaagaaggggaatggggaagaaaagaaggaaggaaggactgtagaggcaatcttttacagacaaatggtagataaatgtataatgagcttggatacatctgcaattagctgtaactcagaatgtataagttccaattttatgtattattgccccttggttttatgattggaagctggtagaaccactgatttaacagcataggctgttttgtcttgggctaagaggaactgtgcctggctgagccaagagagacgaaggccatagagttcttcaaccttgcctgtgtgtttgtactgactcactgcatctgaggaagtctgttggtagcttagaacacgcgtactgtctctcccagggtgagccagtgactgggaacgtctcacagaaaggagcagacaaacttgcttcccacaagagggcttcaggctgaaaaatattcaagaagagtttaggggaattcctgggagtcagagccatatccggctcatgataaaagttacagatatttggggactacccttattagagtcaatatctggagttggagtggggagcaactaagctttcccatcactcttaagtcatttgatgctcaaaacagttctatgttagggaaaccgaggcaggagtatgctagctacatacagtgcaaactaccccacatctgaaggacttaaggcactccagttacattttcatatattgggtgggaaggtggggtcttggctccacacagtcattcagagacccaggcttctatctttagcacttcttctccaagagtttagtgagctaataacagggcccacagctagaaagtgagggagtcgggatttgaacccagccagtctcattctgaactatgatgctatggtgagaaacaatagtactggcatctaactagatctacctggcatgtaacttcagaactgggaagtgggagataacttgggattctgaggaacatttgttccttgttgccaaggaatcaagctcttctttttaaggagtgagatgggtaaatctgagagactttttttttttactttgtcttcaggtgagaattttcagattcaacacataaaaatgagagccttttccctccaaaagtttgcccctgaaataaatgtgcgtgagactatgttgcctggtgcttgggtcttttcattagcaaatatcaacccccaaaagctgatcgcccttccaccatgttactgctcattgcagggaggaagtttgagacatttcagcaacctgattaaaagattttttcccagttgaaatgtcttcttgtagaaacaacccaaatgtcccataaaagcctatggtttctacaaggttatacaaggggaacaccacatggccattcaacatggcaatgacacagaaggctctgaaagacatagaaagatgagtctagtgtgccaatgtaaaaaggcagattacgaagctgtccattttttatttcaaaattccctaatacgcaaagaataaaaatttgactatttactataatgtttctaatgtttattcctaacagattacaagtaatttttattccctttctccctgtcttctcttttctaacctgtactttctgagtttcccacagagaaacatgtatgactttgtattaaagtaacagctttaagttcaaatggtcctaatgatctgggtgaccttgagccatggctcactttctcgaaatggggagaatagttttaggatgttgtgaagattcaactataaatgtacttaaaacagtacatgctcaatacatttttaggtgttactgtcataattatttttgaaaatctttccattctagtaagtccattccaaatccaagccaaacacacctgagagtcgtggggctttatctcagaatgcctgggagtacagacccatgagcaagccaacttcctcctttccctcctctcccccggccctctgctgcagggcaaggtaaagctaggtgcctgggatactgctgggtttttttttatcttttttttttttttgagatggagtcactgcaacctccgccttccagtttcaagcgattctcctgcctcagcctcctgagtagctgggattacaggtgcgcaccaccacgcccggctaatttttgtattttttggtagaaacggggttttgccatgttgcccagactggtatcaaactcccaggctcaagtgatctgcccacctcaggctcccaaagtgctgggattataggcgtgagtcaccaccacacctggcctattttaaccatttttaagtgtacaattctgggacattaagcacatttacagtgctgtgtgaccatcgccactgtcttttttccagaactactacatcatcccaaacagaaatggaggcaggttttctttttttgagacggagtctccctctgtcgcccaggctggagtgcagtgttgcgatctcggctcactgcaagctccgcctcccgggttcatgccattctcctgcctcagcctcccaagcagctgggactacaggcgccctccaccacgcctggctaattttttgtatttttagtagagacggggtttaaccgtgttaatcaggatggtctcgatctcctgacctcatgatccgcccgcctcggcctccctagaggcaggttttctaaatgcttgcatgagtggttctccatcttcagcttgtgttagaatcctctggggtggggggcttgttaaaacatagattgctgggtcctccctcctcctccaccccccgccacatcccccacccccagttgctgattcagtaggtctgagtggggccccaggatttgcatttctaaccagctcctgggtgacgctgatgctgttgatttggggccacgcctggaagaccgctgtttgagatcaaaaggtttgcaggtcagagtggatgacggcatccttccaggtcaatgagagaagccaaacttctatgacctatgagataaggggtttgttataggaattagatcttatgcattcatagggggggcggcagaaaggaaggtggaagagttgccggggaccaggggcatcgccacctggccctgggtacacgggcaaactggtggagaagtctacagccagccgttgtctggtccatccccagccaagtgtccgcgggggggcctgggctgctgttggttaacaggaccagcagtcaggagaaagagctggatgcagaatggaggacaggctcgaatgtgctggaacccacggggctgtctctcacctcatccaatcatgatgacctctaaagtgtaatggtcgctgcttcacttccatctcccagctttccacagattcctcttttgaccaattataacccagaaccagtcagagaaggggattctgggaaaagtagttccagcttaaccaagcccgcacagcaggaactaccacagctgatcaatcagtccttgccgcggaacctcctccttgaacccacaggtggtttctggggctctgctgggggttccctgactctcttgacaggaccttctagcagaaacagatgtggtccatcccaacaaccccttgctcagatcatcagctgagaacttaataaaagcagatttccaggccccagcccaggcctgccgagtcagacttcagcagtgggactcaggaatcagattttcaaacaagctctctagctgattaacatacccagccacgtttgaaacttctgaagtatggaaaagaaagtggactctgtccaggcacagtggctcacacctgtaatcccagcactttgggaggctgaggcaggtggatcgcttgagcccaggagtgcaagaccagcctgggcaacatggcaaaactccatttctgcaaaaaagaaaaaataccaaaattagtggagcatggtgacacgtgcctgtagtcccagctacttggaaggctgaggtggtagggtcacctgaccctgggaggtcaaggctgcagtgagccaagattgtgccactgcaccccagcctgggcaacagagtgagtgagaccctgtctcaaaaaaaaaaaaaaaaaaaaggaaggaaggaggagggagggaggaaagaaaagaatggaaaggaaggaaggagagagagaaagaagaaaaaagaaagagaagaaggagagagagagagacagagacagaagaaaaaggaaaagagaaagtaagtgaactctggggctagacagccacgggttagaattctggttccaccacgtgccagctttgtgatcctgagcaagtgacttaaccctttatgatcctatattgtctacaagagttcctccttttctatcatttcactctccactgtttcagttacccatagccaactacaatctgaaaatattaaatggaaaattccggaaagatatgattcataagttttaaattgcatcccattctgagtagtgtgatgaaatctcacactgtcccactctgtcctgctccagacgtgaatcgtctctttgtccagcagatgggtgctgtcgacactacctgctcattggtcacttaggagcggtctgggttatcagatcagaaaacgtcgtcgttatgtgtaaggtcgggtgctgtctgttgtttcaggcatccactgggggtcttggaacgtatcccccgaggatatgtactcagctgttaaatgggctcaatgcctacctttttcatggagggttgtgggaaccgaatgaggccatgtgtaataaacttctggcaggtgaaatattattgtgcttaatccagttaatagttgtgcctggacatgcctagggagtaggtcagatgggcccagcatctcctctttctgcttaggaatctggggtttaacctgatcatattctttttttttttttttttttttgaaacggagtttcgctcttttgcctaggctagagtgcagtggcgcaatctcggctcactacaacctctgcctcccaggttcaagcgattctcccgcctcagccttccgagtagctgggattacaagcgcacactaccacgcccagctaattttttgtatttttagtagagacggggtttcaccatgttggccaggctggtctcgaactcctgacctcaagtgatccacccacctcagcctcccaaagtgctgggattacaggcgtgagctactgcgcctggccaacctgatagtattcttaacacagattgttttcctgccatcatgaaaactagacttgctttaaagtctttagagtctcagttcatattccaggcattgttttacataaatatcatctgtttattttttctttaagcaaatttcacaaactccatctaaaaaaaaaaaaacacaaacaaaattcatctgtcaaagaagagcctttcaacttctagttctgtttatctaaaaacaccctttcttcaacctggaatcttggacattttgccacatgctgaacgtttctatgaatttctttttgtgtctgtcaccttgacgttagttgtcaccttaactaggtaagacttaggttgtggtctgcatgagtagaacaagctagtttttcaagaaagcaagttggaaggtttcataacacctgctcttcaatgggttaaggcagtgctccggggccaggccatctgataaagggagtggtaactttgaagtgtggcttataaagaagctgttatttccacagcaagcgaaagcagcagtaaagaaaacagggttttgcagttccgctggaaggaggttggggaaggtcagaaatcagggcgggaacttcgagagcagctgtcagcactgggcaaaggctgagacaggtgagcattgggcatctctgaatgacatgcagggttctgtgccttagacacacttctgtagccttcgttgatagaatcccatcattttcctttttctttttctgatggatttcactctcttgtccaggctggagtacagtggcttgatcgtggctcactacagcctccacctcctggactcaagcaaacctcccacctcagcctcctgagtagctgggactatggacacgctgccaccacacacagctattctttagtttttgtagaaaccgggtcttgctgtgttgcccaggctggtctcaaattcctggggtcaggtgatcctcctgccttagcctttcaaagtgctggggattactgacatgagtcaccacacccaaccccctcattttcctatatcggtctcaactctgaagtgtttcaacctggagacctaggtaaatttcattcgttatttgagattttcctatgtcagtaaagggctcaggttgccatataaatatcatacactgggtggcttacacaatagaaatttattttcttgaagttctggggggtgtagtttaagacccagcagtgttcaatttctggcgagggctctcttcctggcttgcagatggccgcctactcactgtgccctcacatgaactttccttgatgcacgtgtgcagagagagctctctggagtcacttttataagggcactaatcccattagaccaccttcatgacctcatctaacctgaattacctacccaaagccctatctcctaatatgttgggagttagagcttcatatgaattttggatggacacaaatattcagtctggacagcaccctaccaaccttttggtcgctgacactaaaatcctctgtccccttcatctctcctgcccaaatcaaactcatcacaagttcttctccatttgtcaactttgactctaaactagggccgtaggctgggtgcagtggctcacacctataatcctagcactttgggaggccgaggcgggtggattatctgaggtcaggagttcaagaccagcctggccaacatggcaaaaccccatctctactaaaaatacaaaaattagctggacgttgtggcgagtgcctgtaatcccagctattcgggaggctgaggaaggagaatagcttgaacctgggaggcagaggttgcagtgagccgagaccataccactgcactccagtctgggcaataagagcgaaactccatctcaacaaataaataaattaaattaaataaaataaactagggctgtaagctcctaagtggttttctgttccccttctatcttgcccatcctccaaggtgatttctgcctcagggcctttgcactggctacctctgtgtattagtctgttctcatgtggctaataaagacatacccgagactgggtaatttacaaaggaaagaggtttaattgactcacagttccacatggctggggaggcctcactgtcatggcagaaggtgaatgaggagcaaagtcatgtcttacatggtggcaggcaagagacagagcttgtgcaggggaactgccatttataaaaccatcagatctcatgagacttattcactaccaggagaacagtatgggggaagctgcccccatgattcagttatcttcacctggccccgcccttgacacatgggaatcattacaattcaaggtgagatttgggtgggcgcacagccaaaccatatcactctgcctgggacttccccacctccccagtctgctgccaccgtgtcagtctcagtgaaaatgttgtcctctctgaaagccctttcttgatcattctgtcaaaagaacccatcttccaccttgactcttacattcttctgttttcttttccggacatcttgtgataggttatccctttacttgtttgtctctttcaggaaaagagaagctttgtgagaacaggcctttggcttgttcacttctgtgtttgtagtgcccaacaacccagtggttgctcagtcaatgtttattgaaatgaatgaatgaagtcaacagagatttgttgaggcttcctgtgaacagtcctatgcccagtgttagaggagtcccagaaaaatataaaaagccccagaggcggcagtgagaacacaggtgttcagccctgcgtgttaaactttagttagagagagaaagcgggaatgaaaccagcaccctcaagacgactctaaatggccggtagcaattggctgatacaaacaacctgcatgaacagaacttgagagccactccccgctggccatggcaggaggcttctggaagaaaggggaatagaaccggatgtggaaggagaggccttcaggatggggtaggggaggagagaaaggcaagacacagagagtggagggctgcagaggctggaagatagacccaggaccgtttccctccttggacatgttcaggacattactctggtcttcccctgagagagaacatgtttttctccaccctgcatcattggtgcctggtacagggccctgcacaaagtgcatggtcaaggaattaaagaattcaggttggatgaggtagttcacagcctccctggggagctggggctttatcctgtgggctgtgagggacactgaagttctgatagacacagtggctggagggttagcatggctgggcctgaaagctagggaagacttagaggagtcagttatcaccatcagccaggcctgagaagtgagaaggagatggatgaggcaggaagaatcactgaaaaggactctgacaaaaagaagcaacgtatttgggagccaactgaacatggatatgggcgggagttgcagatgtctgaaaggagccagtgggggatattaaggagagagtctggccagatgggaggcagcagggagtagtggggattgtggcaaagtggggtgccaagccccttccctaggacagagccatgactcagcaccatgtgagaatttaggccagagatgccagattttcaagttttacatgcaagatcacccatgttctcaatattggcaattactccatattacataaaataaataacaaacacttcacaggccaaagaagacacttccatgggccagatatagtcctggagctgccagtttgaaaccagagagtgtgtgtatgttagaggggtggagtcagggaagggagagaatgcccaaggtcactgagatttcaagcccaggccaccaggaaagtgatatgtccttgcactggaatagggaagtcgggaggaaccaggggccggggaggatgggcagggagtggaagatgctgcagcaatggggatggtcatttgacaaaagaggacacagactgagaacagctcatcccgagcaagcagctggatcccaaatgcagttggtcacagactgaaggggggggcctgtccctgtggttaattggtgatgggcgtgcagtgtctctctgggaccttgtctatgcttctcttaagcatttgattgttttagatttgggggatttttaaatttgattgattgattgattgattaagattgcatgatttgcacccttgtatgaagcaactgtaagaacaccggtgttaaacctcagagaatgggttgcagaatatttcccaggttatcagtggtcaccaaccccatccccatccctaaagaggaagcgagataagcccagcgctgtagcataacaaccgcgcatagcatgcctaacgtcacgcgaagtcttctaacccatacgcgctgatgaatcctggcaactccgttagggagacacgacttatcaaacccttttcatggcccagctgaaatgacacactgacgttcacccagccaggaaggaagtaacacagctgggagtcgaacctagaaccagaacctttgaccctggctcaataatgcctgccttgcacaggcatttagcacttagctgagttgacccatcaggccacatgaggtccttgtggctggagacctgtgtggccaggctggagtcctgtgtggccaggctggagtcttgctaggtgagcaggggtggaagagggattccctggggcagagccaggagacagtcctggtggaggagtagagcggtcccttcggttgcccatggtggctcttccaagccttaactcccttcctggtcctcccaccccacctgtctctatatccttgagctcagccgattcctcagagtcctcttgggtccacaccccaggatgaggactctgaggctttagtgagcatcaggatcacttggctaattaaaagcagatgccgggccttacctcgcattctgattctgtaagtccttcatctggcccaagaatctgcatgtttagcagaccgcaaggtagtgcttccggggtcttcagataacggccgggtctcaaactgctgctccctttgcttcctgacccccatctgctgctcacctaccatctccttttatatacctcatatactccagtatcgtgagttagtactggtggtgtgcccattttacagatgaggacattgaggctcagaaagttgaagcaacttgcctaaaaccatccagacagacctggatttttatctccactgactctaaccaccttgctttactgcctctgctagatctgcattggtcccctggaggtcccttagcggagagtttaggggaaggactgagaatggtgcgatttagcagtgtgttcaatgggcatgaaacctggttgatgccttggcagccggaactttccttgtgttatctccatgggcttttagccctcatatgaacggctgacatcattagtcagaacaaaccacccagaatcggttcaactttcaaagctaaatggaaatcaaaatgtggaatgactcagggactgctcgttaggaaaactgattcctctgtgactcagagcagatcttgtaacctccaggggcttggcatctggacatggggcttaaaagagaacagactggggaatcgcaccccaactgggcagctgtggcacctggacaggtgattaaaattagcacttctacctgtgacccagcaattgcacttctgggtatttatagagagaaaggcaaacagctgcctttttcacacaggctggtacacagaggttcagagcagcattatgcctgacattatgcatttcctctagtggaggaaacatcccagctgtccctcagcaggccaacagctaaacaaactgatacagtcacacagctgatggctactcagcaagttaaaggaaggaaaggaaacgggatacaggccacaccatgggtgagcaaaggaaggcaaacagaagagcactttctgggtgattccacttccctaaacttttggccggtgcaatagctcctgcctgtaatcccatcactttgagaggccgaggtgggaggatcacttgagcccaggagttcaagaccagcctgggcaacatggcaaaaccctgtctctacaaaaaatataaaaattagcgggcgtggtggcgcatgcctgtaacctcagctacttgggaggctgaaacgggaaggatggcttgagcccaggagttgaagctgcagtgagccaagatcatgccattgtactccagcctgggtgacagagcacgaccttgtctcaaaaagcaacacaaacaaatgcaaaaccttctaatataagcaaaactaaccgctgttaaaataaggcagaaaggtagactgaaagaaggtatgcacatatgagggaactttctgggatcatggaaatgtcttctctctgggcaatggttacatggatatatacagttctcaaaagtgcatctaagtgtacactaagatctgtgcattttactatatataaactgcatcttaagtaaataaataagtaaagggcagatgcctccgccccagccctggcaactgagtcagcagacctagggtgtggcccacgagcatctccatgctcagcaagtgctgagtgttgatgcccagcctgcggtgggcaccaccagacactaattgctaaagtctcttctggctttagcaggatggctgagtctttgcagttgttgagcatttaccattagtctgtttttaagcataaacctaattgcggtcaaagtctggtcccagggctgtctcctgatcgtcagcaagaccagctctaagctatggacaaaggctcctcagtcaccaggcagatcctggccatgtgccgggcatcacagggcccgctgtgctgggaacagaggccagcactcacttgcagggctgcagacacacatcaggtattgggcgtcgggcagaaccagacaggcactctctgatcagtttctgcctccctggaagccctccagataatgattttggctgtgtgctgaggagcttttgtgttatagacactatgctgattgttttgggggcatgtttaattatatgagcggatgcattgtgtagttcttagaggctggagctaagagcccccacttctccatgattgcctatgtttctctgtataagtgacctaacctctctgaggctcagctcctcttctgtaaaatgaagacagtggccgtacttcttccctcacagagcctttagcacggggagcatttagcaaatgctggctattattatctaatttaatccttataataaccctataggcaaggtgctattcttacctgcagagcaaaaaccaaggctcagaaaggtcaagtccctcgcccaaggtcatatagctagaaaatggaggagctgggattgaaacttgggtctgctcaactcctgcctctgttcactgcaccatgctgtcatcagctttgtgggatggggatcaatgcagaagaccccctgcagactggacggagaatccatcgctggctgagtgagagcctgtccttccggaaggctgtgtgcactggttccaagagtgatttcacatccctcttctaccagctgtgggaccttggacaagttacttaatgcctcaagcctcagtttcttcatctttaaaatgggagtgctaataccagccttaacaagctacagtgaggatggaatgagtcaatagatgtaaggcatatacaacggcaccctgaacactgtaaaccttttgtacttgtctgctgatatttgctgtcatctgcgaggtcactcacctgtctaggtttgtaactgagctgggtggggctccaggttgcagtaggatgggaagttgtccttcatgcctttgaggaagtgacaggatagcctccaggtggcatgtggcaacaggtgtagcaaaaagcctttttgaactacatccagggactcttaagcgctcaaattaaaccgtcttttggattctctcatttttaaaaactcaaagcctcgttcccaggcttcggttcctaaccatctttctttactcccttgcaagagattcgggctgatggttaccgtcatgtctaagtaaacgatgagcttcccaccccacagccctggctctcaggtcatggcagcaggttctcgaccagacggggctcaaggtgaacaaacaacctttctgtttatttattttgtatgcttgctttagtgttttgcctgtgttgtgggaaccacagcatgggtttctcaagctgctctgttttctttgggttgaaaacaaaaataaaaggtgaaccatcaaaccgtgacgtctggctgcctgcatgaaactccacgagggctggtttataaatttaaaatgtgtgactgtccgggagtggtgtctcacgcctgttaatcccagcactttgggaggccaaagtgggtggattatctgaggccaggagttcaagaccagcctgacccatatggcaaaaccttgtctctactaaaaatacaaaaattagctgggcgtggtggtgtgcacctgtaatcccagctactcgggaggctgaggcaggagaatcgcttgaacccaggaggtggaggttgcagttagccgagattgcgccattgcactccaacctgggcaacaaaagcaaaactccatctcaaataaataaataaataaataaataaataaataaataaataaataactgcactaggctgaaagcagaatggcagtacataataagagcatcccttctggagtcaaatccctgctctcttcttggctgcatgaccttgagaatgtgtcactcttcctctgtgagcctcagtctcctcatctgtaaaatggacatagccatggcgcctgcccaatcggactgtcgtaagatcaagcaggcaagcttttggcacagcgtcagcaagcctcagcttatgtgatcatcagtataccaggaccactccgagttgagctgttcaagctctgggtctctcgccaactggcagtgtgaccttgagcaaataattcacctctctgagcttcaggttcttcatttgcaaaattgaggccccatgttctatctaaatggattgtcctgcatattaaattctggaaataagtaccttaggcagttgggagcaagaaagaggacaggcaagaagggccatagaaggaaagtactggatccccaaagctaaaagattatttacctggtggctgtgaggagggaaggccagcctgacagaggacacagaaatatccactgtttcttcttttggggggcacagaatctcactctgtcacccaggctggagtgcagtggcgtgatctcatcccactgcaacctctgcctcctgggctcaactgattctcctaccacagcctccatagtaactgggattgcaggcacctgccaccacacccagctaatttttgtgtttttagtagagatggagtttcaccatgttggccaggctggtctcaaactcctgacctcaagtgatcctcccgcctcaaccttccaaagtactaggataacagatgtgagccaccacgcccagccaatggcttctaaatttgagtagccccagcatcttccctgttggacttgttttatgtctgctggtagaatcaacactctttgggaacatatggatctatggactttgcttaaacagattctgaatccaagatgtcatttaccaaaaaagcacacaagggataaatatcccccaacagcagaattctttattttatagaagcattcactaggaaattcctttcaatgttatgcatccgtcatgtgcgtaatatgctacttgatttacaaataaggcagtatcgtgcagaggtaaagggtacagtgatgggagcaagatcactccccacctagccccaggtaccccgattctgccgattaccagctgcaaaactttatgtccctttgcctccatttcctcatttgtaaaagggagattatcgtacatggtatctatctcgcctataggttgcatgaagaataaacaagataactatagattgcatgaagataattcttgtaaagaaaacttactaccacatagtaaaggcacaatatatgtagctagtattccttccaatactattttctgagtgccttctgtgtgtttggtgccatctgccctgtgtctgccttcatagagcttacaccagggatgtgggctatggacatagaaacaggcaaggcaacaaataacataaataaacaagatgattacatgttgtggtcatagctatgtccaaaaccagcaagatgctgagacagagaactgcatggacaactacttgcaaatgtctggtttggaaagcctcactgtggaggtcacatttaagtgacagatgagaagaagccagtgagaaggacagtggggctgcagccgctcatttcaaacatgaaggtgcacgtgcctcctgcaagatccaactcagcaggtccggggtggccctgagtgtctgcatttctttctttccttctttcctttccttcttctttccttccttccttccgcctttcttttttttgacggagtctcactttgtcaccaggctggagtgcagtggcacgatctcagttcactgcaactctgcctcccaggttcaagtgattctcctgcacagcctcccgagtcaggcgtgcgccaccacaccaggataatatttgtatttttagtagagacggggtttcaccatgttggccaggatgatcttgatctcttgacctcgtgatccgcccacctcggcctcccaaaattctgggattacaggtgtgaaccaccacgcctggccttgcctttctcaccagctctcagggctgttgacactgcaggaccacactgtgagtggccagggactagcagaggacagggggcagagggtggatccaggtccagacgacagagtaccttgaaggcaagtggggagtttggattttattctcaggatagtaggaagccaggcagaggagtgacatgactgaaggatgcttctagaagctcattttggctgctgcgtaaagacttgctagggccagggcagctgcagagagaccaggttggaaactgatatcgttgtccaggtgacagtggcttagacaaaggtggtagtgatggcagaagcaggaagtaggtggatttgaaacctttggacaggtaaaatcaaccacacttgctgaggtgttaaataaagccatccatcatcatataagatatgtgcttatcttaattttttaaaactcaatagtatagagtatagagctctcaagcaggggtgatcttgccctcgcgtgggacatttggcaatgtctagagacatttttggttgccccagctggggagatgctattggtatctagtaggtagagaccagagatgctgttatacaaccgacattgcacagcacagcactcccaacaaagaattatctgccagtatgtcagtggagccaggggaaagaaaccttgcatagaagtacaggaaggcagaaatgtcctgcctgccccacccccatctgacccccacaccccaaagataactactgttcccagtgtgcttgatggtccagactttgttctgtgcgtatacgcagatttcccataagccacctcaccggtgaagtaatgcttgggaaatgctcaaaacttaggagccctgagcccaccataggaaaagactgttcattttgtcaaatctgttctattcctaccccatggggaaggttactgccacattgcccaaaactgtattcattctatcagttgtgatattttttctttttctccaaagaactttccaaaaattgctatccttgtgacctaggcagccttctctaactgggactaactcatgaaacctgagaatttcagtgcaggaagaaatgttgggataatatagtcctacccaagttcttactgtacaggtgggaaaactgaggcccaatacttcttggaagtggggaaatccccttataataagtagtctcttcttcatttactgggatattaatttcagattttcagtttaatacacggttatggcttatgtttctgatttatttttcttggtcgtgtctatatgtgaggttggttacaatgggtgacgaaagggacattcttagccttgtacttccagagtgctgtgacaggtgatctccaaaagatgggaggaattttaccagtctgtgaacttgaattctgtagtctgggaagaccagttgaatctcttttcactggctgaactgagtgtcatcttcctatgcccatctgtgggtaccacagctgtgcagaggtcagttttgagttcaggctcatacgtggaatgctgtagcctgtggccatcctcctattatccatgctgtcatccttttaaacgtccacagagacctccaagtggaaagaaccatgtctaccccattagaaccccaagcaaggactctgcaggtcagagaggctgactccatggcagcaatgagggctccaacagctggaatccagtcctgtcctccagctacctgtgtcctgagcccaagggagggaccctgccccctcctcccactcagccagtagagagaggcgggagcctcttgagaggcttaggaaggcaccctgggaagcctccctacttgttttcccaaacccctcaggttgggggtaaatggcgtgaaggagtctggtctttgattctttggcactggggagccactgaaagttcttgagcaggaagtaactggatagaaaatggctattccaggaggatcaaaatggcagcagtgtgctgggtgaattggatggacaggaaagacggggaaggaagcctggtgggtacagtgaggaataacagtctaccccagaatggcagcagtgaaaacagaaaagggggaagagatgggcatttgtgactaatggatgtttgtgacttgcccctgaatgagggagagcagggggtcatggatgaccttggttttgaccctagatgaggaaaatagtgactctgccgataggggaaatgggcaaagtttacttagcctctcccagcttcacttaagacatctgtagaatggggttgtgtattgagtggtggggaagattaaatgaaattgtgcatggaaattaacccaggcctgaggggagtggcaggcactaggaccacgaagagccttatgagcagggctttatcctgctaggccatagggagccatgaagggatgttgcctgagggtgggatggtcacatttgccttttggaaggacctctctgagagcagtggagagagggcaggccagggggcagggagaccacaggggaggcctttgcagtctgtatccaagtgaggtgtggggttggtccagaccaagcagaaagtagggggcagtcctgaagcaggccggctgccttgtgtgcctcctcccctttgtgcttggggaaaccactgggaggaatgcgaggtggccagcatgtgtcccggcaaccccactgtcggggggtatgtgtgactgatgggccatctctacacaaaacctgcactgggccgggccctccagcagctgcaggacatcagaggctgagctgtttgaccagagaggccacagctatccagtgggagtgtgcggccccaggcagagtcaccctccttccaacacagcacccccatcccccaacccccatccacccctccccgagtcagatccccatcccccactgactccttggggactggatcttaattcgccctgttgccaccactctgccctcatctcttcctcccctgcgcttccacaggtcccctgcacttctgctcgcttttccctcatctgtgctgtccatgcctctctgttccttcctgcccctggcccctagcatgtggtctcactgcggcttcttctctctttgcccatcttgggcatgcaggaggctgagggcagagggtggtgatgcctgtaggtcctagtaccatgcccggcccatgggggcagatggagccccaggggctgtctgcctgctctgtcaatccatctctgcttcctttcttttctcctgtatctgtttgctggatgtagatcataaccttgacaataacgttttcaagggcaggcctggttcttccaccctctatttcctgctaacagcccagaggcattcccaccacggtgatttatgaccctctctatggggtggcgtcttctagggcagtggcctaggagacattttccaacttgcagccccgggactctgtccttcttccctcactgctggggccacagccctctctcagtgagtgaccttagcagccatcctcaaaacaccccggccaaggaaagagctctgataaaaccctcagagcctgactctcagcccccattcctgagcccccactttgcagctgccagcgacctgactgtgcaagctgagaggatgcatgggcacaggtggcattagctgctcgcgctgttggcaccaagctggcctcagaaaagggggggtaggttttgttttactgttttggtcacttatttcatttaaaaaaatttattagatgagagtgtttttggctcatacaacggaaacattgctaggtccagctggatttctgggtccagtggtaccctctggagtttctctgaatctccacctcggctcgcgttagctccctgctggtcccctcctcaggcagcctctccccttgtgatgacaagacggccaccagcagctgcaggctgcatcctgtccttcctgcaaacccagagggacagggaagtctcagtgtttcccccaaagcaaagaactgagcctcactggtgctgactgggccacagccccaccccctgggacacagaagaactgattggctaggcctgaccatgcccagccttagaacctgcaaggaagaggccctgcctggtaggcaagcacatgacatggccaccacatcacctgagtgctcagcaaggtaacccagggcagcccagctcacccagcccagcatggccataccccagggcccccaaagacccttgttgggaatcacttgtgcaacaggctcggatagctttacactccagaaagacagtagcattctacttgaagggtctctgcagtgacttcttttctgataacaagaagcattcctcagtttacctgtttgggacattcctatttggtgttaggcttttgtaaagagagggcgtacctgtgggggacctggcactgggtcatttccccaagatgccattgccgtgtcccccagcacctgggtgactgctacatcactgcctgtgacctcaactctcttccttcctcttacagcagggatgagatcacagccaggaagtgttgggatgattccattacaaagatgatgtttgttgaatggatgtctggagagagacagcagccagaggtcagcagctttgctcctgcctctccagggtccacccttactgggcagtaccatccaaccatccatgcccagctcatagagggcactcaggaaatagcagctgatatttggtcattatatatttttttggagacagaatctcgctgtgttgcccaggcgggaatacagtggcatggtctaggctcactgcaacctccacctcccaggtcaagggattctcccacctcagcctcccgagcaactgggattacacgcacccttcaccacacccagctaatttttccttttttttttttttttttttttttttttagtagagacagggtttcaccatgttagccaggctagtctcaaactcctgacctcaggtgatccacctgcctcggcctcccaaagtgctgggattacaggcgtgagctacctcgcccagccattgtcattactattgttattgtgctggttgttcagcctggaagtttctccaggctcaggaagcagtcttgacccttgctggccttcacctctctggctgcctccattccatgcctaaacatttggagttacaattccttagctcatcttttggatctaaacaccccagagggtagagatgatgctggcatagctcctggcctgagggaacactcactgatctaccagaggctgggacacccaccgtggggcttgcaggaggatgatctggttttgaatctgcacagtgctggttatgagcctgtgatctccactcccttccctcctcttacagcagggacaagacagcagccagggagtgttgggatgattccatttacaaagatgacatgcaaaatgtccagctcagtggctggtaccggggcagggctctaggcctgtgggttgtgattcatctgtgaagcccagagagggcaaagttcctggacataaggcctcaggcagccccgtgagccctggatagcaggagctaacctaaggtggcagagaggccctttcggcattcagccttgacccctgtcttccaaggcaggttgcttaagacattggtatttgtctttgctactgacggcctgggacaacccctcatccccttccctctctctgtcattagcaaacctctgcttctgaccttagataaaggagtgctttgttcatggaactggtgtgtagattaaaaactccttcttttagagcagggcttgggggcaggtgagagacgggattttagaggggttcagaggatggactctggactcactatctgtctcacagccgtgctctgctacttattaacatgaggctttgggcaggttaaggaacctctctgggctcgagtgtttgtgactctagcatgggattggcagtggtggctgcttcgtgatgacatgaggtcatctgggctcagaggaagcattcagtgcatgtgaactcttctaagcacaatgtgaagatgcatcttttaaaaatgaaacgccctctgataaaatgtgtactcctcccaatttggaacctgacacacattgtctagatccacctgaagctgcaagagccctgctgccagataccagggcaggaaatcttatcctgggggacactccaggaaaagccagtgaattccctttaaattatacaggattgtgcctgtggcccttgtggtaggctaaataatgctcccctaccctacccccaaaagatctacatcctaatcttagaatctgtgactatttacgttacatggtaaaagggcctttgcaggtgtgattaagttagggctcttgagacaggaacatgatcccaggttatccaagtgagcatgatgtagtcccaagagtttttttgttttgtttttggtttttggttttttgttttgtttttgtttttgttttttgagacagagtctcactctgtcgcccaagctggagtgcagtggccctatttcggttcactgcgacctccacctcccgggttcaagcaattctcctgcctcagcctccccagaagatggaattataggcacgtgccaccacacccggctaattttttgtatttttagtagagatggggtttcaccgtgctagccaggatggtcttgatctcctgacctggtgatctgccagccttggcctcccaaagtgctgggattacaggcgtgagccactgctcccggccccacaagagttcttataaggaggaggcaggcaggccggagtcagagaaggaggtgtggtgaccaaagcagaagctggatgcatatgctttgaaggtggaagaaggttccagcagccaacaagggcaggtggcctctagaagctggaagaggcaaggaaatggatttcttccctgaagcctccagaaggaacacagccgttggtcaccttgattgtagacctctgacctccagaacgacaagagaatacctttgtgttgcttgaagccacaagttggtggcagtttgctatatcagaagtggctggagaagcaacatgaaattaacacagcccttcttggggcggtgggtagccgtttatcaggttttcacccacgtcgagtcagctgaggaacagtcactggtccaagtcgcctcacctggcccccagaggcccctgctgggaagggcagccaccactgccattcccatgctagaggcacagacactcaggcccagagagtttccttcatctgcccaaagcctcactttaataagtagcagagcacggctgtgagatgactgctattttctcttcctcctcctcagcctccgtgttcctagatcactcatcccaaatgcaaatatatttttcagtagtaattgcttctctggggaggaattttttttttttgaagtttgcaaatctttttatttccagctgttgagacaatatttttgagagctgatgttactctagtggccaaaccagtgccagctattaaacagccagaaagctacagtaattgactacgtgaccatttctcttttagcacgttgtttgttctccttttccagaagttgtaggcgtctatttagtttgattatgtgtcgtcttagtgaagctgcatctacaacagtcaggtcatccgatgttccttcagttgttgcgtctgtatttgaaatgccatacgtgatgttgtcatgatgaggattagaagtggccggagcagacctgccacgcgacacagggagagaatcatttctgaccagctgtccgttttgatgaacagcattttcattcatagaccgtgccctctttagtctgccggctgcaaagatttcttcattttcaggggttgtaagagatctttctaaatccagaaaatctggtggtctttcacttagtttttagcaccaggggtttgaagggagttgattgaataaggtcaggatctactggtcttgaaagtggaatatcttcattatttcttacaacaccaaccctctccagaacctgcacactagtatcaggaactccttcttggaatccttgctccaggtcagcgtttggcagtgctactttttttctttctttctttcttttcttttccttttttttttttttttttttatgacagaatcttgctctgctgcccaggctggagtgcagtggcatgatctcctggctcactgcaacctccgcctcccgggttcaagcaattatctgcctcagcctcccgagtagctggaattacaggtgcgcaccaccacacccggctactttttgtatttttagtagagacaggtttcaccatcgtggtcaggctggtcttgaactcctgacctcgtgatccacccacctcggcctcccaaagtgctgggattacaggcgtgagccactgcgcctggccggtggtgctacttttaacttttctgggatcctcacttactgactaatgcctgcagtctattccatttcttactgaattcaacggatttctgccatctctgcagcagtgggagaaggaaatgctgccccactcacaaatgtgtacttgctatttggcacggtttgcttctacgcttcatagtaaatcctttgacttgcttcaatgtgcatgtgctggattgagagccacttttgtccccctgggcccacaggagggtcccagtgagggctgccacccgccagttcccgggggcattggggcgggtgcttagaggctgttggctgagagcacggaggcacccaggcacagcaccggcgtagcagcccgcagagggcccctctggggaggaatctgagaagcccacagaacagcctgcgctgtcatctgggggtttctaaattagagccattccaggtgacccatggaggtacctctcctagtccccagttgcaccagctgccggccctaggcctccctctccaggctgccactgcctgtctttgtggggaaactggctgtagttcctgcagtgggatggatatgggcccttctgtcttgggataaacctctgagcagctgcttgagatcacaggctggcacctaacgtggagttatcattcacacacccagaaaggcaacagccctgtggcactgttctctggcctccccaggtttcccacagcaaatgacaacagcagcttgcagtgtgcctgtcctgtgccggacctggactctcagaagtggctggggaagtagacagcattttctttttcttttctttctttctttttttttttttttgagacagggtctcactctgtcgcccaagctggagtgcagtggcacgatctcggctcactgcaacctccatctcctgggttcaagtgattcaggattacaggtgcgtgccaccacgcccagctaatttttgtatttttatttagtagagacagggtttcaccatgttggccaggctggtctcgaactcctgacctcaggtgatccaactgccttggcctcccagagtgctgggattacaggcgtgagccactgcgcctggccagcattttctttttaacaggtgaggaggtgaagggcattgccaggggtgtacagaattaaacctacatcccacagactccaaaatccatctatattccactctactgctaagccaactactgattcactcaacagattccactataccactatgctgtgctattccttcattcaacaaacatctattaagctcctctggcctgtgccaggcttgttcttggactagagagagcagtgaacaaaaatgacaaaaattcacacccttgaaagtttacctcctgcagccacactttccaacagaaatagaattcaaggcccatatataattttaaatttcctggtaaccacaccttttttaaaaaggacaaagaaacaggcaaaattaattttaataatatatttagctcgacatgttcaaaatatgtcaacatgaaattaatataaaaatgttagtgaggtattctttttgtcctcctaagcctcagaaacttgatgaaagctagttccctctggccacctgacagcaagctgggtgtgattgtcattgggtcacctggagctcagccccgcattgtccatcagtccattcctgccacgtgccccttgggactgcactggccatagcagtgggctctgtggctccctgttgctgtggaattggggagccaccatttctctggatttagagaggtgctgggcctcagctcagagggctaggttaatgcacctctcagtttgtaacatgtcattgttactgggccctacagagccgcttcctatcttttcgttgttattcttttattcctcttttctcccctctcctattccatccagggcacccatcctaacatgtttaacatgcctcttgttggctgtggtcttgtacattgtgtctttctcatttccgtggatgatattgcgttctgtctcattctgattggttatcccctaccttacgtttttcagccagcaattttattttcctggccataaattcaagagcgcacctgcagcaacactatccaatggaaagagaattcaagccccatatataattttacttttttttttttttttttttttgagacagggtcttgctgtgtgtcacccaggctggagtgcaatggcgcgatctcatctcactgcaacctccactgcccaggctcaagtgatcctcccacttcagcctcccaagtagctgggactacaggcactcaccaccatgccccgttagtttttttgtgtgtgtattttttgtagagatggggtttcgtcatgttgcccaggctggtctcgatttcctgagctcaagcaatctgcctacctcggcctcccaaagtgctgggattacaagcgtgggccactgcaccggcctgccccatatataatcttaaatttcctggcaaccacatctttttataaaaggacaaagaaacaggaaaattaattttaataatagattttacttgatatatccaaaatctgtcatctcaacacgtaattaatataaaaatgttagtgagattttctttttgtcctgataagccttggcaatctagtgtgtgttttacacttgaatagcacatcccaatgcagactggccacatcttgagtcccatagagtttattgggactctcttgtccccatagtttgttcccatgagtcccccaccctcgttcatcttctctaggctacctcaaaggaaccggtttgccctcattctctaggatgttctagctccttctctgagtctcttgactcatcgattcttccttgagttctgagattactaccagctagggcttgctatatgacatgtcactttgtcctcacatcacccccattctgagactgagggaagagctggcccagggttgcacacctagtgggtactgagcctgattccagactccagcagcctgagcacagagcccagctcctaatgagcatctcctgcccaaccgactgccctcggccttgacccagcaggattcccaggagacgtggcttgtgggaaagaagcccaagcagtcctggctgaacttctttttctgagatgtgttgagagtatcaattatgtgtgggtcctcagagacctgcaactccgtggcttactcaaggcaaaaagttccctccccatcacttaaaagatggaggcagtcctcagccctgagtttttattcctgcgactttgctgtgtgtgcatctcactcactgcatctgacaattgcacggcactgcatggtgtgcgcctagctcatccacccatccatcccccacccagagacacccagactgctgcagtggacagcctcacccacgggccctgtgtgggatgtgaactcagctggagacctgccgtgctgtgccagagtgagcttggaccactttacaacagccaattatgcacatctcctccctactccgagttcagtgacatcgtgtcagtagctcaatagtgctgtgatgggaatatttacaccccagcgatgggccgtggcaatcactacaaatctgggctgtgtgtgtgtgtgcatgtgtgtgtgtgtgcgtgtgcatgcacacatgtgaaagagagagggggagggagagagagctagtttaccagcataccactgtgagggagtatgtggagactttgttttctagagacatggtgcaccagcacacacagcaagagacagggtctttctatgtttcctgggctggtctcaaactcctggcctcaaacaatcctcccacttgagcctcgcaaagcactggcattacaggcatgaactattgtacccagccctttaattttattgaattaagtgcttccagactggtaccagaatgaccatccaattttacatgtcatttcaaaaaaattgttttcccagtttccaatttaaaaagacttatgaacaagtatgtgcattaaacaacagtgacaacataatttcaagtcacttattaattcagctagttggccctgggatgtagtgcagaattctaaagataagtgttgactagaattcagtttctagttttggcattctaggactctttcaaatgcaggagacagaaaactcagtgtaatgaatgagctcttatcactcagccctccagggttcttcagacacagcgggatccaggtttgcaaacagtgccatgaggactcactccctgccgtttggttctgctttttgctgtgttcattcattcccaggcaggctttctctgcccaatgctctgagctgcctatgcaatggaggagtgtctctttctcagcaattccagggaaagttaaaatttgaaactcattggcccagtgtgggttacgtgtccgtcttgaaattatcactgtgccccagagtgtgggaggccctgattggccaggcctgggcatgtgcctgccccttgagccagaatcaaagtcatatggactgagaatggggagggccctagagaaggaaaaccaggcactgttcccagcaggttaggagtgcctgctgggcaggtaaaacaacagcatcctctcaacttctctggggcgcttgagactgaccggtgcccctccctgttggacacctcctcctgtgacctttggaccctgcgttttcagggcttcccggcctctctgactgaagaggccttctctgcatctttacccaggccatcttcttaccctgcttctggctgaggctctctccaaaagccccgtactgaggctctctccaaaagccccgtactgaatcactcacctcattcctgctaagtgtgtgttgtgaccagtgctccgattatgggcacaggctctgtgtactctcttgtcgggatggtatcattgttgccattttacagatgaggaaaccgaggctctcagtggtggaaggagcagctagtgaagcagatgcacaccagggtcctttccttcagctgccgtagccctccacttccctgatctcgctgtgtctgtcaccagggccctccagctctgaaactatgtccctttccttgtggtatctgcacccagccagccaccacctttcctcccacaaccgtgaacctctcagcctgtgtggacaggcgtagctttggctatacatgacaaaaaaaaaaaaaaaaaagcagattcaataagataaacctttatttttctcttatgtaaacagagtccagaggtcagcagtccagggctgaaaaggcagcaccgtgatcctcagggacctaggctccttctatcttgctgctctgccagtctctacctcacatcctagtatggctgcttgagctccaaccatcacatctgcactagaaccaataggaagtgggaagcagggggagacatgtctcctcatttaacatgtttcccttcctgaatgtgccccaccccctatacacaccctgcttatatcccattggccagaacttagtcacatgcaaccgctagtgagctgcctaagaggctgggtactgctatctttattctaggaagccacggaaagccgagcatcagcttactatggaggaaggggaacacggatattgggaaccacaaataggcaaaattagtattactattattttttgaaacagagtctcactgtgttgcccaggctggagtgcagtagcgtgatctcagctcactacaacctctgcctcccgggttcaagtgattctcggtgcctcagcctcccgagtagctgggactacaggtgtccgccaccacgcctggctaatttttgtatttttagtagagacggggtttcaccatgttgaccaggctggtcttgaactcctgacctcaagtgatctgcctgcctcggcctcccaaagtgctgggatcacaggcgtgagccaccccacctggccaactggcaaaactcagccaccctgccgaccaaatgaaaacatcagaccagtgaattggcacgctctcttttctttccctccagcacagggagaaggaggaaagagcagcaggctcactgtgcttggaggtgagctgtgccgggcaggtgacatctcaccttggccagatctctctggtgcattcctcaggaggtcagccccgtttccggcccttagctgggacctgcttggtgtttacagattgacgtggcagaggggaaaaacacccaagatgtgcccactgagccctgtgaaatcgttttccagcatggaagtttcaccagggcttctctatagacagtgaggccacttctgaatgccataatgccatgctggctgtgaagaaagtcgattgtgtctttttttagttcacggagactttttttttttttggagacgaagtttcactcttgttgcccaggctggagtgcaacggcgcaatctcagctcactgcaacctccgcctcctgggttcaagcaattctcctgcctcagcctcccgagtagctgggattacaggcgcacgccaccatgcctggctgattttttatattttaagtagagatggggtcccaccatgttggccaggctggtctcaaactcctgacttttagctgatccaccctccttgccctcccaaagtgctgggattgcaggcatgagccaccacacccggtcagttcacagagattttaaaacccaggggggcaggtggttgtgagggtgggctagccacgggttgggggaatcataatgccagctttccctgcagcatcatgtcttggcagcaccaaacacagaagaggaaactgagattctgagaggcgtaaggagcagctactgaagcagatgcatgccagggtccttgccttcagctgccatagtctcccatctccccagtctccatgtttctctgtcaccagggccctccagctctgaaatgatatactttccctgtggtacctgcacacagccagccaaacactctgttggataaccctccacgtggataacacgctcacccctcaaccctatgagaccaatattgtatcctagctgctgctgggcagaggtgggatttagttccctcctgtgagctgttgtgccctgacttctctgcgaagtggggaccgtagcacttccttcccggggctgctgggagatgatgtgtgaaacatattagcaataccgtggaggttgtgagcactcggcccagggtagatcttttttattacccagtgggaaagagggcctaagcgaagcaaatgtgggctggattgcgtcccccgccaaattcctttgttgaagccccctgtccccagtactcagaatgggattgcatttggagataaggcctttacataggggatcaaggtgaagtaaagtcatatgagtgggccctaatccaatatcactggtgtccttgtgagaagaggatctcctgagcccaggatttcaagaccagcctgggccatactgggagactccatctttacaaaaaaatgccaggcttggtggcatgcacctatagtccccagctactcagaaggctaaggcagaaggattgcctgagcctgggatatcgagactgcagtgaactgtgatcatgccactgtactccagcctgggcaacagagcgagactctgtctcaaaaaaaaaaaaaaaaaaaaaaagagagagattaggacagagacacacacggagggacaaccgcgtgaggacagagggaacaggtggccatctacaggccacagagagaggcctcagaaggaaccaaccttgctcagaaggaaccaaccttgatcttggacttccagcctatagaattgtgaaaaaatagatttctgttgtttcaggcaccctgactgtggtactggttatatcagccccagcaaactaatacaagctcttaatctctcttcccctccccttccctgcaagctgtccccttttaaccttaattccagttttatgattaaacatctcagcgtcaattatttacaacacatccagatgagtatcagagctgcaggggactgaatgactcacactggggaagctggtttttatgaagggaaaaacgacactaagaaaaacagggaattgtatctcctgaccacagagactgaaactgacctagggaaagtttctgtcagccgcagcacagggaggatctcttcgtgggagtggggggcccgggaggcaccaggcagtggagtgtgccacaggtgcctcacacctgtatatggcacctgccagcacgcaggctgtttacttacccaatagttggtttgactgggcacaattccttcatccagataaaactaatcactcggagtgagtcgtgtctagtttgaatctttgctgcaccattcactgtgtgactttgagcaagtttcttaacttccctaactacaggctcctcttctgtgaaatggggcttattctagaaactttttcatcagcttgggaagtttaagcatggtaataaataactgagaaattagactgtgattatattaagtaaataatattcgtaataggtcgttaagaaaaataaatatattaaaattttataaataaaaacaaaacagaatacataaaattaataaagaaaagtaaatatataatgagtattaaaattgtataaataaaatttaaaaatggaatacataaaattaatagtaataataagtaataaataataataaaggcatgtaaggcacccagcactggcatttcataggagcttaggagaatgttcactgtagttgccacaattccgaaatgtaacagttggaaaaagaatcaagtgtgacaagtgacttcctaaaaatcgaagacaggaaggaaacccaggactcgagaaagcagctctggctaagatgcttcgagtaggaaagtcaggtataaagtggagatgagggaacggggaatggcgaggggagggggacaagctcggctcaataccaaaagagctcttggcagcaggtttgggaaccacttctacagagacagcattgcggtggctaaaaaagaaaatgtccagatatgggcaggacaaactttctcaaacggcgtcctaatctccagaatcagagctggtctaagaaaagtctgggaacacagagggcttgcttctgcaggactcgtgggcctgcagagggctggctgtctgcttcacgtacctcgacttttggcttaaaagccctcatataatgagtacttaaaataaacgtcagtcttgtcctgtcgtcagcactttggaactgcagttttgagcccccaggaagtggggtgcctgctgactcaagcacgagaatacctttatcaagtttgttggtcccagcaatgttagaacaagtgtaaacttggctcgttagcagaatcctgggttaaaatgtaaacttggtagaggagcaccgccatgccaagcctccctccaacctggccacacgaggaaagggcgcataattcaccaagcgattggttttatcaggattgagaaactgtgcctaatcaaatcagctattgagtaggtaaacagtctgtgctggcaggcaccatacacaggtgtgaacgggaatgccacctgcaggagttgcctgggtctgccataacaaattaccccaaacttcatggctgaaaacaacacacatttattgtcttgcaataaatgtgttctggaggccagaagtccagcctcagtttcatgggttaacatcacaatgtgggcagggctggttcctccagaggctctaggagagcatgcgtcttcttgccttttccagctcctggaggcacctgcatccctggacttgtgactctctcctcacatcctcctgcttccacgattccatctcctgcttcctcctttgacctttctgcttccctcttataaggctactactcatcaaattgggcccacctggatgatccaacgtaatctccccatctcaagattcttaacttaatcatgtccaaaaaggcactttttccatataggctagaagttacaaattttgattaggacccggatatctttgaagaccacgattcagcctcccatgtgcctgttcccaaattccaagaaacacagggtggtgagcagcaaagaaccctgtgcaggaccccgcttcttctctgcccctaacttgaatggccttcagttagtctctgaccccttctgggcctctgtaaagattaatggacgcccacctgcctccataggcctttaaaggatttctggcacaattagagcagctactgtctgcagggcattgggtcaaggccctcaatgtattcactcatggattcttcagctttatggtccctgaaaagtgctgggcaggctcctgacttagagccttggctctgtggttccctcctctgcctggaatgttcttccccaggtattcatgtgattcctccctcgcatccttcaaatctctgctcagatatcattttcttggtgactgtgtacctggccaccgttttttgttttttgtttttgagacagagtctcgctctgtcacccaggctggagtgcagtggcgtgatctcggctcacttgcaacctccgcctccctggttcaagccattctcctgcctcagcctcccgagtagctgggattacaggcgtgcgccacccctcccggctaatttttgtattttttttttttcagtagagacagagtttcaccatgttggtcaggctggtctcgaactcctgacctcatgatccacccgcatcggcttcccaaggtgttgggattatagacatgagccaccacacctggcctgtttttaaaatcactacccacagctctgttattttcttttagcttgtattacctgctaccataccacagactctaatgtgagctctatggggacaaggccttctgtctgttttgattgtttctatgtcctcagtgcttagatcaggacttggtccatagtaggtgctcagttaatattgtgttaggtaaatgaataaacacctgtaatcaaaactctgagctcgtcacttataaacccagtgaggtagatcccagtaaaatttactttgtacagatgacagagctgagactgagagccctaagaattgtcttgtctaggtaattactaagttacagagctgagatacaaacccggcctctgatctggagcccaggctcccagtcccacggcataacaggtggagtggatactcaccagcaccctctgcagtccctgatttgataaattctcatctgtgacttctctccttttttctgcaaaatgccccttggggaagacaaactaaatgagtccagtcagtgtccagaactgcctgtcacacaaggacaaatgctgagtccagatggcaccgaggttcacacaagcctggctggccaccaggaacactgaccacaggcagcaacgtgggacaggctccagcttctcttccaggcccccagtcctcccactcttcagattccagggctgagcctccaaagttgtccacctaggctgggtgaggtggctcacgcctgtaatcccagcactttgggaggccgaggcggacggatcacctgaggtcaggagtttaagactagcctggccagcgtggtgaaacctcgtctctactaaaaatacaaaaattagccgggtgtggtggcgcacgcctgtaatcccagctagttgggaggctgagtcaaggagaatcacttgaacctggaaggcagaggttgcagtgagccaagatcgcgccactgcactccagcctgggtgagagagcgagacctcattgatgggaactctgccctgccttggtggaaaggctggcttttctgctgctccgtgaatgaggacggcctaaacaaggggctttgtggacaggcgctgccacttactaaactgagactttgggcaagtttctccacctctgtgcctcagcgtattccttgataaaatggacagaggtggggatgacagtacctcccttatatgactgttgggtgggataaatgagctaaattgtgtaaagtgcctggggtgtcagtgccctaactatgtgctgggggttgggggactagagtactgggggtctggctgatggtcagagcctgtgcttagccttgtttgccagggtcggggggctgctgctgttgtccccagagacaccgatggccagaacctggagaaggttcgaggtgtcagactcacattgggctgacggggacaggagatctgcatccctcagtgctatcctggcagaggaagtctctgaaatgtgagatgtcacatttcccaagaaatactgaatgtgactgggtcccccgtgccagccttctaaataaggctggacaccagccacctgcttagagaaagacactatgtcaagtgcctcaagaaaagatgtatggttcatgaactcgctgcttctgcttctggtcccttgagtcttcaagatgaacttgtcttccttaatttctccaacacttacgtggattagcaaggaccctggtgatgtcaggttttatacaatgcaccgacagcttgtgtttggagtcggggagggaagctgcctcttttctctgcaagccatgacatattctggaagatgcccactttcccatcgctgtgggattactgaggctgagccctcaccctggaatatcctgatctcttacccccaaattccacccacaggaaggccacagaggcctcaaggccctgcagagctgcatgcgtatcttccttctccctgccctcctcaaattgaatccgtcattctttttggaagctcttcagacacgctccattttggcagtgctacttggtgtttaaaagtgtgggttttaggatcaggcgtaccctacccctgcctcgtactcactgtgtgaccttagaaaaattactttccgtcttggaacctgtgtccttatctataaaatagaaccaataactattaaatgatgatgcacataaagagctccacagagggcctggcacagaattggcattcaacacacattgatgctttctctgacgctgacttcccttctgttaggcagaatcgcctgtcttcctgctggattgtaaaagtctgtctcatgtatctcggtatcccccaaagctcctggcatacagtaggggaaccgggaattgtttaaatcaaaatcttcaacaagtcattttaaaagaaatgttcaggtccagtagctcatgcctggtaatcccagcactttgggaggctgaggcaggcagattgcttgagcccaggaaatcgagaccagcctgggcaacagagcgagaccctttctctacaaaagacgcaaaaaatagctggacatggtggtgtgtgcctgtagtcccagctcctcgggggccgaggtgggaggattgcttaagcctgggaggtcaagggtacagtaagccatgatcatgccactgcagcctggatgacagagtgagaccctgtcaaaaaaaaaaaaaaaaagagagagagaagaaagggaagaggaggggaggggagggaagggaacatttacctgtcaccccctcacacttttgtcctgaaacacctctgggaagaaggaaggagggaaggaaggagggagggtagggagggaaacatttacctgtcaccctcacacttttgtcctgaaacacctctgggaacctcggtgccttgcccagaaagtggcccccagggactcagctttgtgggaacccgcatagtgcaggcacaggtggacttcacagtcagctggatttgattatgagtcgactgtgccacttaccggctgtgtggcccagggcaaattacttaccctgtccaagactccaagatggtggggcggatcattccttgaagggtggccgtgaggatcgggtgagtttaggaatgcacctgattcatgctgagtatcagctgctgctgatttcatgatagctgctgcggagactgctattcttgttaccattattcttcttaccctgccttgtgtattacttaacatcctttcttctttttcccatcagctctctccagctgggcagccctcctcccagctcccctgcctctatgcctcatttgcacattgctttttgtttttccctagtgcacagtctaaaagatccctggtgctctgttgaaacaggaacctgacaccctttgaccttggtccgtggggaggtagcctgaaactccctcccaggcaggacaggagcaggggctcagcaccttttttcctacccccactgcatgggactggaaattgtgacaaaagtgattgtgggctgaaacttggcagagagagccccactgaattcctcctttgtgatgtgaatgtggcacagcccggtggaaccggggatccctttcccaattatgcagcttggcaggaagaggtcggtgcagggagaatgctcaaggagcccctctgtcatgggggttggtagcaccgccagccgcctccgactggcaagacctcctcccactaaagccagctgggctgggcgcttctgcaactgcaccttccggggccacagcacagaactcagtggtcacgtgagggtctacatccgattcccagtttctaaactgtgtcctggagagtttctgcaattcagcgagaagaggcagcggaaggcccagccatcaatgcttgggccctttaccccgtttcagccggggcagcgctgctttccatcgtcccatcttatttcagtcgttgtcttcacgttcaagttcatggagactcaatccagatgtgcctggctgtgatggccccactcaggtctcagccactctgatgtctggagctgggtctacctccctggccccgactcctccacacccactgcacagcccctccctgccggctctggttggccaggggtgtgcacacgagtggaaagagcctctgcccagcgtggagcggtgaggctaaaggcttccatgttccctgctgacttccacctgcaaaggccaggcaaccgctgaaacctccagccccaccagggaatactgatacagtcactttctcaggtcacaacggaaatcacatttattctgcatattttcctcatgttgccggcaaattatttgcatacggatacaagatttgggtatctggatcttcctgcaagttagcttttattaatcctctccccttcaggcttggactgggaatttcccctcattgatatgagacattggttcaacttttaaacttgccaggtattcatttgtttgttctataaatatctactaagtacctgttaagttcctggcatgcggtgctggggcctggagcaggcagtggacaagacagacaagaaccgtgtttcagagagttcatactccagtgagggagacagggagccaacaagaaagcaaaatgagattactactgactgcaaagtgttatcatcacccatgggaaggaaaggcaaggaactcagcaggggacccaagtgtagctgtgtgagagaggaggcatttccactggatggtcagagaggtgctcactgaggaggtggcatttaagctgagagacagaggtctctactaaaaagtagtaagatagccaggcatggtggctcatgcctgcaatcccagcactttggtaaggccgaagcaggaggatcgcttgaggccaggagttcaagaccagcctgggcaacacagcaagattccatctctacaaaaagattaaaaattaaaacattagctgggtgtgatggtgtgcacctgtaatcccaggtacttgggaggctgaggcgggaggatcacttgagcccaggagttcgaggctgcagtgagctatgggtgacaaagaaatatgctgtctctaaaataatttttaaaaaaattttaaatacagaaataaataaataagtagccagacaaaagagacaggtggaagggtgttttcaagcagtaggtatagcaagttccaaggccctgtggtaggaagtagttggtgccaatgaggagcagaaaggaaaccactgagggctggtgagcaggagatatgagctgtgacagcaagacaggagcctcgtccaggctggtggggcttgagggtcatggccaaggagtttggattttatgctaaaagtaataaaaacacattgatgggcttttggacattcttgttacaaactatttcagtcattcaaaagagtatatataagatatatgtgaattgtaatgaatagtataataaaacgctcatgtacccttcactgttcgcctccccagtactattcttcactcttcatttctccaggaggtagtgtgtgtgtgtgtttgtttgtttctatgtttgttgagacagggtctcattctgtcacccaggctatagtgcagtggcgtgctcaaggctcactacaggctttacctcctaggctcaagcagatcctcccacctcaacctcccaagtagctgggactacaggtgtgagccacacactgggctcattattattattattattattattattactattattattattgtagagacatggtctcactatagtgcccaggctagtctcgaactcctgagctcaagcgatcctcccaccttggcctcccaaagtgctggcattacaggtgtgagctactgtgcctggccagaaggtagcctgaatttgtcctgaattttagtttatagtctttgcgtttcttcctaatattacaaaaatagagcaacatattgtttggttttgaacttcatttaagtggatttctgcagtgtgtattcttctgcagtttgcttttcttttcaacattatgtttgtcaggatcatcctcactggtgcacacagctgcagtttactcaccttcactgctgcgtacgtaatactccacagagtgacacgttgtggtttatcctttctcctgggaccaatttctaatgttgaaccaaaccctgcattcttgggataaacccaacttgattatgatgtgttatctttttaaaaaatatggttgggctgggtgctcccttctgtaatcccagcactttgggaggccaaggcaagaggatctcctgaggtcaggagttcggaccagcatggccaacatggtgaaaccccgtctctactaaaaatacaaaaattagccaggtgtgggggtgtgcgcctgtagtcccagctacttgggaagctaaggcaggagaattgtatgaacccaggaggcggaggttgcagtgagctgagatcacaccactgcattccagcctgggcaaaaaagtaagactcaggaaggaaggaaggaagggaggaagggagggagacggggagggaaggagggaagcatggattccatttgccgatttttgtttaggctggtgggtcagactggcctgtcattttcctctcctgccttgttcttttctagttttggtgtcaaggtatatacattccttataagatgacctgagagtatttcctctgatattctctggagcacatgtctaagatggataataccatgaaagagtttgataaatgttagctaccatgttgtcatccttctgcaactcatatttttttgtacagaattctggcttcttctggtaccacttgtcttgcatagatacctaccctaacccttgcccttttccccctaaaaaacaaagaaaacacatggctccccaacatgtaactccaattgcaatgctcacagcttgcttagaaagctgcatctctgtggtttttttataggtggatctttaactcaagactagcatgaagagttgccttctggcctgccctgagtctcctcaaataacaacaggtagatacctctctaactggttaataatttttctttaaaaactcagatatagaatcattcatacctcccttagggcctcctcagacatgagcagtgatggggccaaccccagggtctagaggttgagtttggccaagccaggaccccagactgcccaccaagcctactgtgttttagggacatattggaagccgtgtggtccaaatcctctaagcataaaattagcttctttccatatttttaaaaggaaaagaacaccatgctaaatatagctcgggtgctgtccagggtcaacaagccaagaacaggacaaacagctgaccagatgccccgctgggagctgggtttctacagaccccatagacccatcaagatcacagtccccaaagagagggctgaacttgaagaacaaatctacgccaccgttgcacacataaccctgccatgaacccaaaaaaccaaaactattttatgaaagcaacacatagatatttctgttttctaattcttattctcccagtaagaaaaagaaaatgaaaatcatggtgaatcccatcacacacagaaaataactataaatatcataatatataatccgagtgttgtgaaacttagtatgatacattcaacagtgtttctcaaccttttccgccaccttgccctccctgagaagtctttttagacattctttttggaatacttgaaaatttaatgccaaggatgccctgtgtatctatttatattctgtggccctgtggagggccacaaaccattataatatccaagatttttttcaccctgtccccaagaaacaatttttgctccttgtgggtgatcttaccccattgagaatacaagctctaattaacattaaataacaattttttttgtctgtttaagaacttactgttgtgctggtcacatactgttcttggtgctttatgtatattatttatttatcataactcccctatgaggtaggtactagagagtttttgtctcccttttacagctgtggagactgaagcacagagaggttaagtaacttgcccgaggtcacacagctgtgaaggaatagagtgaggatgtgagcccaggaagcctgggtcccaagctcactcttaaccactcagctatgctaccttgcagcaatacaatcagattgtgaaaattcaaaagagagaaatagaaagtaaagggtacactttccgagtttccttcgtccccagaagcaatcatggtacaagtctgaaaggtgaccccccccccccccgggatttttacatacgtgtgtatatataaaaatacactgtctctttcatttcaatgtaagtacaatcatccaggctttttcccatatattcatctgtgtatggagaattttttaaaaattagaatcacgctgaacatactgttgtttcaatcttgttgtttgatttaaaaatacattagctgctttgagaccataatttccttaagtgcgtgaaccataatttattaccctgatctggattattggctattgaagtaatttctagcttctcaccactataaagctgtgatgatatctctgtacataattcttagaagttggaattatagagccaaagggtataaacatttttgaaacttttgttctataaatgccaaaacttgccatctaaaaaaatgccatgaaattgccatcccaatacctttccccacactgagtattatcacctgtttttaatcattgacagtttatcagacaaaaagaatgtattaatcccgacattttaatctctgcccatgattcacatctggagcctgtctttctctcgtgcagcataaggcaaagctggaatggagaacgaatgagggcaggcagtgagggggttaaagcggctcaaatcactagtctgctaaccacactctcagcgtcccacgtacaaggcctgcctgtcaggcacttagcatgtgctcagaacgtggtattttcatcactcctgcttccagcacaaccccctggctgtgtacttctccaccctccgagtctgaccttgtcccagatccatttggtagaaccggtgcattcctaaggctgccagagcccccatccttccttttgccagccatgagtgatactgtaagaaataaatatccttgtgtacggtcccatctggtcctaccgcagctgtctgcagtgggatccctgttcagcgccctgcacgccacacacatgcccatcctacctgttcatattccatacatatgcatgcatatgtacataggtgctcgcacgcatgcacatgtgctcatgtgtgcataaacatatatgcacacgtgttcatgccccagtgtgccttggtgcttcttcttaactccttcaagagcagagccagtgcgttcacgcacgtgcacatacacagtgctgtgcattcagagttcaggcccaattaggccagtgggaatcctctcccacatagactttctgtatgtcccacagccctgagctaggacaccctgctgtctaatcccacagttcctgtacttccttcttactttattggtattccctatagatcattttcctgctggcctagaagctctgctaatccttaacttgctcactgctgtttctccagtgcctaacacgctacttaggaggtagtgagatgcacaagaaatatttgttgggtgaaaaaaagaaggaacagacttaaagctgataaaggatgttgttccaaatatttttagagtctcttttaacaaagtggccaatttcagataaactcatggtttcacaagaaaatatcttcgcagcatcagatttcaagcagcctggtcagtcatcctttcggagagactggaaaaaatgcagaattgaaaacaggtccttgcccagctaaacatcttgtaaattttactgttttgcaaaagttcctgtcacaggaataacgtatgggggagaggtttagcaaggggcattgcttgctcctcctcctcagtccttgagaatgttctaaactaaagccttgagtgactgcttctctggctcgctctcaaccaacaaatgctgtggaatcccaggaccgctggctgctccctttagcgcagggtctctgagctgctttgtggaaagaaggtttattttgtccagctgggcacaggagcggagaggaagaatgtgcaggcctgtgtcccttttaacaaagggagaactcgatgtggtttcagagaagcttgtcttgctgggtgacttcatgtggcctccattcatttcatccaacattgactctgcaaacttttttttttcgagacagagtcttgctctgtcacccaggctggagtgcagtggcacaatctcggctcactgcaacctccatctcccaggttcaagcaattctcctgccttagcctcccaaatagttgggattactggcacgtgccacagcacccagccttttttttttttttttttgtatttttagtagagacggggttttaccatgttggccaggatggtcttgatctcttgacctcgtgatccatccacctcggcctccccaagtgctgggattacaggcgtgaactctgcaaacattttttgagtccctgctgtgtgccaggcttagagatgatgacgatgtggtcatgggaagagagagactcaccacggtggttgctggaggatctggggagcacatgaaaggggcatctgagctatgggtgaccagagaaatgttctggagggtggttgggggtgggtagtgcaaagaaaggcaggctgagacatgcagtaggagaggcaggagccaggctaaggccaccatgagcagcatcattctaagaagctggattttctcctgcaggaagtagggagccattgagggtggggaacagatgacagtaggctgtttggcctggtcataccattggctgaggccctgtcccccaggtgagtctgttacaaccatcgattgtggaccattcatcccatcgctcactctcccagcagcctccagcaagagctgcgattttactgcacttcattaaattccacacaatgttttaatgacctgagctccgacctttctggcctccagcagggaaaggtctggcttttccttttcagggagtagcgggctgggcagaccggcctcccttctcgcagcctcgcacaaggagcctgagcacgtaagacatctggaatgcatcaaaggcgaggcccagccagagccggcgtgctcggtgctgctgcctaactccttcaagagcagagccgccacattcacaaagcgtctggaatcggaactgatcgtcctctctgctctttctgctttccttccaggcccttccaccgcagccatccgcacgggaggcctcgcgattgctcggaaccatcccgcaggagttcagctgatattttctagtgtggggcgagagattttgtggagcgcatttaaggggtttttgttgtgactgctgccttgtatatatttattttctttcttggaactgggcctcgccctcctcccactgacatgatggcccagtccaaggccaatggctcgcactatgcgctgaccgccatcggcctggggatgctggtccttggggtgatcatggccatgtggaacctggtacccggcttcagcgcggccgagaagccaacagctcagggcagcaacaagaccgaggtgggtggcggcatcctcaagagcaagaccttctctgtggcctacgtgctggtcggggccggggtgatgctgctgctgctttctatctgcctgagtatcagggataagaggaagcagcggcagggcgaggacctggcccatgtccagcacccgacaggcgctgggcctcacgcccaggaggaagacaggtgaggcctgactgtccccttccctccccggatcggggatgggcacgcacgcatgcacacacatgttcacacctttccgtggtgaaaagactgtcatctacaggctttattgtcccatgttcgcccatgacgcctctgtcaaaacggtttatcattttacaaataactttagacttttctaccagagcttcccaaatagcatggtacaaatggattacaggtaaaccaagattttttaaaaattttattacaatagatttttacaccatggaatactattcagccataaaaaggaacaaaatactgtcttttgggccaggtgcagtggctcactcctgtaattccagaactttgggaggccgaggcaggtggatcacttgaggtcaggagtttgagaccagcctggccaacatggtgaaaccctgtctctactaagaatacaaaaattagctgggcatggtggcacatgcctgtagtcccagctactggggaggctgaggcatgagaatcgcttgaacccaggggagtggagattgcagtgagtgagctgagataccgccactgcactccagcctgggtgacagagtgagactctgtctcaaaaaaaaaaatacaaaaacaaaaaactgtcttttgcagcaacttggatggagctggaggccattactcttaagtgaaccagcattttgacccgcccagggtcactgaacagggcctggggtggccagcatatttgcttgtcccttcaccccagcatgctgtgtgtatgctttaatttgaaatggctgggaagcaattttccatttgagcaaaaatgccaccaacaaatttaaaagataagtgatacattggggaagatatgataatagttgatatccctattataaaaagagctcttagaaatgaatatgtaagatgaatataccaataggaaacagacaaagattatgaatattccatagatgttcaaccaatagatgttcaacttcattagtcatgaaatgcaagcaaaaagatgtcttttcttttttttgcctatcatattgatcaagatagacagcccctactgttggagagttgtagggaagatggattgctgatgaaatgttgactgatagaaactttcttaagagtttcaccataaggggcagtactgaagatgtgcgtattgatcctatttataagagtttatccctgggagacagtcccacaggtgcaaaggagtttgtaccagtatatttatcagatcattgtttaggataacaaaaacttagaaacaacctaaaaaaccacctactgagttaaatgacgtacctattcaatggagttctatgcagcaactgttgatctatatttgttaatgtgggaccatatccacaacaatgagaaaagggggatataatacagcatctttggtcaggttatggtcccatcaaatgttgtggctgtgggattggagaggggtaggaaaggtatacaccagaatgttacagtggtttgtctccaggtagaaggattcgggatgtttttcttttcttcattagatgtttctgtgttgtttgaattttctacaagcatttcttatctttatagtgggaagggaattgttcttaatgtaatatggattaaagggaacccttggtacactaatggtgggaatgtaaattagtgcaaccactgtggagaagtttagagtttcttcaaaaaactcaaaattgagctgccaaatgattcagcaatgccacttgtgggtatacaccagaagaaaaaaaaatctcattatattgaagggatttctgccctccaatgttaccagttaccacccctttccatggtaatgacctggaagttaccatccctttcctagaatgttctaaatagcttgcccttcaatttacattaacccacttcttacttttgcacataattgaaagtgggtgtaagtgggtacaaatacaatttccaaattaaactcattttctgatagcaaagaataatatatgctgtattggtcagggttctccagagacacagaaccagggggatatatatttttttaaatggagatttattatgaggaattagttcctgggatcatggaagccaaaaagtcccacaatttgccatctgtaagctgcagacccaggaaagcaaggggtataattcattctgagtttgaaggcctgattgagaacgaggagaggtgagggtatagatcctagtctgagagcaggagaagatgaaatgagatgtcccagctcaagcagtgaggcagggagaaatgagtcaaattcctgcttgctctgacttttggtctatctagggcctccatgggttggatggtgccaccacactgaggaggggaatctgccttacagagcccaccgagctgaatgctagtatcttccagaaacaccctcactctcacagtgtttaatatgggcaaccatggccagtcaggttgacacctaaaattaaccatcacacatgcttattctagaaaacttgagaaatatagaaaagaacaaatatcaatcactcatcattccccaccctagctgtgagcacatttgagttcattcctaaaggagggtgggaggaaaaccaaggcagactttgaggtttctgatgttggccatgatcaccccacaggttcaagtatagagtcctggaaagtggctattggcgttaattccgacaaatgtgtagaaaatatcctgactttttggttttctctttcaacagtcaaatgagaataaggctgagaggacctgatctttttgagtcttgggataaacttggaagataaaattacagaataatttgagacacacataaatgttatatttcagatattctttctctactgaaagttggtagcaactttgtacatttctgtgttgcctttgaccaaaggacccagctgagcattggaatagctcacgcagcatgtcgctaagtgggaaaggcttaaaggcaaaggaggtttaacacccagataacatggtggagtagttgagagtacagtgttcacttcctgccctcccatttcctgaaggtctgaccaagtcatttaatcttgatgtatctcagtccatctataaattgggtattataataatagtgagatagaaaacaggcaggacttgttttctgatcataaccctgctgaccaaaacaggatgtggtccagatgagataaggtttaaaaaaacactagccaaagccagcaaacgggaacgagggtgatccctggctgccctcattgctcatcagcatgggacactctcaccagtgccatgacagtttacaattgccatgacaacgacctggcagttaccatccctttccatggtaacgacccagaagttacctttcctaggaagtcttaaacagcttgcccctcaatttgcattaacccaccccttaatttgcatgtgactaaaagtgggtataaatacaatttccaagagcccctatgtggccaactcagggtgtactgcctatgagttagccctgctccacaagaagcagtgcccttcaataaagaattgtggtctaacaccactggctcacccttgaattccttccttgatgaagccaagaaccctcccaggctaagccccaatttggggactcacctgtcctgtcctgcatgactagtacttaactcatagtgttgtcaggaatctgaaattggttcatatttgctaaaatacttagaagggagcccagctcatagtaaacacttgaagtattcacttttattgcctctaagacccatttgttatttacaaggctgctgtgtgtggactctttggagcccatccctttgggattttgaatgacttgagcacaggctaacactctccctgtctgtgtgtcttcttgcagccaggaggaagaagaggaggatgaggaggctgcctcaaggtactatgttcccagctacgaggaagtgatgaacacaaactactcagaagcaaggggagaggagcagaacccgaggttgagcatctctctcccgtcctatgagtcactgacggggctcgacgagaccacccccacatccaccagggctgacgtggaggccagccctgggaacccccctgacaggcagaactctaagttggccaaacgactgaaaccactgaaagttcgaaggattaaatctgaaaagcttcacctcaaagactttaggatcaacctcccagacaaaaacgtccctcctccctcgatagagcctttgactcctccaccgcagtatgatgaagtccaggagaaggcccccgacacccggccgcccgactgaatggccccacttgagccacgctccctcctgtctctcacacctttcacccccaagactctaacaaagccacatgagccacagttgagaagcggaggggccagctgtgcatggagccatttggatggcggcgggcggggggggattctctgtatcaggagtgactttgttgccccacacagcctcctgctgcaggtgctttggaaagagatgctgccttggagctggtgaatctgtggaccacattcaagggtgtggcacaggcatcttcccatccttttcactccgaatcgctggcgacacattctcctttccagctaggaaagggttcctcgcggctggtttagattgtggttgtttgttttgcttctactaagactgttttgtttcaaaaaggaaacaagttttgtgtttgctgtctacgctggagtcctgaactgtgggtagaaaacacgacctggctttgtagaaaggacacagggctgttttatgaactaagcggtgaggctcaggtggcggctctcgcagagcccctgatgctgttgttctttgagggcttaaggcctgatgaacgtaggcacgtgatgcataatagtcttcaatggtacacttaactagtctcttctgtgtaacagcaaaaaaaaaaaaaaaaagaagaagaaagaaaactgtaggaaatgttctttttgaaatgccatgcaatggagctttttgtaataaaatattttatatgtagtacatttgggtgctgagttactttagcagctctcccaatactgactttcttaggggaaaatggcaataataatagctaatatgtactgaatacttatgcccagtgttgtgctaagcatttcacacatcaccccattttgtctggacccaagtctggtaataatgccattctgttgtcagctcacagaggctttaggttaatgtaagtgccctgtgtcacactgctagtaagcagtagagctggggtttgagcccaggttgcctggctccaaggcctgagttcttacacaccccccatacagctcagtgtaaagagcttttccagactttgaatgaagacttgcacttctcaagttcagaggttgtctctgtcaacctatgcacccaaaagaaagttctggttgtttgaacagcagctttctacctgtctaggcatccttcctatctccctctgctgagaactggcccaggagggagctcagtgcagcctgtcctctgcccccagaactgacaggctatgtaagtgtagggggtgggtgagcatgtccccctggagggggaaagtgagtctatgcagctcagaaaagcagtgcaatgaataagaaatgctcaggggatcgcacgctgttgaagaggggacataggaggggaatggagacctctggggtcaggatcttgaccgtggagtgagtgtctgggaaaacagacccaagtccaaaggaagccttcctgctattggtgggcatggagccagcctgctgaggagtctgtgtcaacctggttggaagagtaattcccaggcccagatgttttcctaacaagctccggtggacagggaagggatgacaggcaccgagttaccttcttatctcaagattagcagtagtgactaaagttcgaaactttcactttccttatgcgatgcattattaaaaggggagatgttgggattggctttgtggcatgggacagacacccagaggcctggtccgttccccggcccactcctgagccgacccatggctctttgtgtctcatgtctctgggctgggcttgctttcctgttactttctgtgcttcttccaaaccagaggataaatgggaggaaaatagaagagaagagtaaggacccagatgagttgagaaatgactttctggaagagctctcaatctggcttctggtagaaaccttttggggtgtctccctagtctagatcctccacgggggagaaggagttgtgaggcttgggtgggctgattggtggtccccaaaggtatcagaccctaatccctggaaccagtgaatattacctcgtatggtaaagtttttgcagatgtgattaaggattgaagatgatgggattgtcctgggtttgccaggtgggcccttaatgccaaccacaaatgtcctcacaagcaaaagacggggagagtatatacagaagaggaggagacaatgtcatcccagaggcagagatgggagtgatcaatctacaagtccaggaaggccggcagacaccggaatcaggaagaagcaagggatggactctcccctagagcccctgaaggatgcagtccccgcttacaccttgatttcaggccagttaatatgattttgggcttctggcctccagaactgtgagagaacaagtctctgttgttatgggtcaccaagtttgtaataatttgttataggaaaccgatacagagctcaatcttcaactcactcgatatcagcccccctttggcctcaacacttcatgagtcttcccacagagaggagtgcaacggaaatagcatttaggacccctgcttgtatgtgtggaaatgatcaagtagaaaattattcatattattcagaggattataatggatatgtggtatacacaatataaagcctaggctcacctctttctaaaatgggcagaaagaatgttagctggaaaccttaaccacaggtttggagtcctaaatagtgcctcgaggcaaggaagttctctgcagtactgagttaaaaccacctgtcaaagcaggaggccacctttactcaaaattcctcaaagcacatttgccctgtttgtttattggttcagagctatcattatcatcctcaggactctctctttctctttggactagaaaagaaaagaagaaaggaagaaaaaggaagaaggatagaaaggaggaaggaagataaatagaaaggggaaggaagggagggagagaaggaaaggaagggaagggaagggagaagggagggaagggaagaaggaaaggaaggaaggaaaggaaggggaaggggaagggaggagaaggaaaaggaagggaagggaagggaggggagggaagtgaaggcggaaaaaaaagggagaagctaagaaggcaagaaccagaagactagttcttttctttgctcccaatcatgtttttgtccctaatgtaaacataagagcacaaacatgggggaaatgcaagtagcaacccaaatggccccagggctatgaaagagcagcaagaagaaatctgaatgaattccagttttttaaagtcccactcagcactcccaccctactcaaaaggacagatcttagcagcttgttgggatcatgtgacatccatgctttcaagtcacagctgattggatctgaggtatgtatccgggatacccagggagaaccaatcagaagctgagtttggctaggcaagtctttcccaggagcccagcttgggatggagaggtcagttctgagtgatgtggtctcaggggttaggtgactgtttgggggccatcagggtgggtcacggacacgtgaggcaggagaagccactctgcagacagagaatggagttaactgctcaaatacacagccatgaaaaatgagcctcagagaccgctgcctcctggtgactttctggtccttggtctttgggaagcccaactgtgctgagagatggtgtcccccagtcaatttccttctttagctttgatcttctctttattttcttttttgagatggagtttcgctcttgttgcccaggctggagtgcaatggcgcaatcttggctcactgcaacctccacctcctgcctcagcctcccaagcgattctcctgcctcagcctcccaagtagctgggcttacaggcgtgtgctaccacacctggctaattttgtattcttagtagagaaggcatctcaccatgttggtcaggctggtcttgaactcctgacctcaagtgatccacccgccttggcctcccaaagtgctgggattacaggtgtgagccactgtacctggcccgctttgatcttgaatttaactgaaatccttgaggacagaatggcctttccattgtccacagtgctgggcccagagttggtactccacctaacctcgattttgatttttcctttcctctgactggttgcagttctggggaaggggagccacgagcaggtgcttaaggcacaagactggagcatgactgtgactgcagtgtagaccactgcctggggagtgcagctgaaccagctggatccatccatttccacgactgcttactcagtgcctgttagatgccaggtactgctctaggctccaggatacagcagtgaagctaaagcctgctcttcatggggaagattcgtgcttgggcactgcttcccaaagcaggtcctgtggccttgggtgacagtcacctttgggtgatcattcgggactgactagttgaactgggtgcaatacatttgaaagctgcagggtagccacatgcacagagaaagccagtcctgcaggaagagatggaggaagcagaagggcacggaggaaacagccctccacagaaagagacagatttgctgctttgtagttcctggttggggagcctggccacacactgtgacctttgggtatatacaacacaccagtctgctttcaataatgcctatctttccttaagcaagttggagtgggcttctgttatttgaagccacatgtcctgaaatgactcacttccgcatggacaagcatgagatggcaaagccgaaatcaatccacaagcgtcctgagatactgaaaatgggacgcagctgtatcgctggaaatgtgtggatcaactgaaccacaggttctaaaaggcagtacatgaaaagcccttctgaggattcgtggacttctttcttattgtaaaggccctgacaaggaccatttagctcctaggacaaaccatgctgcatattctggtgtggagttacagaaggacagcccttgttatgtctgcaagcatggagggtgggagaaagtcttcccacctgagcctcgatctcttcaccagcaaaatggaagttcctcattttgtgatgagtacctgaaaccaacacaggtaaagtgcccccactgcacccggcacagacaaagcaagggggccaggcacagtggctcatgcctataacccagcactttggaaggccaaggcgggcagatcacttgaggtcagcagttcaagaccagcctagccaacatagtgaaaccctgtctctactacaaaatttagccaggtgtggtggcacactcctgtaattccagctactggggaggctgaggcacgagaatcacttgaatcagggaggtggaggttgcagtgagctgggattgcatcactgcactccagtctggaaggcagagtgaaactgtgtctcaaaaaaagggaaggaaggaaggaggaggggaggggaggggagggaggggaaggggaaggaaggtaggacagtgcagctgtgatgaagccacagtcggatggaaaactgacctgagatctaagcgcttctccctgcatgagcctcacactcacttctacaagtgtgttcagagaaaattcaccaaacgccacaagtctgtgaggcatcttcacagaaagccagcttcagggaaacagcagccaggccgcgtaatgaaggccaactgaggcagcccccggggtcagcctagcccagggcttgggccctccatcatggagagtggtcaagtcagtctgtttggtttggttttcagtctgatgccatgttgtcagcacattcagaagggagcagcttgtcctaagacagtgaatctcaggaggccacagctgtcaggacttttgatttcctggcgattcctcaagtgtattctgccggattttaatgggtgggtgtggaaaagtccctaattagatccatttggaaatccctgtgaaacaaagtctatttttattgcgcacctacgagccagcaggagaaagctgtgtgcttgtctctttgcagcaatgcagctgacctcggaaaagatgtccaagaatgcctgaagctgagatggaaagtggcagcacctactatgtgccaggtgctctggataaagctgcaaaaaaaaaaaaaaaaaaaaatggaccaagtccttgccgacacagaggtgacattctgggtggagcccgaacagaggatgaaaaatatgtatacggtataaactcagaaaatgagaagaaaaataaagctgggtgaagaacaggaggtgagaggggctcaccttcagggtgatcaggaagagcctctggagggtagcactggagaaaagtaggcagtaagccccatgggcatctgggtgcagagaattccagagagcctctcatatgctcatgtgcattataaatctcaaaggaggtaccgcgggacataacatctgccaaaccagtttaacacaggcccttttcccccacaaagccttttccatggccagcattcccagaacacacaacagggaatgatgattgagccaaacacagtccttctacagcagaaagaaatgggcccagggaagacgcttgtccaaagtcccacagcttgtgggcaaagatatctgttagcctcctcactgtgtggcattcggatcacagatcaccagctaaggcaagccactaagatcaccccatcccctgacaacttgcgggaggtggtcaagaccgtagatccaggataagccagacacaggtgcctggggcctcccggctctcagacccactgcagaccttcctgtgtccaccccacccctctgaagggaggcttgcccccctcgtgacagcccccaccatgaagaggagtggatgcttccccgagcttttgccatctgtgtggatgacagtttgccctctggggtggttgtcgagtcacctccagctcattcagaagtaccttcacatcaggctaacaggggaaagctgtgtccctgtctcttcgtagcaatgcatctgggaaatgatgtctgggaatgcctgcagctgagacgtgacagtgagctgcaacacatcaatctcacattctccaataatggatggagaagtcagataccagctctcttcagataccgtggagcaggctggccaggagagggaggaaaagaccccaagagacagaggaaaaaaacaatatgtggatgcaaccatccagaaaagtcactggagagaacgcacatccctacacgagaggccttgaaaacgtggcccttgcaacaaaggtttcctcagggccaaccaggctgcttgccacacgtgtttcctccacaccagtctcccaggggacacgcagcccctggaactctgcacattccaggaagacagtcagatggaacacacatccatacaaaccaaccaacccccagatacaacatacgcaatgaaacattctccgctcccaggaaggctgtgaaacagttgcaccaacaccagaactctctgtttcaccttaggtcagtgactctccaccaggactgattttgctcccgggcagcacttggcaatgtgacagtggtgggggagagggtactggcatctagtaggccagggatcctgctaaccctcctacaacgcctaggacagtccccacagcagagaattatcctgccccaaatgtcactagtgtggaggttgagaagccctgtcctagatgctcttggacatggggactgcagtcatacagcctggccactcagtgtggaccccgtcaaaaaaaagcaagaaacaatcatccttgcattgcttatcatttttcttttaaaagcctgtcaagactgtttttctgtccttcgccccatcccagaactgcaaatctaattctccatgtcatggtatgcacaaatttatcttcctttctccttttctccatccattctcagcccaacatctgttcattaaaaacctgatatgtagcaactgtaatataaagggtgtgggaaagataatggtataatacttacaaattcaaatagactctgagaaattttggactattgaaaaagcatacttaaaaccaatgaaaggtatgtaacaaaataaaacaactggaatacaatttcagaagcaaaaattatagcgtgactttttctgggttataaatcttctcagaaaaacagtatcagataatacagcatgattctgagagataagctaggcttagtactttgttttgtggagtttttttctttttccgtttttttgtttttgtttttgttttttttttttttttgagacagagagtctcgctctgtcgcccaggctggagggcagtggtgcaatctcagctcactgcaacctccacctcctaggcttgagcgattctcatgcttcagcctcctgaatagttgggattacaggcttctgcctctatgcctggctaatttttctatttttagtagagacggggttttgccatgttggccagggtggtcttgaactcctagcttcaagtgatccacccgcctcggcctcccaaagtgctgggattacaggcatgagtcatcgcacctgtgggcttaatactttgtaaaatttaggagttgtgcaggaactttaagaagaagaaaatgttcttagtgtttattctcaagatgtcttatttcagaatgtatccttgtgatactatctagtcaagaaaaatcattagcatctattttaacaaagcataaaagagagataaacaatggaataacatgatagcaagattcttcttttattttttggggaaagtatgacaagtcaagtatgtgtgttcataaaagaaattgtataaatacttgacataagccagtgaataaatgccccaccttacctaattgctgcagctttcaaaattaaaccgagagagagagaaagctgcatcttttggtttctgacaaattagttaccttttaaaaatcagattcaggctgggcgccgtggctcatgcctataatcccagcactttgggaggccgaggtgggtggatcacgaggtcaggagttccagaccagcctggccagcatggtgaaaccccgtctctactaaaaatacaaaaaaaaattagccgggcgtggtggcgggcacctgtaatcccagctactcaggaggctgaggcaggagaatggcgtgaacccgggaggcagagcttgcagtgagccaagattgcgccactgcactccagcctgggtgacagagcgagactccgtctcagaaaaaaaaaaaaaaaaaatcagattcaaagtactggttcaccaattgactttttgaacaggaagggtcatgctgtcctagaagttaccaatggtacattcatttagcaccaactggggtgtttttttttttttaaatcagcacaaatgcagtagagaaaaggaaataggaatataccttttataggagaagttggggcatatgaggccaataattttattgactttaaaaggtaatcctaagcttatttaaaacattcattgaatgcatgaaaatggcaaggaggagtcgggcgtggtggctcacacccgtaatcccagcactttgggaggtgagcagatcacttgaggtcaggagttcgagaccagcctggccaacatgatgaaacctcgtctctactaaaaccacaaaaattagctgggtgtggtagtgcacgcctgtaatcccaactacttgggagactgaggcaggagaatcgcttgaacccgggaggtggagtttgcagagaacggagaaccactgcactccagcctcagtagcacagtgagaccctgtctcaaaaaaaaaaaaaaaaaaaattggcaaggagaaatcagtacaaacattctagctgctatttggaataaaccttgattttgatgtttatttttccagttaaaaaagttttaatgcctaaaatttttccaatggctgaaagtagtaaaaatcatccactcatcttcccttaggccaataatagaaaggtctcacggggcaatataggaaccaggaataagaccagagggggaggaggaggagaagaacaccattgactaagttctacgcatatgttgaaggcagactatcccttgctcctacttcctgggtagtaatttcatagacgtgtacattatcatacacccctccagtgaataaacactgaattaaatggaatatgattttatctccgtgtattgcttcaactctgggtttctgaaccttggcactattgacattttgggctgggtaaccctgacatggggcaaggcgtggctaggtggaaggctgctctgttccttacaggaagtttacagcatccctagcctccaccactagatgccagaagcactgccaaggtgtggcaatcaaaaatgtcccgaagcattgtcaaaagtctcctgggggcctgggtcagggcgcaaaatgcccgtggttaaaaactgtacaaactgaagctttaggtctactggctacggggggttgcggggagaatgtagtatggagaagtggaaaaaaagattgtcatctgagcggcaatttccatgtttgaaaaacgaaatattgattattgcgttgggccacaagactgggagaatcaaatgagttaaattatatgctacaaaatgctacaaaaagtagaattttaaagagaaatgcttctagagttcatcttgctcagcttcctcgtacaggaaaggaaaaccgagtaaaaagatgtttccctaaagaccacagt

SEQ ID NO: 1550 - DNA, 1919 bp, Homo sapiens
tcccgcacgccggcgctcccaggccgcgcttcctgcgtccccaacccggtccctgagagggcactgcgccctctccaccactgcgttccctcggctaagaatcccccgaaccccagccccgcgatcgcggcgcccaccgaggaggccgcccgggtggggcgcgggggtcgcgaagcccgcagccccggaccgcccagccgagacggagccggacccgccgcctcccgggcccttccaccgcagccatccgcacgggaggcctcgcgattgctcggaaccatcccgcaggagttcagctgatattttctagtgtggggcgagagattttgtggagcgcatttaaggggtttttgttgtgactgctgccttgtatatatttattttctttcttggaactgggcctcgccctcctcccactgacatgatggcccagtccaaggccaatggctcgcactatgcgctgaccgccatcggcctggggatgctggtccttggggtgatcatggccatgtggaacctggtacccggcttcagcgcggccgagaagccaacagctcagggcagcaacaagaccgaggtgggtggcggcatcctcaagagcaagaccttctctgtggcctacgtgctggtcggggccggggtgatgctgctgctgctttctatctgcctgagtatcagggataagaggaagcagcggcagggcgaggacctggcccatgtccagcacccgacaggcgctgggcctcacgcccaggaggaagacagccaggaggaagaagaggaggatgaggaggctgcctcaaggtactatgttcccagctacgaggaagtgatgaacacaaactactcagaagcaaggggagaggagcagaacccgaggttgagcatctctctcccgtcctatgagtcactgacggggctcgacgagaccacccccacatccaccagggctgacgtggaggccagccctgggaacccccctgacaggcagaactctaagttggccaaacgactgaaaccactgaaagttcgaaggattaaatctgaaaagcttcacctcaaagactttaggatcaacctcccagacaaaaacgtccctcctccctcgatagagcctttgactcctccaccgcagtatgatgaagtccaggagaaggcccccgacacccggccgcccgactgaatggccccacttgagccacgctccctcctgtctctcacacctttcacccccaagactctaacaaagccacatgagccacagttgagaagcggaggggccagctgtgcatggagccatttggatggcggcgggcggggggggattctctgtatcaggagtgactttgttgccccacacagcctcctgctgcaggtgctttggaaagagatgctgccttggagctggtgaatctgtggaccacattcaagggtgtggcacaggcatcttcccatccttttcactccgaatcgctggcgacacattctcctttccagctaggaaagggttcctcgcggctggtttagattgtggttgtttgttttgcttctactaagactgttttgtttcaaaaaggaaacaagttttgtgtttgctgtctacgctggagtcctgaactgtgggtagaaaacacgacctggctttgtagaaaggacacagggctgttttatgaactaagcggtgaggctcaggtggcggctctcgcagagcccctgatgctgttgttctttgagggcttaaggcctgatgaacgtaggcacgtgatgcataatagtcttcaatggtacacttaactagtctcttctgtgtaacagcaaaaaaaaaaaaaaaaagaagaagaaagaaaactgtaggaaatgttctttttgaaatgccatgcaatggagctttttgtaataaaatattttatatgtagtac

SEQ ID NO: 1551 - protein, 247 aa, Homo sapiens
MMAQSKANGSHYALTAIGLGMLVLGVIMAMWNLVPGFSAAEKPTAQGSNKTEVGGGILKSKTFSVAYVLVGAGVMLLLLSICLSIRDKRKQRQGEDLAHVQHPTGAGPHAQEEDSQEEEEEDEEAASRYYVPSYEEVMNTNYSEREEQNPRLSISLPSYESLTGLDETTPTSTRADVEDGNPPDRQNSKLAKRLKPLKVRRIKSEKLHLKDFRINLPDKNVPPPSIEPLTPPPQYDEVQEKAPDWPD

SEQ ID NO: 1552 - DNA, 1994 bp, Homo sapiens
cctcccgcacgccggcgctcccaggccgcgcttcctgcgtccccaacccggtccctgagagggcactgcgccctctccaccactgcgttccctcggctaagaatcccccgaaccccagccccgcgatcgcggcgcccaccgaggaggccgcccgggtggggcgcgggggtcgcgaagcccgcagccccggaccgcccagccgagacggagccggacccgccgcctcccgggtggatctttaactcaagactagcatgaagagttgccttctggcctgccctgagtctcctcaaataacaacaggcccttccaccgcagccatccgcacgggaggcctcgcgattgctcggaaccatcccgcaggagttcagctgatattttctagtgtggggcgagagattttgtggagcgcatttaaggggtttttgttgtgactgctgccttgtatatatttattttctttcttggaactgggcctcgccctcctcccactgacatgatggcccagtccaaggccaatggctcgcactatgcgctgaccgccatcggcctggggatgctggtccttggggtgatcatggccatgtggaacctggtacccggcttcagcgcggccgagaagccaacagctcagggcagcaacaagaccgaggtgggtggcggcatcctcaagagcaagaccttctctgtggcctacgtgctggtcggggccggggtgatgctgctgctgctttctatctgcctgagtatcagggataagaggaagcagcggcagggcgaggacctggcccatgtccagcacccgacaggcgctgggcctcacgcccaggaggaagacagccaggaggaagaagaggaggatgaggaggctgcctcaaggtactatgttcccagctacgaggaagtgatgaacacaaactactcagaagcaaggggagaggagcagaacccgaggttgagcatctctctcccgtcctatgagtcactgacggggctcgacgagaccacccccacatccaccagggctgacgtggaggccagccctgggaacccccctgacaggcagaactctaagttggccaaacgactgaaaccactgaaagttcgaaggattaaatctgaaaagcttcacctcaaagactttaggatcaacctcccagacaaaaacgtccctcctccctcgatagagcctttgactcctccaccgcagtatgatgaagtccaggagaaggcccccgacacccggccgcccgactgaatggccccacttgagccacgctccctcctgtctctcacacctttcacccccaagactctaacaaagccacatgagccacagttgagaagcggaggggccagctgtgcatggagccatttggatggcggcgggcggggggggattctctgtatcaggagtgactttgttgccccacacagcctcctgctgcaggtgctttggaaagagatgctgccttggagctggtgaatctgtggaccacattcaagggtgtggcacaggcatcttcccatccttttcactccgaatcgctggcgacacattctcctttccagctaggaaagggttcctcgcggctggtttagattgtggttgtttgttttgcttctactaagactgttttgtttcaaaaaggaaacaagttttgtgtttgctgtctacgctggagtcctgaactgtgggtagaaaacacgacctggctttgtagaaaggacacagggctgttttatgaactaagcggtgaggctcaggtggcggctctcgcagagcccctgatgctgttgttctttgagggcttaaggcctgatgaacgtaggcacgtgatgcataatagtcttcaatggtacacttaactagtctcttctgtgtaacagcaaaaaaaaaaaaaaaaagaagaagaaagaaaactgtaggaaatgttctttttgaaatgccatgcaatggagctttttgtaataaaatattttatatgtagtac

SEQ ID NO: 1553 - protein, 247 aa, Homo sapiens; identical to SEQ ID NO: 1551

SEQ ID NO: 1554 - DNA, 1978 bp, Homo sapiens
gctggacgctcacccaagaaggggaccccggcctgacctctctcggaattcaaaaaaatctaaggctcagagagggaatgggagctggctcttccctctgtgtttagcatccacgttttttggcggtctggctgaaaccagcccaccctagttcgggcgccagagcaacgcagttccgagggcagatctccaaggggcggaggcagagccgcgggtggatctttaactcaagactagcatgaagagttgccttctggcctgccctgagtctcctcaaataacaacaggcccttccaccgcagccatccgcacgggaggcctcgcgattgctcggaaccatcccgcaggagttcagctgatattttctagtgtggggcgagagattttgtggagcgcatttaaggggtttttgttgtgactgctgccttgtatatatttattttctttcttggaactgggcctcgccctcctcccactgacatgatggcccagtccaaggccaatggctcgcactatgcgctgaccgccatcggcctggggatgctggtccttggggtgatcatggccatgtggaacctggtacccggcttcagcgcggccgagaagccaacagctcagggcagcaacaagaccgaggtgggtggcggcatcctcaagagcaagaccttctctgtggcctacgtgctggtcggggccggggtgatgctgctgctgctttctatctgcctgagtatcagggataagaggaagcagcggcagggcgaggacctggcccatgtccagcacccgacaggcgctgggcctcacgcccaggaggaagacagccaggaggaagaagaggaggatgaggaggctgcctcaaggtactatgttcccagctacgaggaagtgatgaacacaaactactcagaagcaaggggagaggagcagaacccgaggttgagcatctctctcccgtcctatgagtcactgacggggctcgacgagaccacccccacatccaccagggctgacgtggaggccagccctgggaacccccctgacaggcagaactctaagttggccaaacgactgaaaccactgaaagttcgaaggattaaatctgaaaagcttcacctcaaagactttaggatcaacctcccagacaaaaacgtccctcctccctcgatagagcctttgactcctccaccgcagtatgatgaagtccaggagaaggcccccgacacccggccgcccgactgaatggccccacttgagccacgctccctcctgtctctcacacctttcacccccaagactctaacaaagccacatgagccacagttgagaagcggaggggccagctgtgcatggagccatttggatggcggcgggcggggggggattctctgtatcaggagtgactttgttgccccacacagcctcctgctgcaggtgctttggaaagagatgctgccttggagctggtgaatctgtggaccacattcaagggtgtggcacaggcatcttcccatccttttcactccgaatcgctggcgacacattctcctttccagctaggaaagggttcctcgcggctggtttagattgtggttgtttgttttgcttctactaagactgttttgtttcaaaaaggaaacaagttttgtgtttgctgtctacgctggagtcctgaactgtgggtagaaaacacgacctggctttgtagaaaggacacagggctgttttatgaactaagcggtgaggctcaggtggcggctctcgcagagcccctgatgctgttgttctttgagggcttaaggcctgatgaacgtaggcacgtgatgcataatagtcttcaatggtacacttaactagtctcttctgtgtaacagcaaaaaaaaaaaaaaaaagaagaagaaagaaaactgtaggaaatgttctttttgaaatgccatgcaatggagctttttgtaataaaatattttatatgtagtac

SEQ ID NO: 1555 - protein, 247 aa, Homo sapiens; identical to SEQ ID NO: 1551

SEQ ID NO: 1556 - DNA, 217215 bp, Mus musculus
  misc_feature (1)...(217215): n = A, C, G or T/U
atgacagctgacaaagataaagacaaagacaaagagaaggaccgggaccgggatcgggaccgagaaagagataaaagagacaaagcaagagagagcgagaatgccaggcctcgcaggagctgtaccttggagggaggagccaaaaactatgctgagagcgatcacagcgaggacgaagacaacgacaacaacagcgccaccacggaggagtccaacaagaagagcagaaagaaacctccgaaaaaaaagtcccgctacgagaggacagacactggtgagataacttcttacatcaccgaggacgacgttgtctacagaccgggaggtaagagcagcaggtggtgtctgcttgggagagacgtggtctctcccccacatgtaggagactcctgtagctgttagaggagacctggagtccagaagagcagacagtagcggaggtagcaaaattaagtctgtgaacttggagcccctttccgaggcagagcaagacttagcactcctgggtaaacaagcctttacgaaagtagtgctctttagctttgcagtcaggggcagcagacgatagcaactgagctgtgtgtattctgtattcttttcagtagatattttctggacattcagtgtactagaccaggacaggaagttcataggaagtctaatcaacacaccggagtttcacccagtctggagtttccccaacagcggagttaaaggatgtcattaacctagcatagtcatttcactgcgaagaattcagcttctgaatttgtttgtagaaagctccacattttgggggagccatgtaggagtttattttgatttttcagaaaataatcagcgttagacaaactcctgtttacaactataattttcttggttgacagttgagaagaaaggtgtgtgacatgaaattgtcaatgatggggtgtttgaggggacttgaagggagctcatgagggttccagtgctgtgcatgcttctctttgattcagactcagcagcaggccaccaggatgtcagccgccctgtcttccagaccattatggctttgcttgcccatttaacagggcttttttgttgtttgttttgatttattttttgtttgtttgtttgtttgtttgtttatttatttatttatttatgttgctgttgttgctttgctttggttttggcttaagatagagggtctgataagcatgggcagacctggaaagcactctgtcacctagccctgtagggttagacctgtgatctcttgtcctctcctcctgaaaacagggactgtagacgaacatcacagcactagttgcccattctgttgtaatcacgagaaaggaaaagcgtgtgttgtgttgtttagagtagattacaacttcaaagggaagttgtacttgttttccttctcctgatacatacataacatggatggattgttggattcattgtccgctgcaatatacagtgtcaaataccagctctgctcatcgtatgtacgatggaaattgtgtcactagggacattccagtaagttaggagtcaggtgcttacaggagatactgcgcagactgtcccttcacgagagatggataattagttaactctgagaagtcttacagcaggacagacatttaacaatacttgctgcagcctctgctgtgacaatctttgctgctgactctagaaggaaacaaatttcttcaaggaaacagtgccccctttacagcttgtcaggaagttctccttgatattctcaaagaaaagtgggaggagatggttcagggctcaattacagaatagctggctcttacatataaagtccttgggatgtgttgtgcataccctctccccaagtgcctacatctgtggataccaagtcacttttttgtagagtgctgaggatcaaacatagtgacacacactaagcaaggttctactgctgatctgtatcccagcccctccaggctcttgtatacactgcagttatagatagattaagattcttaggacaatggaaatgctgttcttgtggctgtgttggcagtgtctgacctcacagatagtaccttctatttatggtttcctccttctgtccgtcctccctccatcccttcctttcttcctccctccttccctccctcccttcttcccatccatccagtctgcccctctttaccccacccctacccacaaacagtgtttctctgtgtagttctttctggctatcctgcaactgcagaacagtgtagccttgaactcaagagatctgcctgcttctgcctcctaagcgctggaaccatgcctgttcctagttggatctgtggttggattcacagatgcagagccagctgacaaacagagctgactagagtacccaaactgtagggagtcgctatgatctgagctctgctgggcaccgtgagcatttgaccttttgtaaagtgcttgccactgaatggtccgggaagcttagatttcaaggtagataaatttcccaagcgatttctaaatggaggtttgctaaatactgcccattcttcaggttcatgtcaactgagaagtcaagagtagggttctgaccagattcccatatggactttcacatcctgcccccatctctgcccctgcctttccttcctggtgtctctgttctctgttgcctttgtagtggggactgaacttggggtcctttactcgaccactgagatacagtctaagctcttttaaaaaaaaagttatagtttcaaatcagggtcctactgagttccctcagcaagacttgaacttgtgactcctgcttcagtctcctgagcagctgggtcctaggcctgcgctaatgtgcacatctgcctttgtttttcctttcttacttttgaagacagtctcctgtagttcaggctggggttgaatcatttctgggcagttgaagatgactcttgatcctcctgcctccacttcccaacactggaagtacaggcatggtgcatggcttcttagctgactctcagacacctagtggttttagagaacatcacagaggacttcttcaggggattgggaggttttggacagatctttaaattggctgcaatatgtggaaattttgaatttttaagtatttcctaaagtattattaagaatgagcccttggctgagagtttgtgatacatgtgtttaacctcagtactcaggcagaggcaggtggatctctttgagttggagccagccagaactacatagcaagaacctgtctcaaaaaaatacaaccagacaaccaaccagacaaacagataagccagccctgcagtagtcctttgaggagaggctgttgtgttccttaccccaggaggccagttctctctctattaggttatttattaggagcaaattggtatcagaatttaagatttaagtttgttcattgtcccacatggaggttttgttgcctcttcattgctggagcagtgttctgcccttaggagctcagcacatccctgctaactcctgctaccttctgtcccgaggacaccgcagcaccagctcagtgccattggtttccattcccaaccctgctacattttcttaacagatgttatcatttctgtgtgtctgtgtttatatctacatcacaccttttaaatttttcttttacttatatttgagaattgagatgtgatagtttcttttgatgtacatggatttaaactgggaataatccaaatgaggcaaaattttgaagactgggtgtccatttgaattaagtgagaacatacatagtggttaaaaacataacaactttaagaagttgagtaaatacatacgttttataatgtatgactccttttaatatgacatttcaaaagaggccccagtaatccctgaagtcaggagattggtagggtccgggctatggtgcgtgagttagcttgacaggagcccaagggctctgaccatgctttgttttgttggtggtgcttttatgtaagtgtggccattctctcaagtttaccatcctcgtcctttcctgtgtatagttggtacttgagtgtaactcccacccccacgaccttgaactgctcctgggattgcaagtgtgcaccaccttgcctgctggggaccttgccttcttgaggaagcgcaggaaagcaatgaagcagtggtagtttatagggctttggtagcacagcactgcaggccgagtgggttaaatgtcagcaagtgtctgtcaaatccctcccttttatcaagacccaggcacactgaggctaaaaccccaagactggtaactgtcagggccatgttcccctgaaggaactagggagaaacttctaagcctcaatcccaacttctgtgatgtgacagcataaatctagtcttcacttgtctattcttcttgtctgcttgttttgccctgtgtccaagtccctccctcttttgaagacaccaggctaccctacatcatctaaacgcatcatatctgcaactaccctgttcctaaacccaccctgtatggtactgtgggtcatgtttgtagggttgggtaggcaggaagaactttgtgcctagggagactgtgtttgagtgatccaggctgggcatctatttcagctgtgttttagaactgctggggaaattttgttggggtgttttttgaaatgtattgttattagaggaggcacatatgtcatagcatgtgtatggacagattggaggacaacttttgggaaacagttctttcccatcgtgggtcccagagatctagttttcaggcttgtcctgtaggagctctgctgtgtggctatcctactggccctattcatattttttaatcacactataatgtacttttagttgtagatcatattaattaacttttatttcttctggttctcctgaaatttcttgatcccagaggaaggattgccttttagtatatattaggaagttacttgaactctgtgtgtgttaaagaacacttctcatcatataaaataacttttatctatgacggtagatgaaatgagaaaaactgtaattctaaagttattaaaataataaggagaaaatgccagaaagtttgagactggctatgtctttggtttcatgaaggaaagatcgctgagtccgatgactgtctcaggtgcttttgctaaagtgctgaccagaaatgcagactctcaggttccaacactgatggactgaatcagtgttttatttaacattctctggtgatttaaattcatgttaagtttttaacatcacttatctggctagtgctttgcagctgtactttaatcaatgtgcaagtagaagatgagttattctcttgagagccaaaaaggatcagtgttcccacatgtttgccatgtgtgtgtacatgtgtgggagttcaggagaacaaagcaaagcagaaaagatcctaggaggtgcccccaccccatgttacctgggctcacctcagattgtgatctctagtctccacttcctgaattctgggatttcctcacgtgtcatccttttttaagaggggaaaccacagagctggatttttgtttgtttgtttttttccgagacagggtttctctgtgtagctctggctgtcctggaactcactttgtagaccaggctggcctcgaactcagaaatctgcctgcctctgcctcccaagtgctgggattaaaggcttgtgccaccactgccggccagcaagtgctcttaattgatgcgtcatctctccagtttcctggctttagattttgaagtaagctataatacagtaatagttaaaaagcagccagtgaccaaaattctgattggttgcttgggcataatctgggtgctctaaagctgatagattgcaaagagatccgtgaccttgaatgtggataagagtggagttgtgaaggtggtaaagccatggatatctaactagtaggaaggacacatttgtggcccagtctggagagcagtgagatggctgagcaggtaaagatgcttgagaccaagtttgacaacttgagtttaatacctataaacctcatggtggagggcgaagactgacacccacagctgtccttgcatctcgctgttagagctcctgccaagatccgcagcaacacaaaacaaggagaaattcgccctacttttttagaaaaaggaaataggttgatttcttagaaaatacaaaatatataatttgtttgctccctcccccccaaagttgtatttcagccatttctgatgttatatgcgtggtacccagcaacttaggaggctgaagtaagagggtcatgagtttaagacaaactgggatgtctatcaagggcctgtctccaaaaacaaacaaatgatgtatttctaaagattgacaggttagcatccatagggttcagtctccaaaactgcacagaatatttgattcctctcacttgtaaatcccgtacacacaagggtggtctcgggggtattgagagagagtgaaattttctaaagacagataatataatgattgtgagtagcaggcattgttaaaagatatttaggctaatagtacctcgtggttttgagccctggcaggaaggaaagaccattgcagcggcctcctcacacatgtaccatgtctgtactaaaggttttttgaccaccgtctggagaacactgaccactgaactgcattccacatcagcattaccgttgagtgcaggctaactgttttacagcagcagcagactgtaatcacccatgacactttggagtgctttctggtaagcactctacagggcacaactactcatcagctacctgactgacccctgaagagccatgcaccgtacaccagtaaaatgcccatgtctgagtcacggtgagattgtatggggctcatgcccccttgtcttacccactgactaaaattcctgtcagaaaacctttgcagtccgcacagtctttgctcttctgcccctcccccttctctcttatttgtttagagacctctgtgttctccaggcatgctctgtcttccaagaggagattggaatcgtggacttatttttgtcttgtgccccaatcattgaagggtaccctccattttaataatcccaaattaaagtgctgagcctgtagaggtaatttaatagctaactgcacttgctgatcttacagggaatcctggtttagtccctagcacatgcacggtggcccacaaccacttgtaacttcagttccaggggttttgatgccctcctctggcctcttaagacaccaagcacccaaatggtgcatatgcatacaaacccacacatacacataaagtacagtaaatcttgaaaaacaaaatcactattggaaaggtcaggtctcctgactctcagcagctgtctcactctaccaaaatttttagtccacagatctcaccactttccaaagtcattttgctcccacacacacccaccaggttcaggcacgcacatctccataagcatttcatgctttccctgctgcttgtctgcttgagcagtggtgctagagagctttctccctccagtgcacttcatggtgtagttcaggtatgaatcaagtgtccaatattccccagattagcaccagcagaagcagggggtttcctttggggagcactgtcaaagctgtttatcttttaggaattggctgttaatatgggcatggggtagctgatgatggaagaatcctttgagatgtgtccttgaggttatttgtgaggttattatttggctgttgagtgctcactctctaaagataagattgttgatcctatgggcatagtttttcttgcactgtataatcttcctgggaattagaatggttgttagcatgcctcttgctacttcagtgttctgttttgttttgttttcctcactagttttggttatcttctgaaggtcttttgtgagagagctagattaggataccacatagattcttgcatctgtcccagtagttggctggatcccttggaaacttaggacttccagggtaaacatgagtgcatttagaaggagttctttgcactggtatgagaacgttagctgtcagtgctctggatttcatgttattagctaaattttaaacccaaatgtggcaaggaatttggaatggcgatattgcagctacttagtcatcttggtgaagacatttgtaaaagagttctgatatccaaatgggcagattggtaaatggtcagttagaatgggatgttttgcctctgtggtccgtcttgggtggtttgactgacgtgatctgtggagctacttctcttgttccttgtgagtatcaccaggaaggtaaacttctctgtcaagggccagagagggtgtgatgtagctctcgtctctgcctccttgtctggtaataaacaatgtatggtaagcgggcttgtctgtgtgccagtaaaaacctttttataggtgttgaaatttgaaagtcatacaattttcacaagtcaaggaaaaaattaaagcccactcttgcagcttatatcatggggaaaaaaaaaaaaaccaaaacaaaaccctgaaccaaacctaccctttgcttgtgagtcaaagagcagggagcactgtgttctatggccccatcctgtagttaatgttttcttagattctgctgaaaggagactttcagctctgggctggaggtagatcagtagtaagtgagtgtttagatgcagtaggtgctagagttgaccccagcaccacaaaaccaggagacactaccaaattaaacaaaactttcataacaaggctttcctagctattgcctgtctgtttatctgtctgtctatcgccattcacccacccacccatccatcatgtaggtcttatattttattcaagatttaaagtcacaattttggctaggcacggggatgcatgcccttaatcctggtactctgggaaatattacaagtaccagttgaacaaatgggcaactattgcaaaagtactggtcaagcaaaggcaaatctgctcatgagctccaggcaagaatatcagtggagcatgtctagcgcttgttcattcctgcctcagcacccagagtccatcagctgaatgagagccaggcgtcaccatgtgcactgctgcaaactgtggtgtcttcaggggtgtttgcttacctctgggtctttttgtgacagcaagttggcagcctttgtctgctgttcctagggacttactgtggaagaacactgggagactgcggggtttttgttaagatctgcatgctgggtagacaagtcagtcaactggtctgtgatggccggtaccccaatcctagcagaacgagatttgtatttacctagggtatgattggactgtgagctcctgcagttatgtgaaaccctctgcctctttgcttagtaaacaagagtttgaactcctacgctctggagttcggcttttctggctcagttaattgttaaatgttccctttattataattacgttgattctctgctttgtgctggctgagaagattgctggaagtcttgttggctctgtcacacatggtcggtctgtttggtgtttgaattgggtactgtgaggtgtgagaacctggctctgctctgccagtgtggctggaatttggtcttacccacgggtctgtcatctttccagatactgcctgctatttattgccagctgagaaaattagactttacaaaattaaaaaatattgtctatgatttgaaaactggagtggtatatatattttgttagttgagtttctttaaaaatgtacattgttgggctagcgagatgactcagatggtaagattgctcttctgaaggtcctgagttcaaatcccagcaaccacatggtggctcacaaccacctgtagtgagatctgacaccatcttctggtgcgtctgaagacagctacagtgtacttatgtatagtaatgaataaatctttgggcctgtgcgagcagggactttgtgagtggggctgaccggattgagaagaagtcctaaattcatttcccaacaaccacatgaaggatcacaaccatatctgtacagctacagtgtattgacgtacaattaaataaataagtaaataaacaaacaaacaaataaaataaatgtaaaatgtacattgtcaagactgatattttttaatttaagttgtttttttttaaagcctggttttatttatttatttatttatttatttatttatttatttatttattatatgtaagtacactatagtgtgtcttcagacactacagaagagagcatcagatctcattacagatggttgtgagccaccatgtggttgctgggaattgaactcaggacctttggaagagcagtctgcgctcttaacactgagccatctctccagcccaagactgattttttttttttagcatttaaatattccaaagtaaatacttttggaaataagttttgcctcagagatatctaaatgtcttaagtgctagaaatgttaaagaaaagtatgtaaacaactatttctatttatttctacatttaagtacaaattttatggtgtatttttcagggttttttttttttttttttttttgtagtggatagttttactgtcataaaaccaatggaggtaaattaactaatttgccttacttagctcttctggtgaaagtttaaacacatgaagtttagtattaatatatattatcattacatgtgatttaaaatctactctttaagtcattatcatttcacaattgacagtatgctcaatctaactagcatagtataggttgtatatgatagagcttccatagttgttcatttaaccctatattgaatatatatttttttttgcttaaatctctacatttctctgtttaattaccattttagggactgcctgtacagtaatgtagcgtggcgtggaaggctgagtgcttgagatgacgagaaggcgagcgtcctgcaggtctgcgcctttgcctgctgcctagggtgcagctttggcttttgtgctgtgtctcacagatggggtcagagccgctgtagactgggctgtggggacttgatacagttgagaaaagttggagggggttaatcatggcttatcacaagactactaagtatataacacaaattatattgctttttgtaattttcagtttttaatgtaagatttgaatttgtgctttgttagtaatgctctaggtacctgctagttcttaggaagatagtcatcactgtgtggtatttggtctcggacctcacatgaccctttatttatcccagtgtgctgtggttgttgaccatggcaatgtcagtaatgctgtgtaggattctaattcttctcttgtttagggaagagacatgccaacaacaagaagaaaacaacaagaagaaaaaaacccagtattttgtacttttacgtagtcaagaacagtttacccagaaagtggtagttgtatagccaccattctatagtataagacacattcgaccgctacacctgagagtcattctgtcagctcaagctttcaaaatgatgctttaaccctgcatggacatttgtacctcccctttccaccacacagaggagatctggcttctggtctgttcactgtgctggctggaagacagtgtctctcatgcctacaaactagaatgagtttcaagctggcagtagctatcaaaaaaaaaaaaaaaaaaaaaggatatttgatgacaggaagtgtgaaatctttttaaaaaagtgctcttagcattcaggataggaccagaacaaggctggctatttgaagctcccatcagttgtgttaggagtttctgttttctctgagctgttgggttctgagtgctgaacatctgatatgtgaagctgtgggttccggctgcctcactagtgcgctttacccaaaactctgagggctacacagttccgtttgtatgttcttcccccaagttcatctgcactaattttccttggcctgactagtgctttggttaggttacgcatttgttcatttattgtctcttacttctgcttgcttccaagcctggttcctttgcagtgaacaaatggtatgttttcaagaaagaaaattgaaaaggtcagatatgcgaaagttcatatttaaagccactgttaacatttgttgtgtggtcacttcccttagtgcatacttatagaggtgtgtgtctgcagtgtcttagtatgcctttgttttttatagaatgtgtctcattctgcagcctatgttagctttgcttcaataagctattacacagagtttctactatgcatcatgtgctgctaatgctggggagtataacctggcctgtgctaacctaagagtctgaatacatggcaagggattgacgttggtaggggaaaaaaatatgctttaattgtgatgacaggcagtaagccgtggggacactggaacaaaccagggctctcatgttgcatcataggaaacgtgctcagatatcttatattcgctgtcacgttgcgattatgaatgctcttaagggagtcagagctagtaaaatttcttagtcagttagaaatatgtgcagggctggtgagatggctcaatgggtaagagcacccgactgctcttccgaaggtccaaagttcaaatcccagcaaccacatggtggctcacaaccatccgcaacaagatctgactccctcttctggagtgtctgaagacagctacagtgtacttgcatatattaataaaataaatctttaaaaaaaaaaagaaatacgtgcagtattatgttgtacagttttccttgtattgtgataagcacttcaatatagtggtgtttttttgttttgttttttaaacatttagactttgtcagggtcttattctgtagtcctggttggccttagactcatggtaacctccccatcagtctctgatttaataaaatggtttccattttattaaaattctaattttaatactttaattttagaggagaggtactcctataaggttcaggctggccttcagttcccaagtagctgtcacatagtcagcttggatttgtcccacttgtccatttacttacttgttaatgagaagctgtcactgtgcaacccaggccggcctggagttcgatatttaggcaggctagcttaagatgtattatcttcctgcatcagctttctgagtggtggtattacaaatgtgtgccatcatctatctgcctgacctaacttcagcttttcagtgttctggtattccaggaaatttgctaccagtccctatgctttctgggaaggcacatccatgaattcccttttgaaacaaattcatacaggagagtatgctaaaagacaacaacaagagtatgacaaaaagacagagagaggataatggtttgagtcagcatcggtgctagccagtgtgtgggagaaactgtcacgcgttcttgctgtttgtgaaccccaggggtagactccttagaaccagacttagttgtgctcttttcagggaaggtgctgtcagctttgttctgtctggccccatctggtttcatctgcctctggaaggtggttttagatcctggcagaaggtagtaaatagtttgtgctatctccttactactggggtccctgtttggtttctatttgtctttttgagacagggtttctctggggtgctctgggctgtcctagaacttggtctatatgtagtccaggctgaccttgaactcacagagacctgtctgcctccacctcccatgtgctgggattaaaggcatgtgccactaacacctgttattgacttcttatgttcagttttagtgtttactttttaattagtttctttttttaatatattacattggcttattatgttaatatttttattatgtttttgattcaaatttatctttaaattcatgaatcgtagcacatgaactcaggaaaataatgggtaaaatggcttagtattatccttccacatttcctcccacagggaatagctatcatcttgatacaaatacagtgtatttgatcatatccacccctatcccccacaactctttctcagagcctcacacaaacatcttcctctcaaagtcctgtcctcttctgttttggatgtccactggagcatcagcagcctgtcagtggcccatccctgaaggaagagctggctcccctccccaggagcagtggcgtgcctgcagctcctcagtacggcacagggtcttaggagcccttcacacacctatgccgcctggctgactggcttgttcttgctgggtctattcatcaggcacccgcagctgctatgagttccctgccacgtccagaagacaccactttccgacagtcctcctggtgtatataatgtgtcagtcatcatgaaagttctaacactgggtatgttcattcattttccatcaaaagagaaagcttggggaaggaagccacagagccggacgagtcacccttcctgggcagaaagcacttttccttccaagccttttctggctatgctgcctcagctttttgctatccatgaaaagacagcagaattgtggacgaggaaatggacttgggaagattctacaatgaaccaatcagactttctctaaaccatctgtgaaactctaatgcaactatagaaaagcaaggccctgggagagacggaacctggcctgtcatgcatagagaaaaggggaccttggggagagcagctgtgacaagtcagtggggaaagctggtggcagcaccggttcacacacatgctgctctttgctgtgagtgtggagctggcttgggctcgctctttaatttcttttgagtcagggtctctctgtaggccaggctggcctggaatttattagatagcttaggttggccttgaactcccaataatcctgcctcttgagtgttgagattataggtgtgagacaccacaagggttcagagcttaaacagtatagtcatgtaagacttgactgttacctgcttttagcactttgtttaaaatggagaagtcttggattcttttctctctagattctgatttattttgtctcagcagatgttcggaacatggctttcctgaggttcacatgactacaagaacatgcaaaagcagagctctcattaagtgttggattggcccagcgcagctgcggcccttcattgaagtgtgttgaatacagttccgggtttaaaattaaaaaagaaagaaagaagcacaagtgccgtcagtggctgaacagaaaatgaagtcccccatttccttggaggatacttagatacttcattactttgaccttcaaatctctgctaatttggattataaatgtggcaggtggatggcagattagcacataagatggaccctgatgtctttttatatgctatagagctgtggatgttacatcccaaggagtcagagaatggacatcgttgtctatgtgggatattttcttcagataattcaggatacttgtaatccggacgggctgacgaaacacattgggaacgtgatgtcataactataggtggaggcagcattgctgtaagggagcagggaggggagggtgggttgcgttagagtgcggacaggtttcactgctcttagaactttatagaaattacagcaaatgataaaaattgtcaggctactgcaagtccaaagtagcctttggacaagcttacttggttttggtgtcagctggacatcaacagcatttttataatcagcccataaaataagagcacggtcttgtgtatgaccttacagaggtacttcttagaatggtgcagaagggtgaaatggccggggtggtggtggtatacaccttttatcccagcagtcaggaggcagagacattcagatctctgtgagttcaaagccagcttggtcaacaggacagctagggctacacagataaaccctgtctcaaggtagggggggggggttcttgcacacacatacacacacatacccattttctggggggagaaattcacttatttaaataaagtggactttcagcaggctgttacagactaaagatgtgtggaagcatagacctgtagacttgggtcctgaaatttggctaggattgtttaagaaggacagatacctggtgggaacagcaacacgagcatggcagggctgatgtgtggaccagcaatctggactctaagccagttgggattgatcgatcaatcttcccccccccctccctccctttcctccgcccctccctcttgcttctttctttccagaagattctcaaactggccagtggtggcacacctttaatcctagcattcaggagatagaggcaagtggatttctgtgttctctataaaaggagttccaggacagccaaggctatacagagaaaccatgcctcaaaacactataagtgaatgactgggagggggcagagggagagggagagggaggaagaggaagaggaagaggaaggaaggaaagaaaaggtttctctgaacatagccctggctgatggggactttttctgtagaccagccaggttgacatcaatctcaaagagctctgcctgcttctgtcctgggtgctcggattagacatgtgtaccagcgtgcctccgctcttctgtgaactacgctgattctgtgatactggtggttatagtcagggcagcagatcctagatgttgatctgtcacatttcttttgtttgttttctttgtttttcaagacagggtttctctgtatagccctggctgtctggaactcactctgtagaccaggctggcctcgaactcagaaatccgcctgcctctgcctcccgagtgctgggattaaaggcgtgcgccaccactgcctggcgacccagctcttaattgtctcttacacagctgtgaggatatgtaggtgaaagactgatcatttgagaggccacttgtatgatggtggtgcctgtaaacaaatctgaagtctgaaggcaattcacttgagtatgcatgagtatgagcccagtgtttagtgtatgtctgaatctgtgtgccatacttagtctgttttcaataaatttcatctaatcttgacattatgattaactggaatatattataaattatccaacagtaagcaaatgacaggcagaaaaaaaatgaacattcagttttgcttgtgtgaagcagctgtcatgctagagcttctgtttgtccatcctgacagcaagacttgtatttccctgcacttggcctgtagttaagattgtggagtataggaggcaaatattaaaatggggtggaatattatagtaatactcatcatacaaggaactacagtatagatgctttaaaaagtacaaaagaggagttggagagatggcttagtagctgctcttccagggtacccacattcaattcccagcacccatgtggcagctcaccaccatctgcaaaacacccttacagagaaatatatgcatgggctttttttgagctctggaaactacatgttacaattaactgtcattaattccattgaacagatatatgttccatttgctgtacattcaggaggcaggcttgaatggtataaatagatgaaatttaaattatactggcagtccattaaacagtagcaggaaacccataaggaaaatggattatagtaaaatcatatgccaaatgagagtgatagcccaggcactgcgaatcccccgagtatttccagggatcactaaaaagttgatctgaagcacttcctgctaggctgagactttctagcatctctaggagctagcagccttgcttgaaatctttcctgcagggcgtggcagtagcacatcagccagtgcttgttgttgtccatgttggcagagaggagccctctcccaggcctgcctgccactgctctcttccccgtgaacatggcgctgttgcattgctcctccagtgcacagcgtttgcttgctttcatcttttttattttttgcatgatgctggggatgaattctagaaccgggtatgtgctgggtaaatgttttactgctgaactgtgtatccagcaacgctctccaccccttccacactctttccttgagacagtactactgtgtatcccaggctagttttaaaattgtgattctgctgtctcagctctccaagttagtggattataggcagagtgtgtcaccatgctaggtccattttcattccttgatttaaacatctatcaacattttggttagtaatcagaacagtccagcttaatagttatttttatatcagaatttaacttttttatttgtttttgtgtgtatatgtgtgttgttggggggacgctgatgtcaaaggacagcctttggaaactggtcctcctcctccattctttgaactcagttcccaggctttacctactgagctggaatctcactgggacagaattttttctttcagtgttttagtttattgtgagccactgaactgggataggacaattacctgaatattttgtcttaagaagtcaggtacaatgtgctgcaaggctgggggggcacgggcagctggggccttctctaggtgggtgggctgctataactgtggcaccttcagtggtgctgcagatggagcccagagcctcgtggattcatgtgtgccaggcaggtgctttaccaccaagccctcaattccatcacccattttaaaaataaaaattctggggggagggtataggggactttcgggatagcatttgaaatgtaaatgaagaaaatatctaacaataattgcttttgaagaaatctttcttagattacatgctttttttaagtgtacaaatatgtaagttgactgagaagttgacttaactggagtttggacttggacttggctagaataactttcatagtaagggttcagtacaagttataaagaacatttccataataatttatggagataagagcttaaattgctctgtttgggtaatgcaggtgttaagccagggttaatattttgaatgtcgtcacagtgtgctttctgctgctttttcttattttgctcagttttcacacccattagttatgactgtgggaaggggaacactagcagcgcttcctgaggttggacgatgtcagcctttaagcatgggagcagtggggaggagaaggctgtcaatgggtatgtatgcatgtgtggaggccaaagggcagccttggccgtcgtcaatcaggcactgtctggtttgtttctgagatagactcgttcacttgccttcaagtaagctaggttggctaggattcaccttctaggtgctgggttacaaaggcacccaccacactgtgctgggctttgacaagagacttgaactctggtacctgtgcttgcaaagcaagcattttcccaactaagctgcctccctagcccagtcttagagagattgtgatgtactggaagacttcctgagagttagaaagagacatgtctaaatttgaaaacacttttgtttgttataatcttctttctgttcttcgccgtcctcttctgggccgacaagacccatgtaagctttgcagcattacagcccttagatgtttctgtgtgtggattccgttatcaagaagtttgtagacgatggagtcactgatatgttccacctgggtgtttttacctcctactgagtttatcaaaatgatgccatcaaatttggtgatggttgacagagtcaaatcaaaagctaaggagatgattgggaaggtgttgtctctccctttgaagctgtccactgttccccacacattgctactctcttctgaaggccagcctctctccacctgtgacagaacgtttcactttctttttagtgtttggttagggcctcgggtaactcctaatttcacttctttcttcacttgctcctcagagaagtggatcacatggtggaagccaacagtgcagctggcttgactgtgttgcggatggtgatggtagcttgtttgctgaggcccacagtgtaccagtgcttctcatctggaatccagacaccgggattttagtgttgtttctagcaagcctagctccaggttcagggagtgatgctgtctcaaggagtaaggtagagaatgatagaactgcatgcacacgcacaaaccccaccccccacaaacacacacagctttttttctgtgttggaattggcaaacacttgtattaactagagagatacttgtggacttaattctgcaatatttgaccagctcactgttcccttgttgcatggttctgagtgtcagggatagaggaacagcatggaagagaaatgaaggagaacaaagaagcctgaggctcagcttcccatgtccactgttgggctacccagcggggtctctcaaaatctctttgtgaaaaaggctttgttcacaaggaagggttttctatttgaaattctgttagagtggcactgccattctttgcaaggggacgagagagtatttcagagattaataggtggggacacattgatggagggaagtgtccgcatggggcagagcagcggctgaacattgcctgtgtattgtaacacacagctttaatgctagggctcacagcctgcttactaaattagggggtgaagtaagtgtccactctgcttatgaggagactgtcagggcagacgctgataggtgctttgtgtgcacaatggcaggcagactgcctgatgtggcaggctatgatttttaccttgaggaacttgcttccctgctcgatttacataaacctgctgatttgctgatggttgggaaagcagaggcttttctctgccttgagaatttgccttcacgtttggccgacttccctcctcagctcagtgagggctctgtttgcagatggcagcattgatttttctggacacaaagctatgttgagattatgagaaacaaccagaaatatccctgctcaatatcatctcccaggtcatgggttttggtgctcctggtcacaagcatttcaagtgacaccatgtctgtgatctgccgctgtgcagaggctcagtgcttaaaactcagtacaaaccccagtctcattttcagacatccctgctaaagaaaacattagttatcgtttgcttttcagaataattgatagtggtggcaatagcctcatttatttcttctggcccatttcaggcatgctggttttaagattaaaacaatgtatatatttgccccacagcaactgttggctcattctagtgaatgcttgctttcttgtgagtgattttgaaaatgtgcattgtgtgtttaatggactgcattgtctgcttttgacaacaaagaagaagggctttaacatttaaaaacaaaaggtgtctgtagtgcttctgttagctgcaggctttgacactcgaggaccatcagttcagctgactaaatcagccttagaagcaaccagctcttagatgagccatgctttcggaagttgcatgacagtgttgccaaagcactttgactttagaaaggttactgggcacacacattccatctgtgggtttttctgacattgttcttaactttgccccttaaaattaactactttggggctagaaatgtaggttggtgcctgtctagcatgtacaagagcctaggtacaaggttagacccccagtttggttagcactgcaaaaccaaacaaaaggatctacaaataaatgactttatgctagctataaacatttatatagattgttttattaaataagcgtcttgattactgaggccagagagaaaatacttgtgatgactgtttggtctcagcttaccctttttgggggatgggggtggagtaggctaacagaaagggtattaaaggaaaaattacttcttttgagacttaaattccagaatatttcctatagtgtattttctttcttcctttttcctttttcttctttgagtgcatttgcttaagttggatcgttctgttttgtaggaggaaaaggtttaactcttcagttatgtttcatagtttattttaaaaattcattagtggttaagagcctggctgctcttcctgcttcacctcccaggacccacttggcagctcaccactaactgtaactttagttccaggaggcccaacacatgcaggtaaaatatcaattcatgtaaaacaaaaataaatcattaaaaatcacttaaaaaaaacaaaaaataccttagctaaatctggctaaaacagaacattacccatccagaatgataaatttgactaagcttggaaaaaaattaacttatgtgacacgacttattattctctctgttacagaatccatcttgtcgcctgctcagatagtgagctcatctgccatacatacatgcatgtctcagaatactaagattctgatccaatagaggttctacagacaccagccttgcatattgaaacaattatgtaaattcacagctttgaatcagtttggatagtcgtggtaattgtttaaattaaaaaaaaaaaagatactgtatatgtaggaaaaaattgtggtcattctacaggtcagattccctcaagtgtagcctttcccttgggcagcattctttatctgtgcctgtcaggttcagtaggataagaaacatgggtggcagcagccgctcgccccctcctcaccccccccccccccaggctgtaatgccttggtgtgtttagagataaacatgtcctgagtctatttgtagcaggacataagttttctctcctttctctggaaagctctttgagggtgaggggactgcagcgggtagagttattgaaacagattctcagatagttctgactactcttggactcactgtttggtcagggctgaccttgaacacctgaaggccctgcctccatctctcaggtgctgggattccctgtgagcacgtgcatcacactgacgatggaaacttgttagtatccaagtctgcggtgctttacattgcagagtaagaggggctgtggtaacatggccctgtttgagataaaaagatccataaagcccttctcttccaggtaactgggcctcagtgtcccacatttgttacttatttcaggcctgtctgattgtgagcacaccagtggcacacactagtctttgctggacacagggattgctgtggagattgctgatggtgacgaggaagaagaagataaagaagaggacagtgcagaccacatgactgccagataatgggacattcagcattgtgaattgctaaggaatgcttaccactcctttacagaggagccacgagagtgtattacctttgcggcccctcataattagttgtaagctatgtatggtcagaactggtagagtaaagaaaggatagggttgtcacagaccaggcaggtgaattggtggtctttcttttggaggctgtatcccgggaggaggtggattctgtgggaacagatctttggacctcacttaagacgttgatgtgtttgtgaacacgtagcttaatttagtagcttttgtggaagagacaggaaggagaaagtgcataggtgagtgagtatgatgtcattgctacctggagagttgagctactggtgctgcattcaacaggactacaacatggaaattacaaattttaggcctatttcaaaactgtattaaattttgaggcaggtcttatagtcatctgctgagtggtgagattacaactctgtgagccacatcactgcacccagagagagctacagttttttgtgtagagatttatgctgctacttttctgtaacaaacaagggctatgaagaaaatgattagccatagcgggaagagtgtctttggagatgacaaatgtgagatggatgctgcctaagtgccgcagcagagtcagctgtcatcttggaccctgatgcacattggtgcatgccttcagggcctcatggtctcctctgagaagtcagtcagggcaattctgataccatcatagattcatgtttcttctctttctgaaatggcttttgtggctccattttatgtcttggcttttaatgtgtatggaggtgaaataaagggctttgcctaagttgtcagaaagcagttgtcttacagaagcacatcctgaagggggcgggggagaggatgtggtgattggcttttgcacctgtaggcattagtatcccacttcccagatttggtaaccgggaaacgtttacttcttggtaaataattgtctcttaacaggcattttaaaaagcagccttttaccctccagctgatgtgaatgtcaaaaataattgctcccacactgccatgtccggtgtggcagagggcagtgctctgctcttctttctgaagaaaatatttggtttacttcatcccatatttgattggctgccttggttttctttccaggcaagaaatacttgatagtaaattatctgtaggtgactagtgactagaatagttttcatcctttttcatgttgtggtgaaaaggctattgtagtaacatgtttaagatggtgttttcaaatatctatttcctcaaagaatacttactgaaaatgaagtagcttgtggcaaagctgtttctctttccaaagaacttgaacctaaaagatttttgagttgccttaaagtgtgtgccctccttctctccgtcctcccacggctagggatacaggcaagtgccacatacctgttttgatgtgtaatcgtgatttgttttctgagacagggtttctctgtgtagccctggctgtcctggaactcactctgtagaccaggttggtctcacactcagagctccacctgcctctgcctcccgagtgctgggattaaaggtgtgcgccaccactgtccagcttggtgtgtgatctttagttaggtaattgtgtgatctggtttctccgtctggctgtgggcagttctgcagagcttcctttccctgaacagagtcatcgagacttttcatgaggtttctgtagatgctcagaagcacgtacagaaagagccattaccttaatgatatctataatttcatatttattacccagagaaaggttttgttttcactattaaaaggtacttgctttgtcatcaatgtgtttatatattcatttacgtagctatttttttattcagtgttcttataaagacttatcttttcctaattttttttttaaaaaaaaccttcctttttcttttaaagactgtgtgtatatcgagagtcggcggccaaacacaccgtatttcatctgcagcatccaagacttcaaactggtaagcattttcctatgttctgacaccccccccccccgtctctccccctctctttatttagctcctcaggctgtcacttgattgcttctcctgcactcctggtgtgacaaccagtgtgggccagtgctacctgcctctgggctgtgcaccgaaataatgtagcttgtcttgtccactgtggtaatgcttttctgctgtgaaacagggtgtttctgaagtctttacctgctagtcgctgttgtcacagtttcagagagatcctctttagcttctgaagtgctttcttttctttcagctgttcttaagagcctgaaacaactttagtgtttgatgagtagacaatgtaaaccagatactggtttctgggggcactggagttctgctatgatggtaggtatggactatatatcttgtccagttttaagggtctcccaggagcagaatttaggagaagggagtttagcttaggattaaggctgtcttgatggtgctcctgacaaaatctttgcttttagacagtgggcttttagacacattttgggctcagaataaatccccgggtgtttgtaaaacaaacacgctcaggccatgtgaggtgacacatacatttaatgccagtgcaggtgattggatctctgggagttccaggacaatcattgcttcacagatagaccccttccctccccttcctttttttcctagatcagtattgtgtaaatgtgtgtacctcaacttcagagttaatattctgatttttttcaaagatttctcttatgagcaacaaggttaaatgtcactattaatgtgtttgcctcacacaactgctgtgtaagagagtgtcgaagcggtgtcctggtgagccactcgtctgaaatgttttgatcttagagtggggtccctttcctccaaggctgagaagcacagcctgcagcgcagagcagtcctaagcctgcagctttctcgactgtgttacatttgtacctgtggatgcctcctttcccaaacacctcattacctgagagcgtttcttctcatacacatgtttgatatttcacttcagagaaccaagacagtaaagcgggtcagctgggcatttctttgtaagacttgttcttactaggctacttacaagttccctgcttttgtgcaaagtggccttgcagcttcgtcttttaaatcaaatggtttctatttagtattcttcccaatacaaatttttaccatttttgaaaatgtttgttctttattatatttttctttacaaagatttttttttacagatactgcctaatccctgaactttgggaggtggccttgtttccagaagagttttattttggtagtggtggcagctgctgctctttctgtgtttgctatctgtgtatgtgactttgttgaaacaagttccagttcaccgtggagaatatagctatgaaataaaattataaagaattttcttgccgggaggtggtggcgcacgcctttaatcctagcactcgggaggcagaggcaggcggatttctgagttcgaggccagcctggtctacagagtgagttccaggacagccagggctacacagagaaaccctgtctcgaaaaaccaaacaaaaaaaacaaacaaaaacccagattctgagcccctttgtatctctctctctctctctgcctctgtgtgtgtgtgtgcgcgcgcgcgcgcgtgcatgcgagcgtgtgcacaagcatgtgtgcaagtgcgtgctcacgttctcaccttcatgtttcaacagcatctcttacagaaatgttgattacagggtggtagtggctgttctgggcagaggttcccgcggaggcacggtaattgtctagggtgttaacagcagtccaagctgaagcttctgcaatatctattaaagcattaatgctaactgcaaaagcacgcgggacatacatagggtgcagcatgctttggttccttttaaaaccacagtctttcttgtgtttctctttgagattccctattcattgaattttaagaatgttatagatgatgagatatttgctcctgggagaaatatagttttcctccttcctcagttctgtgtgcttcttaggaaaagattgtaagaggtgagtacaatcaagacttcttcctctggcttacccaggctataagggaaatggacaagctgtggaaatatgccttttttctttcttaggagagttttaaaatgaagagattggagttgaatttgctcatagcaaacaacattgcaaaacagagcaatgaaaaatagctttaaaaatacttagctttgaggtattgcatgacgcgatgtttttctcctttggtttggggttattctaagagatgtgctccctcagcataacagtgcctgtagtgtggtagggcttggagtataagtaaggtgtgtactgagactgtaggagcactgtgtgatacagtaaagccaggaaattgagacctgaggttagagctgggtgctagtcagtgagaccagagtaattgtgtattgggttctgaaagccttgggtagtgtttcatgagctagctcactgtgtgaaggaaagagtgtttggatttatgtggagacctgggttgttttctaggatttgctttggtgtttctccagagtctgtggtttagagcatgccaggttatgtaaatagcctttcccttcattctcagaaatgtccaaatctgtgtaacttttgtggccatcttgtctatggggtgagctcagtggcctctgctttagcaaatgttacatcattagaacacacaaggctctgccgtctacactgccaggtaaattgacagcccacactctgacacagctagacggagaccatggtggtgcagtaggttcttacctgagccaggtctttgaaggttagggctccttcccctctccctcctctccattgtgtttggtttgagaacaaacatcggagattattaaagaaaagcaagaactcccaagaatgaagagtgggaggggctccaagggagacatactctaaagaaagcattatcaggggaagtaaattatgtgttctattgggaaacgttgattcttttatgctatattcatataattaacttatttccaagccaagaaaactagttttgtttaagtattgaattagaattgttcgtggaagaagcagacaaaagtggggactcaagcaagagaggtggaatggacagcatgtgctgactgagaggcagggggacggcaggcagttaaataaagatgctctgggctgtagttttcagaacagattttaagcagtgaattctccttgcagtgctgatgatggtgacaggactctaggcctttgttgtcctggcctgaaaatatgaatttctctgtaagaatttggaactagggaaactgaggcactatgctagtcagcagagggcagagctgaaacggtgaatcgggaattgcttttatgatagcagagttggaaccagcatgagctagtcagcctccatgagcaagtcagcctccatgagcaagtcagcctgcatgagcaagtcagcctgcatgagcagatgagaacagaagacagaggatgctggtgtagccacttgcttcctctacggtctcccaagactcactcctttccactagcttctagattattctgctcttctggaaaggattggcccacttgggctagattgaatagaccaaaaagacctgaataacatcttcaactcttccttttgttgcccttccagagggttccaaggtcactttatgtggtctacattgatggttttattcgtgatcatcaaggtgtgctttatcctagaatgcagttggaaacattcatgatcagcccttccactagcatttgttgagaacttgttctgtgttctttgttgagcccaaccaagggcactgaagaaggacaaaatattgtttcttccttcagcaaccttacattctaattgtagaattttcagtgttactaatcatcagccatttttggagaacaccagataggattgatagagaggaagacataacttttttgttctgaaagaaacacttgtttttagtaaaaatattactattctataatctcaagtcttaagtataagtgaaataatttctacctagaagtaattgtggattctgagaaagtcaacagtgcgttgctgaagtgtgttttgactcatcattcggtaccaaggagttcctgttgcacagactaccagttgttcgtttatacctagaggagtactcagagatgctctgttaattctcatgggaatgctgtgtgagttcttgttgccatcatccatactttagaaaaaagtgtggtgtgggtttcctaagattgggtaattgtaggattatttatacccaatcgccgtctccgggaaggatttataatcattgcggagagtactttaggttacactgattcattataaaactggaaaactcatttttaagattaaaccttgtctaaatatgccttaatgtcattaacagcattccagtgacttgttccgtgagtgacctgaactgtggggggaggagcatgctgctgcattttctgtagaccaggcagcagccattctcatggctctgactatggaacaagcaaagacttcaagctgctagttccttagatcacttcacaccctgcggtgtatttccttgttatgtctgagctgcttagggggacatggttgagatttctctttgagctctagtacccagaagccattccaaaaatttgttgttgcccatagttttttattccccagtctcatgacagtacagcagaagagagctgcagccaaggttcatatcagtgaattatcagacttctgtactgtatacagttgcttgaatcttacttggctgtttgattgtagcatagaatatacaatggttactcattttagtggtaggtcagtatcaaattagagccttcttttcagtgagatggggtggaaccagaaatctttatcaacctgagcttgtgtaattcaaaaattggggtgtgttagtctggggctagatgaatgttgttagactgagtaggttggtattttgaattttgacttcacgttttctgattctcatgtctgttccactagttgctacctttagtgatcttagttgggatggacatataccttgcaagtaggtcatatttaaatggaaaatgaagaatacaaattgtctaggatagggtctgccaccctcaaatgttggtgttctgacattatttttctccttatgttgtgattagttttccttatttgtttaaaaaaatttgttgtatagtacttgtacatagttaaagaaatgtaaagaaaattaattggtgccaaacttcctctagaggccatacctttttttttttttaataaagatacctgtccttgctttttaaattttttaaaaggtccttagagattgggattatgattatatggtaaccaagatgtgcagggctgtcgtcttagcacatgtagtttgcagtcaagagatgtgagctggaatgaaattctcttgtgtggagttgggtgaacttagtcaaggactgttggctggagtgtggatgccaatttagaaatggacagagaagtatctccctaagtaaaaatcaaaatgaagcgttgggagtaaggctcaggctcacacatttcctcacccccaggtctgttttcactgccagcaatgggcaggacagtctatttggagctaaagctttaatggtgcataattacttcaaagctggataattcattttctcccaatttagttggattttaggactctcaagaagtaattgaagttttgcttaattgtatgtatttctttaaaatatttacctctaaatataatttactgaacatgttatctacgtgaaaattttcagcgtggaaaactgcatattctagttgttctcaaggagtttatgaagttcaaggcaatgatctttcgagaagtctactgtataagaatattgctgaagccttgttcaaacgtgattccttataactggaaatttacaatttgtatgtatatttggatatttgtattaataatcaactcaaatgctgtcagaaaaaattactgagaaaatgagaggggctcagataccatctgtgctttctgaatgatatgaacaataatttgtctttaagagactggctttcctcacatgcttcgaatggtataatggcttggactgtttatctatttaaaacagatgatgcaaagtgttgagacttgctctggtagggttttaaaaaagttgaaactcataattcgaatggaggatttgatgtttgaatttgatttctggttaattgaattcctgacagaagagatttaactatatattctgttttacttttggtttattgtgaaaaaatgctgactgcactatataccggactgaattatacacaaccgcatgttctacttggacttcactgtgccctgtagtcatggaggttatggctcctgataccatctattgaggtgtggtaggaaggagagattccaccaagaatgggttaaaaacaaacaaacaaacaaacaaacaaacaaactacatgtagcaaggcactaacaatgatgtaatagtaaagcttgcttgattaattcttaaataactgtatacaacaggttcttataagtatgtgaatcctgtggaatttgttttaaagatcatttagcaccacatgaaattggagaagttgggcctttttgtgccatgtgcgcttgactacttggagggtgcagtgtggtgctgtctgagggtctcctgtgcttaagggacagtcctggctttcagaagttgctctttctctttctgctggtttgagtgtttttagggtttctttttaaaaatacttctagtacttgttaagctgatttgtggggggtggttttgagacagagtttctctgtttaaccttgactgtcctggaacttgaacatgtagaccaggctggtctcaaactcacagagatccacctgcatctgtctcccaaatattgggattaaaggcatgccaccaccacgtggctgctaagctgattttttttgttgttgttactggaagaaatggctttcttgaacttgataggggttgcctgttagctaattctcccctttgggacattttgaggaaactaaaactcctttgaatacactctgttttccttcctgttttaagctgttgtctatccttcagctttacagaattagatgaggaacttccaggaggtggcaggacttctctgtccaccttaacaactagcaagcgcacacctcatgctcccagcatctctccacagaagctcttctgaaagctcagtgtgtctgtctgctcccggttctctcccgtgtgtctgataccgtggaatgtcgcctttgtgacgagccaagcgtgccacggttactgtgctttggcattgctttacatcttgacttggttattctgaggggcacacaccatactctcaaggtggacccaggttaaaataccgagccagaagggcgggccatacaggtgttgatactgaaattaaaaagcagctttgactaatgtggaaaggttaactccactttgggaacaaatttccagtggctttctgctctttacgcatccttgcagacacctgcttgtgtgctgagtgcccctcgtaaccaggatggaggtgttgggcaccttaactgaaaactcttttctcttttaggtccacagctcccaggcctgttgcagatctccagctcctgctttctgtgaccccccagcatgctctctgccggtggcaccacagccaccacagcacctctctgaagccgggagagggcctggaggggtaaggagaatcccgtttttaaaagcttatcagtattttatatcccttagggtataaaataggatattacctcccttcccagagcccctttaaagatgtgctgtatgctatgtgtttttaaagagtactaagtacacacacgaggaagcacaagacgggacttgccttacccctctaggacagttccagaagttagggggtttggtggagggtattttggcaccagcagagagcatgctgggctgctgcaaggagcaggagctggcaatcagcagcgagtatggatgttggcaactgagatgggggaaaagggggtaagtttaagttcaagcgtggaatgtgtctttcccaaggctcatttgggactccaggcccacaaatctaaactttatggccactgccctcttcggggcaccttgtagaaggccgtccagaaacagtgaggctttttctttagtcctagtcaaaaagccctggagtggctggggctgcgaatggtgcccctctcctggctacacctctgtgatgggatgagcagagtagatgcatgagatgcagcaggatgcagtggtggtgcccaggagggcttttctaagagttgtaggttcccatttgtggacagtgtgcacacttggtttccttcctcttcccttttggaggactttaatagtaacttttctagaagacgggtgtttattgttttgactagagtacccaagactatcactaaagaagcccaattagactgaactagaaaatagtgcaggagggcagccatcttacatatccttgggcagtaccaggtactgtcaacatgtgatcagttatttaggcacagtacggagtttctgtcctgtcactaagaagagttctctgtgcagctggtagcattcggacatgttttgtaaggaggattagaatccaggagctgtacacttttgacgtgtcaatatgatacaggcagacacaacgtgcatgcatcctaaaatcagtgtcgagaatgtgctgtgagaagatgccgggtattgcaaagagcacatgcaagtggtgctggggtagagatgaaggtgtgagatagggctgagatctcagaaaatttgaggctgcattaggtaagattttgatggcctgggcaggagagagcttctcttctgaaggcttagaaacgaatccagctgagctcttagaagccattgtttcaaaagattcacttggtaaggatatgcagtgtataaaagggaatctagcgggggtggggggggtagggctatcttccttgtgtacaatgaagaacatgtctatagagattgctgttataataagctgggtgtggcggcccatgcttgaggtctcagtatgggaaggctgaaacaggatggttttgagtgaggccatagagtaagacttgtttaatactcctccgtccccacctctcgagtgcaacagaaccaggaggaatgcttaaagcaacactgccagggatggttgcagaaatcactagggagtcagacccaccaaaatggattcatatggaagccttggatttcttgtgataataagcacatacagtggaaagtaggacctgctatagtgggtaaaatcctcagagccagagaatttacatcttaaaggaagaaaatcaatggtgttctgactgcttacttgtaaaacttcagtcttagacatattgttcttttatatatctgagaaataatggcatatctttaggctgatttatgtatttgttctagtcaatgtgacgttattagacacttttatttactgtggttctcatcaggatatgctgaatggattttaaatctgcccgttttacactgagttttagtaaactttctatattagccttagtgatgatcagtattgccatttctctgcatccactgaggatttaaataaatgcattattagtggagtccttggatgactttatcagtggagattggagaagagtcaataacatgatgatcgttctttcttagtcagatgctgctgcataaggctaattgtattgattgttctttaatggtgttttgtgctgccaaagtcattcttgctggatccagttggtagacccccatcctcatgtggagcccctataaattttgccggcacacagatctagtatagtgtaatgagagagctgctaagagagaaaattgatcacagggttgcagacaaagtggtcagtgttccttctcatgatgcaccagacatctttgctaatatctactttcgttatgtaattttataggagaacattcattgcactgtagtttagctttctctgcatatgcagcaagaaactgatgcacagcagcagagtgggggttttcagtcccctgttcagtgaggggcctctcaggtcacagcacagctcctttgtggtaggttattgtttttccactaaccccgtgctactttccttgacctcttagggatgttctaaaagacaggctactgtatctgttgctgtgagaaaacactccaaataaagcattgtacggaaggctcacatgagagtgttgttcattgtagttggaaagtcttgacgacaggagctcgaggcatctggcttcctagcattcatggtcgggagcagtgagtagtgaatgccatgccggccagctttcccatttctgcagtctgggcctggagcccatggagtgctgttgcctacattcagggctgtcttctcacttgagttatcctaatctaggtattcactcacagataccccagaggcctctgtcctaggcgatgctagatccttcagatcgaccatcagcattgacggttgcaggggttcatatgcgcctgtacaccggttatgttgttgttgttgagacgaggtctcattggattgcccaggctgttgcttacctcttgagctcaagtcatcctccttcctcagactcccagttagctttgactagaggcacacataccaacatgccaggctcaccatttatttttttttaaaggttacatattatttttatttgtgtgtatatacatgagtgtatacatgtgcacagagggtgtcaggggctctgaaggctgagttacagatgatatgcctactgtgggtgctgggacctgaactccagtctttttttttaagaacaatctcttttaaccctgctgcttgctgtctgacctttggtggttctgctaaagctgtgtctgggtcattgtctctagcactagttcttttcaggtgtgttacagcctgctcagcctggaaagagttaaatattggtactcatgttgatttcttagattgactttttgttgttagcaatatggatcagtctactttaatcctttatttttgttacctgtttaatgtaagctggtaatttgttgctttccccttttcaaagcaatggaaataaattttacttgactgtttagagactgtgtttaaagaaggcctgtggaagtcatgagggagatttctcgggacagctttctgttgattgatggttacaaagctgtataggtgacaaaaactcttcttaagttttttgtttaatgagttcagtaggatttctggaatcatttttagagctgtgcttcatagaaatggattctctggccagggtggtggtggtgatacacgcctttaatcccagcattcccagaggcaaaagcaggcagatctcagaccagcctggtctacaaaggtagttctagaacagccagggctacacagagaaaccctgtctcaaaggaaacaaaacaaacaacaacaacaaacaaaaacaaaggaaatgggattctggccagtggtggaagagttgtctgttttcttgcaggtttatggacggtaaagctcagtttgcagctctgagatgcagaaaagagcctgattcttcgacctcatcttctcctttcttaccttgctgtgctgggttctgggcccctcttcctctgtggggtcgatcctccccagaatccttcttcagtcctgcttgccatccgtgccttgtcctctgctcagctgctgcatcttagtgctctctggtgggagccatggggtgggggttacttgtggttttcattagaaatgattcccccatagcagttaaatcatacctttcactcttgatactgtagtatcgactcagtcttgctggaagtgctttgttctgtaatcacagacttcatttccttgagcctcagtttgttcacttgtgaaactgcagcagcagctgtgatgatggtgatggtggtgatggtgatgatggtgatgatggtggtgatgatgatgatggtgatggtgaagaattcagtagtcatagagtcagcctcagagcgccccaaaagattctgggaatgtgggttgataaccagccgactgagtgaagtacaaccatgaacatatcataggtaggagaaaaccattgttccgagagggctgcgggtataaattctgtaatagggggcttgccgaacaggtcaggccctggttctaagtctctcccagtcctgcctcaagaattgctggtttgcttctactgacttccccaacatttaaagtaagtgtaatctttgtgcttactgtgaagggcaatttataagttaatttcaaatcaaacttcaaaattaaaagaaccctcagaaccaacattaattcagttagggtaggctggtatttatttctgaagtaaatagttgcctgtgataactggatggctttagctcaagctgttgggagcacgtccatgtcatgtgccaacgacactgcccccacgctgggctctgttgctctttatttttaccactgtgactgtgttatttgtatgaagtgatttggcctttgcctggcagtgtgctgctgcatggtcagctgcactggctagcatttgcctgctactgcatgtaagcttttattctccaacctccccctcccaactgtataagccaggctagcctcaaattcacagagatctgctgcctttccctcccaagtactgggatcaaaggcttgtaccactaagctcagctgtgtaaggtttatttatagtcagtttcctgtatgtttctttctttgttttttaattgagataaggtctcactatgttgctctggctgtcgtagaactcactgtataaaccaggctggcctcaaactcacagagatccatctgtctctgcctgcctcctgagtgctgggaataaaagatgtgtgccagtatgccaaactataatctcttgtttgcttgtttgttttgcttttcaagacagggtttcccagtggagccctgtctgtcctggaacttgatttatagagcaggctggcctcgaactcagagatccacctgcctctgcctcctgagtgctaagattaaaggtgtataccaccagtgcccagcttatagtcaaattcttaatagctctgaactttattgagttgatcactccaaaatattaatttgttgaatgtttataatttaaaattcactttatatagtgacagcagttccttggcccacctcagatattgagcattggttgtccctgacaggaggtgggtgacttggttgcttcatactgtctcctggctgggttgggagagacttgcactttatgtttataattttggttgctgagaaattgagtcgagcgtctgtcccacttataaggtacaataaagaaagcaccgtgttttgttttgcacaattgaataaggctttgggtttgctttatctggtgccgtgacttgtttccattttgatggtcagtctcaatgtgtacacacgtgtcagcaagtctcaatgtgcacacacatgtcagcaagtagctgggactgggcgtgggggcacacgcacgcctttaaccccagcactcgggaggcagaggcacgtggacttctgagttcgaggccagcctggtctacagagtgagttccaggacagccagggttgtacacagacaaaccctgtcttgaaaaacaacaacaacaaaaaaccacaaacaaacaaacaaacaaacaaacaaaacccaaatagctgggaatgtacggagtgcataattgaatcatttataagagacataggaacaggtgatccttgactatttaatctgtagaaattgaaacattattatggttacagtagctcaagtaagaagacgcaatgcaggaggccaaggagtctatagagagggatgacaaatggcagagaattctagactacttttgttgagaaatcatgtgtcaggaaggtgctgtgcttaaattcttgatgttttcactgagctgtgaggctgaagatcaaacatcctccctctgctgagaacagaaatcaatgcagactccgggctgcgctgttagtaagtggccctcctagcgtttcatttcctgggatttgtctgggctggtgatccgtccatgggagaaggggatttttgaggcgctttgtattaaaatcagctggagaatcccttttggacagttcccttccgcttcactgtgctcttgaacagatttgtgatttccttttgtccatatgtctctgtgtattccttaactagcccaccccttgcttatctttgtcttctgttcttttcagctcttgccttgctgacaaattatttcagtgatagcctttgcaagcaccacacacactggacatatttcattaccctgcaatactgtttaagttataaattcttgcctcatgatgtaaattaaggagaaagccaggctggctagacggggtggtacaggcttgtgttatcagctgcttaaaggctaaggcagaacgactgtaagttcaaggcctggcctggggactaaagaggaatgctgtaataagtaagaagccaggggcttctgaagagcagaagcttgcacaagtgtgcttggccactgcatctcctgagggaacttagaatcctttctctgtaaagggaaatcaaatggcttcaatgttttcaaaatggtagtattgtaatggtcatagtttttggtggaggtaccattgttgccaaaagaaggtgttttttgttttaaccctccaagggcaatgctgagttagagacatttccagcagaaacaggactcaaggccaaggccagtgcagacagagcaaaaagcaagaggtggctacctacgataactgctcagagtttaaagtcttttctctgctctatgtaggagctggctgagtgggaaggtagatgcacaaggaagagcagaaagagaaagaaagcattgaaatgcgcatatccagagcaggggcagtggcctgtgtgcatggcatcttgtctggaatgtgcagcaccgcagggaggccgtggtgtatgggggatctgaggcttccctggacaaggtgaccttagttggctttatgtgaacagtgtaacttgtaaccttgccaggctcatacctagccagtgtcctatgctgcctcacactggaaggttggggatgcccgatgggtctgtctattgctatggtgggtagagaagtgtcttgttgtctcttgtgtgctgtctgtccacatggtccacccccactgcaggttagttgttttctctgccagcctggctttagaatgtgggtgtgttttggttggtggagtcagtcaatgcaggtggaggaatgcagcagactggcccctgtatatcctatcttagtaatttagagtgtacatttaaaatatccaacctgcttttttagactattattttaactgggtagacacatcacccactcacatttacagaggactgagagcaaggcacttgctcagccaggcatccatctatttactacttggatgaagtggcacttcctctgctcgcgcctaaggaaataggattcccttcatggtgtcagagcaagaagttgagttttgtagaagaggacctggaatatttttcatttcattgacttcttgtttgagttataatgtcagagatctgggtaaacaagttttttaaaagtaagcaattgtttttcagaattgcagtgtcagattaaaagtgtacctcattatgaattaaatggttcatttaatggttttaattactgctaggagtagtaggaggtgaatctcagctcactctcccctttagggactcatgccttgtccagtaatgctcgtggtctgtagggctgcagaggttgctgaaattgcagtttccgctgtggtcctgagtgcacttgaacactgccagcattgagtgtctgcactgcttccatggtgtgtcacctggactcagctctctaaggggaattccttcccttactcccactgggtttcttcctggggactgagcccaggatcctgtgtgggctgggcaagtactctactctattgctgaaccagctaaatcacaagtcttcctggttccctcaaagagagggacaggcccgttcagttctctaggttttgtcatattgacttgcatctgacatactgactgaggagcttttgtacctgggtcagttttttctaggccagtctacagtctacagaagtgtagctgtattcctacatgcaggtgcttcctgcccctctagagagaactgccatgttttgtgtagttgtccaggaatgattacacattacctcttgatagatgctttattctcttaaagattgatttttaaaatatttatatgtttttgcttgcatgtatgcttatgtaccatgtgagtacctggtcagagaagtcagagaagctggaattaaagatggttgtgagccatcctgtggatgctgggaattgaacctggatgctttgtaagaacagccagtggtcctaaaggctgctatctttttagcccctctttctccctttttggaatcaaaatttcacaatacaacacaggctgcctttgaacttctaatcccaagtcactttaccaaggttggggctaaactcgtgcagtgttttacttagcctgctttaacattttttttaaagtcattattttatatacatggttgatttgtctctgtgttatatctgtgcaccatatgtgtttctgagtgttggcttccctgcaactgaagttagataaggttgtaagccagtaaaaggtcttaggacccggacccagtcccctagaagagaagccatgttctaaaccactgaggtttctttctaggacagacagatgctttttatacacaggcctggcaggtttttctgtcagatagtaagtgttttgttttgtcttccctgtggtagctgtttgcttttgtcaggtgttccctacacttatgctcaactgtgtgtctttatccagaaggtactgggaaaattggcagatgcccaggaggagctgggacccttgtctacaggccactgagctaatagaaacttgatgatttcctggagtttgcgtcctacctcattgctatttcctattgctcgtgctgctgtaaggattgtgttgtggtttgcacagttagtggagaagtggtttgattctttcctatattgttctgagctgctgagtttgaatgctgcacctacacctacactcatgtctctctctctaacccctttccttttgattacttcataaagtaatcaaaagcagataggtgagatgatccttgcaagaaaccattgtcagcgaccctgggagagtttttgaaacaatagcttttattccttggaggagtttagtgtgtgctgtcggctttttttcttgttaattagcttaaaaatagggaaatatgaaaggtttaatatgcaaagtgtaatatattaataaaggtagttcccttgttttttaatgttctaacaaagtatttattgtagtggaaatatttatgtaatgaaaagagtgcctttctgtttaatcccgaatctcgcaaacagtaactgatttgagaaataccgtagtcctttttgtcacatggaatgtctgacacccatttaggtgagggagattgcttaaagtagtccaccattgtagatgacttttctttttaactagactgctatttaataatttgtctttgtttctcggggaagtgaggatgactctagtagtaaataacttaatggcatagaatgttcagtaatctaatcgatggtggtcattgagactctttttattattattatttttttagaaatctcttgtttatattgaaacacaatagattataattagccatgacaaaattttccagtttttaagaaatactactacttgacagatttatctagaaccagggtagtatttgagattttgggttttttttgtttgtttgttttcagtgttactcatttttaattcagtcactgcattgctggctacattgttttgagcctaaaccctgtgtgcctcattgccactctgttcccagcttctgagagacttggcaagaggatcagagccctaggatttgaggccagcctgggtaatagaaggccccctctaggaaacaaataaataaaataaaaaatcacctgcagtttctgtcttcccatttcctttttaaaaatgcttgctggccttacaaaaagtggcaaactctcagtgtagccattcaatgtcattttggcttccccagctgactgtggtgttctgttgatctttctacccagtggtgtatagactcgtgtcattatgagttcccatctctagcttgcattgtgttttatatatgatcatgatgaggtaatttcaattcactgagaactagattgttcatggaaaggggacccagctggcttcttttttcctaattctaaacggttagctgtgctactgagacaagctgtctcatctgttagggaactggttttcatagctgtcaagtggagataccactcaccctgcttacttctcaggattattctcatgtggaaagaaagctctgtgatgctgtgttttggaaacttcacagtgacaaataatgtaagcgtggtttttagcgttattgtctgttgttccataagataaggtgagcctccgtggagaggcttctgctccctactctggtcttcagcgaggaggtctcattgtggtcacaaatggctactgaggctgtatatgcagcacacccaatccctgaggctactatgactcagatgtggcacacagattgcaccatcaccaatcctctgtgagataaatgcagagatggagagtgggtgatagaaactgttgaagtggtttgatactccttcagggttttaattgtactttgtaaacatatggctctgcagtggactcatagtcactggctgtccacaggcagggagacacagggcagagccttttgatagcttgaccaacactgggctgcttggatgttgagtttggctcttccccagtacggtagaagatctgttactgggaaaaggagaactgtgtagggaactggcactttgattacagcattcagaaccagatcccctaaacatggacctccacccaaatagtaatggccctgggaattattagagatttatttcacgtgaaaaccatacagaaagtgcagagagcagactaaagttgcgtaagagactgtggtatagtttatagaaataggtattttcttttcttttttagaattatttaatgtatgtgagtacactgttgctgtcttcagacacaccagaagagggcatcagatcccattacagatagttgtgagccaccttgtggttgctgggatttgaactctggacctttggaagagcagtcagtgctattcactgctgagccatctctccagcccagaaatgaacattttcatcagattttatatgtctgtttattttaatgacttagaactaaacatttaattttgagctgcattacagtttattctcatgagctaacataagttattttcatgcaggtagtatgtgaaaagatgactttaaagagatttgaaactaagatgaacctcttgtgatctttcatgaaatgtatatagggtggaaatcgttggtggtgattttaaagatgggctcatgagaatgaagtggtactggttatagtggctcatgcttgaaactccagcccctaggagagtaggaggaccaagagtttaatgccagcctaggctacattgtgagataatgtctctaaaataaaaacaaaaccacagtgaagcaagggtcgggtgggaagcttgcctttgccctggtggaactgctgatgtaggtgtctgccccctttcctgcattctctggctagcagagccctagctgatgcttctcagaagcagagttcaggtgaagtgtagggtcagtgcttgcttctgtttatctttttatattttctaaatttctttttgctcacagagatgcaaacacacaggtagatcatttgtgtagttcgtgaatcaactgtctcaggcctttactggctgcctgttcccttgtggtaacagtcctttctttccctacagaattaccaacaccccggtgtagtctagtcctttttttttttaatgtctcatttttgaatgtggctttctaggcaacaggttttttggtcaatgataagtggtccaagtctgttacatataatccgtcaggtctttccctacttgttattgatcatcaaggggtttggccacccgagttttactatttgcattgtgcctccaccctctgcatttcctttatgctggtagctggatccaattataagatagtcttagatttgatctatctaagcagaattatagttagttgtcttagtcagtgttctattgctctgaagagacaccatgaccacgtcagctcttataaactccggtttcagaggtttgatcggttgtggccatggtgggcagcatgtgagcactcagggcagacgtggtgctggagaggtagctgagagtctgcatctgtgctcacaggcagcaggcagaggtgagtgacacctcccccaacaaggccacacttcttatagtgccactctggtgaccaagcattcggacctgcgagcctgtgtagctgatctcattcacacgtcctcattactacactgtatgttcctcaggagccacataatactgattttattgtatttctgtccactgaatccttagaagttacagggttacgagagtctgtttcagtctcgttcattggctggagaggatctgaggcagccagtgctcctgccgccgccattgcttaacccaggcccaccctgtgtgaggactgtctctcccctttattatctgctttccagatgctaccttagtactctgatactaagactggtggattcctgttaatacttggaatcattaatctttagggaagccaggttgacccgtcatagttagtggggccttcttggggttagctcctgagtctttttttatttgaccttggagtttgatagattttctcgactatatgtgaaggtattccatccttgcacatgcctactgcagaaccaaaaactacccttccacgacattttctagtttcttttactgggaaatgatatttcaaaagcattatccagtttgtgttttattgctgttggatatatatttttttaatttctagaccttttgatttatactgaatggtgtgagcatgcgtctgtaacttgaagggcagactagtcaggtgcactgcactgcagtcctgatgatactatacccctcactccaggccaggatgacaggcagagcttgtacctatgtcagctggagtccacctgtgctctcttggttcccaggacaccggtgtcagagttagaacatgtcataatgattgtctttatctcatttcctacagaatattatagagtaataattactaatgttggtactagctcacaaatcttagagctgtaaaataagaggttcagccagttgtggtggtgcacacctgaccctacaaactgtgttttcattagtgcagaacactactgtcaaagtccagtgatgatttcgttttcttacacttgatgatgttagtagagaggatttgagaatgatcatgaacttctgatcttcctgaccgtacagggattatagtgatgcaaaagtactcagcattcaccagagcactttgatggggacggtacagtgtaaataagatggtgtccaactgaattccctttattatcctcaatgctagggttataggattacaccatcatatctgactgctttgtgtcctgtgttagtaacaaaagttgttactattgtttgtgtgtgtttgtgcatgtggccctgtgccaaggcaatgcagatgagagccagaggacagcataacagaggtcagcgaactttcctttttctctttaacctttttcatcttctgtttgttcggttcttgtttctggctttttcatttctaggtgatttttttttcttcatttctgatgtagactctttattctttgagccatctatttgacagtatctttgttttgatacagtttgcttctcttaggatgtctgcatgcatatacgtttccccttgctttcttcagcagcataggtattattctactttttattttagttactgattttaggttattttgggaaacaatcgcactcccccgtagctgagcttataaaactctgctctgtaacattagatttctcttgctccttttttagtgaatttaattttcctaaattttttgaccgatgtggttgagtaatattatttccttttaatttcagaactttcctttgttgttgtattgttgcttaaaacaaacaaataaacaaagccgggaagttgtagcacactcctttaatcgtagaggcaaatgcagaggctggaagattttctaattttgaggccagcctggtgtgcagagtgagttcaaggacatccaggactacacagaaaaccctttgcctcaaaactaaaaccaccgtctccatcaaaccacaaaacagcagtaacgaaagtgctgtcttgactctgattttcaattctttcatccttgacttttactggagcctttttttaaattctgtttttcctgttgttgaaatttctttctatacttacagcttttcccctgcagtggggcctggtgctgacaggggtgtgttgcaggctgctgttagagcccataactgaccagactctttctgctcctttatttagccttacttcgtctaacctgtctgcctggaccaaccttccctcccttcaacacacggttacactgctttgcctgttgggatcttccttagctgtcacattccccagtgctagttttcatttcctcccaggcatgatggttgatgggaatttatcctgtccttgcttatgtgcagagttcatgtaaacatctgagttcatttagttgtgctgtcagcaggcgtttattttgacttactattgatctatttttatatgaggaatgtctacaaactatgctgtccctagagccatcctctcaatatacctggtgtgttagtttttgttgaaatgcctttttatttacccccaggaccacaaatacgaattcctaaatcttacaaactatctctctctcatggctgccagcattcgcgcataaaaccgtcagaggagacctaggtaggaaacacgaggcagagccacacaaagggacattttgtctcactccatagctctcctttactccttgagttccccaagtaccagcccagctcagaccaggtcagataacacacgctgcttcctgtcagatttggcttcatacaaggggccttttttcctagtcctcttttctttgtttcttttttcttccacagatttatttatttatcgtatgtatgtaagtacactgtagctgtcttcagacacaccggaagaggacatcagatcccattacacgtggttgtgagccaccatgtgattgctgggacttgaactcaggatgtgtggaagagccgtcagtgctcttaaccgctgagtcatctctttaggcccctgttttcttaaatagatatccaggatagtataagactggttatgggactacgccatgaccagtgctgacccatggcagcaggtttatgtaaagttttaagtttcctgattgttacagagcaaaacagcaaagcttaagtaggataactttcgagggaatattacattgagccaagggagtagctgtgccagtggatatttgagaaaacatatttttctttcccttaaatatattcgtctgatgtaatattccatcaaacagtagcgcttgaaatttcagttttcaagtatgtgatagtccattgtaaatatcccagcagtctaaggtgtatgtgttggataagtcttacttgttttatgtaaatgtaccaagtattataatactaggacatgatactttctaatataggcagtaccatacaaaatactattaacttgccaaggcaagactttgttttggcacgaggaatagctggaaccaaaaaggctgcttctgtcaccctctgggtcttgggcttctttagggacagggccctcttgtggttcaggctagaggacagtactgcatcataaagaccctgagttagaagcctccaactgtggagacattgtatagtgtctccttccacacatccttcaggacaggcagagaaactaggagcctcctttttagagcttgatttgaaatgcagctacctgccaggtgctgccctctcctgtgccatgagatcccagtttgtttgtttttgcttttttttttttaagatttatttatttattttatgcatgtgagtacactgtcactctcttcagacacaccagaagagggcatcggatctcattacagatggttgtgagccaccatgtggttgctgggaattgaagtcaggacctctggaagagcagtcagtgctcttaaccgccgagccatctctccagaccgagatcccagttttgggggcactgtttattgtacgtccagcaatttctcactgccacgtagaatttgacagctttttttgacatggaccctggggctagacagtgacttcttggccttctctcctggttgtttctccccttactttatagaatatgagtgcttcccatgttagccgtgattgttctgtgtattaattaccggagctggctcttagtgctttcttttgggaaaggaaggacacagagggtcagggtactggtcttgacctgtgtctgggatccgtgtgagacactagtaggtggacagtgcggctgtgcattgtgtggctccggggctgcttcggctgctaatcctgggtcatgcatgagtagcagctctgtgcttcgtggtgctttgattgggggctccaagcaaggggcctaagataggtttctttattctcaagaattaggaaatgaatagattctagactattccctttaaattgtgggcacttacccaaaggcagggactttttccagggctgatacttgacttcttggaaaaagactctccttttacgtgtatttattatttttaatataaaagatcctttactgttttgtattttaacacaaggggcagatgtctcttgctttgaaatgggctttgctgtgtgtcctatctgctgaatgttctttcaacttgggaagctctctttgttaaaaggccaaccctgtggtgagctgttctgggagagagaaccccttgatatttgaaaggtgagaaatccatttaaaccatgtgatggcttccaacagccttgctgctgtgctctgcttgttttaatgtaagtgatagatggtctggctgcttgtgttcagtaattggatgtgaactctgtcatgtaagtgacatttcatggcagtcgtgagggccctgtggatggcattcagtttttgtgttgcctgcctttaggtttaaaggtagaaaactataaagaaatttaatttttggagcatatattcaaagattagttcaatccagttgtgataatacccttagctgttaggtaactggtggtttgtaaggacagcatgtgcaggcatggaagtgctaaacaggctgacgtgaagaggatggccgtcagtcctttgtcagcagtttgctgccacatagtccttttggaaagacataatctgtaatcaaagaggagtttgtggagatagcaagcaggaacagaaaatggtgcaataaactccatgctcctggcttgctctcaggaaggtttcagttacccctgattgtgacctcccagtccccgagcgtgcacacagcctgcctagaagggacagtgtgaacaggctcaggcaacttggttttcttttcaaagcttgttttctaaggtagctttgagtaatacaccataccctgtgagtgactctttacatcccatccttaaagctgctctgctctttacattcacagagcttttagagacgaggttctctgtgaaatgtgataggccatgggtgaggacagggtgcgagcatctttcttgtacaagcagcagagggtgtgttccaactttagacgttttcacagtggtgtgcaggtgcgtgtcctggagaccagaggtcagcgttgggtgtctttagcctgccgcttatctcagtaattgtgggaggctggctggtaggccagttgtctgggatcctcctgtccatcactgacatagttggcacatgctaggaaatgtgactcttcacttgggttctgaggacccaaactcatactcagttttatgcgctaatagaataagggactgctagaaattgtctgccattgactgaacagacagctagattgaaagaagcagcagaaatataccctggtaacgggaaaagagaaaacaaaggcccgtggctgaagctaaacagcctgttttgttttgttttttaaagttaatttgacagccagtgagatgattcagcagcagttagaagcactcagtataagacatgatgacctgagttcactctgcaggattcacttgggaggacagcactgactcccacaagttgtcttttggcacaccatattgtgccatggcacaagtagatgcatatatgcacggcaaaaaatccagttagttttcaacagagataacctgtatacatgctaaaattactaaaaggtagccagacataagtatcctattctaggggctctacttgcccatattatccctccctccctcccttcttccctccctcccttctttctttttcttaagctttatttatttattgtatatgagtgtgccattgctctcctcaggcacaccagaagaggacatcagatcccattacagatggttgtgagccaccatgtggctgctgggaattgaactcaggacctctggaagagcagtcagtgctcttctttaaccactgagccatctctccagccctagatatcagatttttgtagttattttgtgtatgtgcaaaaaatatttttagagggacaggagagctgggttagccattaagagcactcgctgctcttgcagagaggacctggactcagtttccagcactcatatcgggtgactcacagtcaacctataactccaattccaggggatctggcatcgtcttctggcctctgggctttccacatagatggtatatataaacacacatacacatattcaggcaaacactcatacataaaatgaaatatatttaaaaatacttttagaataagttgccatgagtgatattgttggggaggcagccgatgagtgtacttgttattttgatcattgttacccaggtttcctccacaaggctctgtgcatggtgtgtgcctttgggcacggtgtgtgcctctgtggaagtctgcttttctaacatgatctcatctggcaactttgccaacctgaacagcaccgtctctgttggcttatgttttatttatgttttctcagggtttcacttttaaaaggctttattttactgaggtgggggtggggtgggggtggggtgggggttgaataacaaggctatgtagcttcctgtggatgtcagaagagggcatcagaataactttggaattgagtgtgaattataaatagagctttactttttctcaggacttcctgataatcttgacagcatgtactaagtagttgagctatctttatcatgcatgcgtttatcattagaattcatttccccagtcctttatctgactaacaccaatttacacaaaggttgcaagtccaatacaaagaccacttaccttcttaattatttgaggaaaagttgccacatgatgccttatgattctcaagttacaaggggttttccccacatgcacaaataaaaataccttgttacagaatgtgcaaatcaggagttttccccagtcatcactgatgcatcattgctgnnnnnnnnnnnnnnnnnnnnnnnnnnnnnnnnnnnnnnnnnnnnnnnnnnnnnnnnnnnnnnnnnnnnnnnnnnnnnnnnnnnnnnnnnnnnnnnnnnnnnnnnnnnnnnnnnnnnnnnnnnnnnnnnnnnnnnnncctcctcctcctcttcctcctcttcctcctcctcctcctcctcctcctcctcttcctcctcctccgtctcactttgtctttccagtgtggtcttgtctttcctttgaccactcactgcgtcccctgggcctgtctctcttcgttctttgcagactggcactgctcacttggaacagcatctgctaggagaattgcgtgcttgcttgtgtatctttgtgaagttcatccatgttgtatgttgattttctttccttgttgtatcataaggatacgatacaatttgtcctaattctactgatgatgggtatttagacaattgcaaagattccagcatatcttctgcagtgggcgttcagatcagtgacaatacaggctgttggagagtagtcgcggagtattgaatagtagcttcatttgactacttgtcatttgcaaagtgtcatattttttttctttcttcctttctgttttgttttgtttttcaagacaggctttctctgtgtaacagaccctggctgtcctggaactccctttgtagaccaggctggcctcgaactcacgagatcaccctgcttctgcctcccgtgtgctttgattaaaggtgtgtgcagccaagtgtcatatttctttctaacagctgctcaaatgcacgttcttttcatgttcatatgggatacttaccacaatgactgtgttaggtcatagtttccaggatgaatggaatctttgagaggtttcttgaacaagctgagcctcagctgagcaaacaaggcgagacagctgtatttggggttctgattcagtcttcttataggtagagagttttgtgtgacaggtatatccagcccttggcatttggctatgatattgccatctacagagttcttgcttgaaacctatgcaattgagttacaaaaaagaaatgaagaggaaacaatctcatatttaaatcatttatgatctcgttcttggctgcagggccgaggcatcagtttaaatgcttggtcgttatggttacttccatccccctcccccccccacctatgaagcagccaaagctgtctttctagctttttcttccagcctcagaaacttttgagaagactactaattttaaggaatataatagccaaagaaattaaacagcaatgtaaataagtgttgtttgcctggcgtcctgtgcttactaaatggcaggtttcattgctcctgacttttttctttggtccccctgcacttagtgattatctatctgacttagggcccaggagtgggcctgctgctcctgtggaaagcaagctttacaggctctctggacgtccccatccccggctgctgtcactgaccttttctagaacactcagtccctagcaggcgctcgttaaatactgattgtatggtttgatgaaagaatgccttaaaatgaattagcacttatttttgccagttgttttcacttatttctgtaagtaatcttctctggaagtttctagagacatctttacctgacagttggtttgaccttcacctggaatttggtttgtctgaagttgttcctggtggagatggctgcacagcagctccatagaatggtgtgtcctataaatgggaagtgtgtgggagagcggaggatcagggcatcactttctagtaatcttgaaggccagctgtctcagcatggccgtggtggctctgagttgtggctttgtggtaatggaagtggcccccatcttatgtctgggctgataacacaaattcggtgcatgactcaaacttattcagcattacaagtaattttagtttatgtaaattatatctcaataattaaagaatagcctaaaattaaaactggtttttcaaaaatgaggacagtgatttcaaagaaaaaaatcattctaagacattagtgctggaacatgatgaagttttttgacaaaaatccctattttaaaatgtttgtgacacttcgatttctccattgccatccccacccccacacttaaaaaaaagaaaagaaaagaactgaacgttttcccagctctgcttacacttgagtgaatacactaatcgattacccagggattaacaaagccttctcatttcctgcttccatttctcctctgcagcagccagtggccctttgttgtcctacatgtggagtgagataagcttccagggcatgtttgtattagaaaaatggtgtagatggaaaagttatataaatagaccaacaggtattagaggttacagtctttgttttcatttgagtaagtaggaaaaagaaatataattaagacatctaaaacaagaaaaactaatttacataaaatgggaaatgtaatgtttcagtgtttctactgattttctcatttcttaaccagctatttgaattatttatgaccagttaggagtgttagctgtaattagatttctgttattatgtgggcaaactttaacttaaagcagtggcttctaaccctgcaagtcttaaatgcaaatgtttgctctgaaagttattttcccatgttaaccaggcctactatcctgaagcacaattcagaaagcagcagaacaggaggctcagctcttggaaccgggcaatgttgccaggctcctttaaagtcgatgtgactggtggcagggggccaaatgttccagctccagaagaaagtgaaattaaaagtactgttcattttctgaatttggtttgttgaaagtatagtcttgctgaccgcggtggcacacacctttaatctcaaggatcaggaggtagagccaagtggatccctgtgagtttgaggccagggagtttcaggacagccaaagttagttatatagtgagaacctgtctctaaacaaaaccagggctgggaagattgctcagtagttaagcacaccttgctctcccagacctaaattcagttcccagcaccatagcaggtggctcccacttatctgtcattccagttacaaaggcatctgattcccttggcctctgttaatttaaaaattaaccctggggaccggagagatgactcaatggcttccagagtacctgggttcaaatcccagcacccacatggcagctcagaactgtctgtaactccagaatatgatagtcccacacagacatacatgcaggcaaaacaccaacacacattgaaagagagaaggaaggaagaaagaaaagaaaagaggagagggaggagaggaaagagagggagaagagaggaagaaattggggggagggcctcagtaatttttaagattttactcaatgcctgggtatggtggcacttttaatttcagcattcaggaggcagagggaggtggatctctgtgattttgaggccagcatgcctggtctacatagtgagctccaggccagccagagaacctgtatcagaaagactgattccctgggattaagaaacttgaggacataaaacagtgttgaccaatacaaatcttcagaatattttgccatcaaacttaagagtagtctctgagatacatctttagccgtgagttggtcattttagtttttaaaatcatgtgaccctgtgatcatgagatgtcagactcagcttgtataccttctagtgtttccatgccctgcggtcaaggtgtcttcactgttctattgttgtaaagagacaccatgactactttatgtaagagaacatttactcacagtttcagagggttgtccacggcgatagcaggcacggcactggacagtagctgagggggtgctgtgtactgtatcagaggggggcagaggctagacccaaccccagtgacacacctccaagaaggccacacctactaacccttcctaaaccatccacccactgggaaccggaccttccaatgtctgagcctgtgtgtccattctcaggcagaaccccaactctccacctctgctttacaccccgtagctggtgttagggagtcctgtgacttccctctttgttcctctacttgggtgtcaccattactgtcaactgccgctcagttattaataagatggcaaatttaaacttgttaaagcttgagttttgataaaagaagttcttaaaatagtcaagctttggtggaaacttagggaaaccaagcagcttcctactaagttgattgtgaacaaaacattttctctccctgtaatgggagagattctatggatcaaatagaaaatttgtgattatgtttatctggtatgactgtagctcctggagtaaacataatatttatatgggaattactttttagttgcttatcctgtaaaattgagcctcacagcccaaagtttggactttttcaaagcctgtgtttaatttagtacattagtcagtatcttccagagagacagaaccaataagaagtgggtagggcagggtgtggtagggatggctcccaccattatggaagtaatgaggttttaccttgggccccctgcacactggagacctggggaagcgagtagcatagctcagcggctctggggacttgagagtcagaagctgtagatgctgtggagctgaggtcaccaccctctcagctccaggattggcctttgctttgcacttattttgtacaggccttaagctgatgggttcacactgccattgttaaggtcactcactcactggcctccaaaggtacctgtacagacactcacagctgaagtacattgctgtctatcctttagccactcaagataccgcgtattaaccatgccagtcaagaatgctgtgagtggcagatggccttactttgctgtgtttgtctcacatttcaaatctctttgcgtatatgccatccatgtgtctttactattaaggacaacacagccaagcatcatgccatgcacctgcaggcttgcacttggcagtggaaacaggacaaagagttgaagaacagtaagtccagtgatagcctgtgggcacacacccctcgcccaacccagcaaatagccatacctgtctttggtgggttgcttagctctgtggtgtctgacctcctgaccttcatttttgtctgaatctcagatagtgaatgggaaagtctttacttcctactgtgtctttttttcttcagaaatactgcccagggtaccttcatcctggaagtgtctcttcttagttcgggacttagtgaaggtgataaatttatgtgaggtttatgtttgtgttcagttgtatcaatagtaaataaatagtgagcacactgttagaaacacttgatctgctcctggaattaatttattagatttatgtatgtaagtacactgtagctgtcttcagacacacaagagggaatcagattccattacggatggttgtgagccaccatgtggttgctgggatttgaactcaggacctctggaagagcagtcagtattcttaaccgctaagccatctctccagcccatcttagagttcttaaagtgatgaagcccacagctccagagccttgagtctgagaaaaggaaagcctgtgtctgcagaatagcgacagctttcataggaatggacccagttttcccagccagtgagggcggcacggaaagctgaggctgtgtgctatttgcagagttggagcttagggcattgtaacaaggattcagacccagggagtttggtaagccatatgattcctggatttattttttggttttagtttttggtgtttttgagcaagttgttaacttataaagagtaggaatcagaggaggccttcccattattaatgtccagcaacccccagtgtgctgtggcctttgacctgagagctcctgctgcagtagcagtgtcctccagagaagatgtaacccttcggatggtaacactaagtaaagtcagtgaagagacagacacactgtagttgcattttgtgtgttggtcctgttctgtgggagacatacagttataaacatggagagaccctaggaatcgactgaccttccatcccttcactttttctttcatttgactctacctttgttttgctatagttgtggaagtgtttatgtttttgacacaatactgccgccccctggccaatgggcaagactgcatcaggagctctaggaggtttttcagagttacaggtctgcttataagcaagccagagtaggtgttttgtttttgtttttgttgttttgttatatggaatcagtgggcatgtgtgcgtcagttggtaactagtaatgtagaaatagcacatctaactaagtttccagtatatctctggctaggttcagaaaaaaaaaaaaaacaatttacagttgccagtcattgactccaaagagtcttctgatgagttcatgttttcgtgcgtcttacaagtgttgcagaaatgtgtggatgcttatatattggagccgggttgagggagcggctggtcacctgccttcccagctgctctgggaagtactcatcattgtgagcctggaaaggttgctggaggtcagcgccaccccttccacagagctctcgggatctgcagggagaccggctccagcctctccacacaggttcctgacagacgatgggcctttccttaagcagtcacctgctttcaggtgctctctttccattcttacaagttctttaaattattctcattttccaggacaaaacccagaatcttagagcgtggccagagccacacacatggtgtgacattgggggtccatggtgacaggctttcctgtgttgtctagcgaactgtgtcctttgttccacagtgcttgggccaggtttcatgtgatcattctggctgttgttttttgttttgttagtgtttaaaccctaaataaaacagatacaaatcttttaagtctatgtttttcaagtactttgacttcattttgtccacacacacgtagttagcaatgtttaaagacatttttcctgccattgcttagggaaggtgcagcatttaacagtggcaaggggacggagtcatcaggcatgtgtcagcgctgcaaacgtggtgagcttgtgactgtctcagtcatggtcttaagtttctcccctcgggataaaatggaaggacaagtgtttctcgtgggtcttggcagactgagccttctgccaggtgtggtcacgtgttctgttctttggctgctttagctgcgcttgccatgcctggtacatcctacctgtgagtccctttgtctgtggtcatagctgagttaaaaacaaacaaacaaaccccagtggtcagacagcggctagggttcaacaacttctcagcacgaacatggagtgttctgtgctacatgctggtatccgactccatctgtctttctggtctctacttttgctgagaaagcatctctcccatcttccctcaggatacacagctgtgtcatggtctcccacagaagggggctgctcctttctttgaacaatgacttcagcactttttctgtgaccttctcatactgtttgtcatcaatgtttcttctgtagaataaacagtacagactaatgttttttccagtaaacttttcagagtaaaaatatgaatgctaaaacctaaggcctatacatcgtgcctatcctttgtgtgcatggtctgcttaatgtgagcccataggcagtgcccttttcctatagccatgcttgtttaatagttgatgcaaagaatcgtgggttgtgtggtatgtactgtgggacaatactctgcattctcagttatattgacatttaaggcagtttttgcctgcccttgctggtcctgtaatgcagactagattggtcccttcagtaaaccaagatatgtcttcctttattaatgatggtccctggtgtacttcagaattcatctgtcttctttacaaatatgaggcgttttttgagctttggccactatatttgtggccattgagcttctgagaagttagaagctatccagagggacattactgccttacctcaggtagtcatgaaacagaagggctccctgggttgagctgtctcacaacctaacatacaagtagttgactccagactgtaccctgtagccttcaaacagaagaggcaatggccactgtcttagctagtgattgaggagaaaacaaagttaacttttatatgcttagtttctaggacaatgatggacaggagggtctttgttttgttttgtttcttttccagcagtaatgcataagctattctattctgggatcagaggtaaatgaggcaggtcctattgttgtgtgtacattctcatcaccacctactgtgcgtggtgtgcttcatcattttggcatgcagcagtgacttccatacagttctgtggcccacagtgaagggagaatttgagacagtttgtgacaggcaaaccttggaggggaagagactgtcaggtgtctctgggtaagttctttctagcttgttacttttaatatgcctcagtaatgtgctctggctattattatttaccaaaatggttaaggattaaggtagaagtacgttctaatgtagtgatctttattaccattaagggaaaatgtaataatgaattagtcacactgagaagcttcaagacctaggtgtcttgtctctgagatgagcagttgcagggttgcagcagggttccgatctgagggcctggggcctggggcaggggattctgctgttagtcctgttcctgctgcctgcctgtccaccgttgcagggcttttggtcgtaggtatgatgtgcacttgcaggcacctgaaacctgttcctaacgctgttagattttccttttcagagtaagagggaccatctactcatgaacgtcaaatggtactaccgtcagtctgaagtcccagattctgtctatcagcatttggttcaggatcggcataatgaaaacggtacgtgtgcccttgtgatgatgtacttgtaactcatagctttgctaaagttctttttaaaaacatcagttaagtggatattacttctggtataatttctctcaaaagaacttgcaataaagagcatcgctgggtcctctcgcccttgcttttgcattatttttcattttccttaaaaacaaacagtaaaagagaggcctggaggcccagctcattgactactccggagaggattcacgttcagttccccgcgcccacagcagtcagcgcacagcagcctataactgcagtttcaggggatccagtcactgtagcctacatggatgcacagtgcacacaacactcatacatacagatacataatttctaaatctttaagaaaataccaaaacaaaaatattgaggggaaaaacctctaagcacatcgtaatacattttttttaaaaaatagcagtaatataattcttgaagctcctgtgtttgacctagtgatagacagtatttaaaaccctgtgaggttgtgttccttgttttatcggaggcttgtgttactgaatttctctatgtcccaggcagagagggttttcataggaaagctgtccatggactttggaatgtggattcgtagctgcctttcagaataggacagaggcctctggcggccgaccccctccctttcttacggtgctctcattggctccgagcctatgacaagaagcgccatagaaatgtactgcgtgctacagttatgcacaaggatgggagcatttttggaaataggttcttgagaggagcctcatgcttctggagcagtgtgaagcggtttgtgctggcgctctgctttaagaggttgaatttagagaggtgcctagagcaaccttagacagattaagttgtcggctggctctcaagcctgatgactggagctcagtttccaagcccacgtgatggaaagaaagcactgactcccacaagttgtcctctggcctccacacacgttgctgtggaatatgcttgcccgactatgagtacatacacacatacatgcacacacgataaaacaataaaactaagaggtcgtttcctcttaaaaaacaaaaataatttaacaagttactggatatggcaatggacttctctctctttttttccttccttcccttcctcccttcttcctttcctcactccctccctccctccctccttcccttccctatgtgctcaccgagacacttaagtgcacagaaggacttggtgaaagatgtagtgaacagtctgagccgtcagagctgagcgagcacttatgttcctctgccattcctgctccgcatcccctccctgtcggatggatgtactttgatagtaaccaggctgtgttatttgtctttagtaggaggtaaacttgaggataaaattttgtaaaaaatttctccttgttttgggaaactattttaataccttcttagttaattaaccaatttcttttgttggtagactctggaagagagcttgtcatcacagatccagtcatcaagaatcgggaactcttcatttctgattatgttgacacctaccatgctgctgccctaaggtaagaatgcggcaggggagtctggagggcaggggtgactctgctctgatctgtggtcatcattgtggccaggcagacaactcatggtcttggcacgctaacactcctctgtttcctggggttattgaagttccagagattgtctaacaccactttacctctcctatatttcatagtattatttgctaaagtttttgggtgaaataccctgaagttttccagttacctttgtaaaaatcaagcccaagtgctacaaaagatagagggggaaaaacagataaagaaaatgttaaatataagaaaccctaagaaaaaaacagcaatttttaatagctcctcttccagttttcttatgtctgaacatttgtaataaaaagcatgctaaagagtagcggaatgtattgaagatacagactgaggcaggaggggatgtcacatctgattaaaagtgggtgtgcccttctgttctgtcctgtatgctccagagcagagcaggatccgtccccttgtacatgctgtgtctatatgtctggctggtctggggcctcttacatgacataagtctagtagctgtgtgtttgggttttattgttgtgagaggcaccatgattaaagcaacatttaattggggctgacttacagtttatcatggtaggaagcatgatagcatgcaggcagacatggtgcttgagagagccgagagttctacatcttgatctgaaggcagcagaaagagggctatgtatcacactggacgtagtttgagcatatataagacctcaaagccaacttccccaataacacacttcctccaacaaggctaacctgtgtatagtgccactccctctgggccaaatgttcaaagacatgaggctgttggaaccaaacctattcaaatctccacagtagccaacatcacaacaacaaaactcctatttcttccttccttcctcccttttgtttctttttttcattcactcgacagaatttgagttcaataaaagccattgaaacttgctggctttagctgagatgcctttgtccctggcgtggtgctcacctgtcacatgttcagtgatagagccagcggtctcctttgcaaagctgtagagatagatccagttactttaggaaatgaattgttttattttaatttcacttctcaggagttttccacttttttttttctttttaactatttaaagatgtaaaattgaagccgggcgtggtggcgcactcctttaatcccagcacttgggaggcagaggcaggtggatctctgagtttgaggccagcctggtctacaaagtgagttccaggacagccagggctttaaagagaaaccctgtctcaaaaaacaacaacaaaagaatgtaaaattggcctggcagtcttgatgcacgcttctgggtcactctagacttgcagtgctccttctgggtcactctaggcttgcagtgctccttctgggtcactctaggcttgcagtgctccttctgagtcactctaggcttgcagtgctccttctgggtcactctagacttgcagtgctccttctgagtcactctaggcttgcagtgctccttctgggtcactctaggcttgcagtgctccttctgggtcactctagacttccagtgctccttctgggtcactctaggcttgcagtgctccttctgggtcactctagacttgcagtgctctttctgggcatgagaagtcattagccactgccctgtcccaggtatctgagtagaatctttactgactgtaaatcatactgactgttttaatccttttgttatattagcttagaggttgtacaaagggctggagagctggctcagcagttaaagagtactgactgcttttctagaggtcctgagttcaattcccagcaaccacatggtggctcacaaccatctgtaatgagatctgatgctctctcttggtgtgtctgaagacagctacagtgtactcatatacataaaataaatactttttaaaaagaatttttaaaaaatgttataaaaatagtagtaggtctggtacgaaaccttcatctccattttttttcttaaatgatttatttttgagatcgaatgtatcatctcacatccctttccttcctctaagccctcccataagacatttttctactctcttttttcaaattcatgacctttttttcattagttattgtaacataaagatgcatgttataaattcctaagtacgtaagtacaccctgtcctgtctgtatattgtcacttgtatgtatgttttcagggctgaccatttggtattggatagccacagagaagtgtagttctagcctctcattgaggaaaattctccagtttccttttatttggcctaaatgacacatttctcggtgacctggtgactggatgacaagtgctcactgtgttgctctgtggtctggcctcgtaaatcttgttgaaaccctggcgtttgccagcatctgatgcccagtgtgtggctctaatctcattctctgcagtggtatctcggcaaggaaagttttggggtgtttctgtggttaccgtccatcaaacaggatgtggcagaaccctattagtcttcatttattcctttgtcttctccagagtttgggtcctttagcttaaacttctgatgagtgagacgtgatggttgaggcttcagtgtgttctctccgttcctctttttatagctttcccacagggaagggcacttccttttttctcacatgtaaaccagtgctgttactatagataagttcaattttgaaggggacacaaataaaacagttcatgggcacatgaaaggggatcaaatgagtataatggagaaaactagaggacaaaaaaggaaaaagcgaaaggctcatggtgttggctctcagtgccattctttcaaagatcaaaggactccggtacatggagtcctgccgtgtgcagccattgactgggctctgccatcccattcactggtgaggaagctgatgtctatatttttctttcaagctggtgctagagttgggttataaaagagaaggagagctttgtcctttagtcactgtgaatcaaaagaaaaacagaattcctctgtgggttttgctttgtaaattgtgacatcttagcttttccttacccaaaagaaattcgtcctcagtctgggctatattgagcagtgtgtgctgagcaatgcaactgctctgtggcctgctttgggcccttggctttagccacccctatctttacctttctggtaaatttcaagtaggtgcctgtttccttagttcatgacccccactcaccgctgccatcacagaagccagcatttgattggggttatgctgttgcctaggtagcatttttggttgacattgtgacataacagtggaaagtgccagattcaaacaagatgacttcagctgaatcctgctttgacatagctttgtgacagaatcaaatttgctgatttttgagtcatccttttgacacttactctgggtcatgtgacctagcagcggcatcataacttgaacacatatcttttggcctaatgtccactccagcagacatgtggaaagcactcacagaggtctcatataggtcgccttactaatttatgttctttttcagttactgaatttcaataaggtctataaaaattagtgttcaagaaaggaaatcttataatacagttatttgtggtactgatgataatcatccatggattttgtttcttgtcacccagtaggtggcttgattggatattctttggtacagggagctaaacttagccctaggagctgtcggcaaagctccaggcatgcatgagcccacatgctcgactgtctcttgctgttggctcgtgttgctttcccctttaggatgacgctctgtcggtgatgtgtggagtagctgctctctgactgagacttgtgactgggagagtgtgctatgatagtgccctgacgggaggacagtatgggaggtcacaggttgcccttgacttgatggctgggtttcagcttactcactctctgcctcatatttctagtagttacaagggggaaaaaccatagtaaggtagttcaggctgcaggttaccgtcttacctagggagtcatattttagaaaggtggcttagggtagaatttctaaagttcatggcccttgaccaaattattcagagcttctgattttcattatgttcatcctgcattaatttacctccttgttttgctgtgagcagctgccatatttatggtaaaaaaaaaaaattcattacctctgcagagaatcccttaagaagctttatgtttcgcagagttctgtctctttcagcttaagcttcactgttttggacttgaacattcttactgttttgtccacatgcgtcagtgtgcgttggacagcaggtcttgctcttgtctttgtccacacaatgtttagcacctttttgccctgctagcagttaaggtctcttcattctaggttttactgtgggttccaatgttgcttttccatgagagccttgtggtagcctctttacttctctgaaaagatgctgacatgggccatatgactgcagtgagtgtgttaatcagctgatggaggacggccgtgcttggagactttccggtccgcagtctgctttctgtttatcttctggtgactgctgtgctcactgggcgggaattgtgtcccgcacggctttcattagttgtttcctaagcgctgatcttaagcttgtcgacttggaactctgggtaatagtgcacaacctttttctgtatttttgtcacttttaaaaaaaaagatctacttttatgtgcattggtgttttgtctctgtataagagtgtaagatcctctcaaactgaaattgtggacagttgtgagctgcaatgtgggtgctgggaattgaaccggggtcctctggaagagcagccagtgttcttaagtgctgagccatctctccagccttactttgtcacacccttaaaagttgcttgtattttaagttataagacaaaaatgtctatatgattacatttaccatgaaaaacaaaagaatacaagtcctctatgctcagaaatgtaatacttctcttcaaataacttttgatataaggggaagtaaagctaaaacaaaagaagtttgtaaaaatgaaaatgccatatattcttggcctacattttggaaatgatcaaaggaaaatcagttgcactaaatatatgattaaaatttttcttgaagaatttaaagaattatttattttatgtatatgagtatactgtagctgtcttcagacaccccagaagagggtatcagatgcccattacagatggttgtgggctaccatgtggttgctggcatttgaactcaggacctttggaagagcagtcagtgctcttaacccctgagccacctctccagccctaaaaatcatttttaatgaaagaaattctgccaggcatggtggtgctcgtctttcatcccagcactcaggaggcagaagcaggcagatttctgagtccgaggccagcctggtctacaaagtgagttccaggacagccagggctacacagagaaaccctgtctcaaaaaacaaaaccaaaaaagaaaggaaggcaggaagaaaaagaaaggaaggaaggaaggaaggaattaattaattcccagcttataaccgcaaataaacagaaaccaagtctaaagcatgccctggctttgtcctggttgactagagaaggatttaagtcagtcttgttaaggcctctgggtgcaagcaggggcttctgcactgcctggagttaagcgtgttggtcctggccactatgccgatttctgtgtgtattgtcacacctagagaaactgcagtgtaaactacaaacagccacgtcctgaaatacacaagtcataacatcaagatgggattctgaaaatagccatagactctagctggaaactgagaaagtaatttttcaaaacaattctctgctttaacctggtggcctaaaatagaaacgactctctttcgaggtccactgttgtcttgttactgaggaagactatcagcagctctctgctgacatctgctgtgaatcctgtgctccccactcgtgtgatgccttttgctttacatatatgtaaaaagacgactttcccagttgttgatcattaaaggaatcagtttctaggttatgatttttttttatatctctcccttgtgttatggaaggttctgtcctcactgtttgtcctttagatgtgaccttactggactgtcttcgagtgtagcccagagtgtaccaccatctctgcgcgacccactgaaggattactgattctttcctcctggttttaaggacagtttttctgtatatacatcgtgtttgcagtcctcctggctcagccttcctggtgctaggattgtaactatatgctagaaagttctgaatccagatgtttcaaccagatggaaaagatggcagttttctatttaacactcaccccttctcatccatcccactaaacactgggaaatagtaccttgcttttgagacagaccatggtcttgtccaaactctgccgtgaatgtgtgtgtgtgtgtgtgtgtgtgtgtgtgtgtgtgtgtgtgtgtgtgagagtgagacggtacgtgtgcatgctctcgagcgtgcaggaaggtaagtacactgaacatcatgccacttctatcatttgccttgagtttctggtgcctgggcgtggctctacttctgttgatggtcacatctagagatgttgctattctcctgtgatactttatggggcttactgaagcaagcattaaacaaaacaaaaataaaaattgccaatgaagcgtgaacactatatttttatatattctatgcttccctcaccccaccccactccctgtgcctttgtggtttgcaaagtaatttaaacaaatgttctgtgctttgtttttttcctcagagggaagtgtaacatctcccatttttctgacatatttgctgctcgagagtttaaagcccgagtggactcatttttctacatattaggatacaaccctgagacaaggtaagtcagtcacttatggctgcttcctttctccctcacatgtgtgtttgcgtgtgcatttacacgtctgtgcttaagttagatgccaagcagtgactcagcgcttccgggtcagcttgtgcctttgatggttagtgccactcatttgtttgcctttgctttggttaggcaaggaaaggtatggaaaggagggcatagagagtagggagaaggacagaatgccgctgtctgtctgtgctttcagctgacagagcattttcttgatgcagactttgccaagccttccagagtcagtttggaaagttagatacttgttgttcagtttgcttcaggtaatgaaatccagaaacactgacaaagatctggtgagactagggtaggaaatggacagcagcctgttggagccatcttggtaaggtgtacatgtgtaacagaacagttactttctaaagatttatttatttatttcatgtatgtgagcacgctgtcactgtcttcagacacaccaggagagggcatcggatccccattatacatggctgtgagccaccatgtggttgctgggaattgaactcaggatatgtggaagagcagtcagtgcttagaatcgctgagccatctctccagccccagaacaattacttacatgaagggcaatgtggctacatgagatgcacttcaccaccaaagacacacagcctaaagtagaagatgggcctgtgcctggttagccttatctgcagcttgacttcggtcatggcttgtgggcatgcctgtgggggtttgacttggtgactgctccttcatcctgcaggatccagtttactgtggggagcaacggttcctgggcaggtgatcttccactgtataaaaagccagataaagaaagagatagctcagcagccgggcgtggtggcacacgccttaatcccagcacttgggagacagaggcagaggcagatggatttctgagttcgaggccagcctggtctacagagtgagttccaggacgccagggctacacagaaaaaccctgtcttgaaaaaccaaaaaaaaaaaaaaagaatgcttgctgtgctggccatggtggcgcatgcctttaatcccagcactcaagaggcagaggtaggcagatttctgagttcaaggccaacctggtctacagagtgagttctaggacagccagggctacctacacagagaaacccggtcttgaaaaagaaaaacaaaacatttgctgtgcttaccagggactacattcatttctcagcaaccacattgtgcctcacaaccatgtatgacatcttctgcacacacatgcaacacacaaactcacgaaggaaaacacaagtacacataaataaaattaatttaaaagtctatataaatcttttaaaaagacagaaggacaaaaaaagaaaagaaagaaaggaaactagctagctatgtctacatggttctggctgtactactttgtctatgagtgagttccttggtcttgagtggctgnnnnnnnnnnnnnnnnnnnnnnnnnnnnnnnnnnnnnnnnnnnnnnnnnnnnnnnnnnnnnnnnnnnnnnnnnnnnnnnnnnnnnnnnnnnnnnnnnnnnnnnnnnnnnnnnnnnnnnnnnnnnnnnnnnnnnnnnnnnnnnnnnnntcacaacaaaagtggaagcaaaacagctgttagtatgccaagcaactgggagctgaaaaaaagtagggtcagctctgggctgaagacaagcagggttagctctggttccatttgataaaacagaggccaggcccaaattagaagagatgaaggtcactgtgtagtaacaaagggaccaagacattaggggatttttgttgctttgttttttttttttcaagacaggatctcactgtgtagctttggtagttctgcaactcactctgcagacgaggctggtcttgaaatcaaagagctctatctacctccgcctcctgagtgttggattaaaggcatgtgtcacaattccaggctccgctaagagattataagagttgcaaatagatatgtactgaatgtcaaggctaaaataaatactgctacacaaaaaggtccagatagaccaagataaaaatgaaaatgggtgactttgttcatttaggtttttgtttttttgtttttttttttttgaatcaggtttctctgtgtagccctggctgtgctggaacgtgctctttaaaccagcctggccttgaactcaggaatccacctacctctgcctcccatttgctggaattaaaggcctatgctactaccacccagataatagtaggtgatttttaatagctcactctcatcaacaaataggtcatctagatcccctgtcccagtaccaaatcaacaaagaaacttcagaattaaaactgcaccacagagcaaatggactcaacagatgtctatgaaacattccatctgacaacagcgaacaatcgtctcatgagcagaccattatcagaggagtccggacaggggcgagaggggctttggcagcttacagcacttgttcctctcagaggatccagatttgatttccagtccccacataacaccttacaactgtcataactccagtttagagggatcatactgttgccaggcaatcttgggcaggtagcaggcatgcatgtggtatatgcatacatccagacaaaacacttaaacacagaaaataagtcttaaccacttattatttatttacatcccaaatgttccccctccccttcccggttttccctacccttctccttctctgagagggtagggcttccctgggtatctacccaccctggtgcatcaagtctctgccagagtagcctcatccacatttaggctacagctttagggagagcctctgctccaatttttaaaacttaacaaagaaaacctattgatttcttagatttttattaaatcattgtggaataaggttcaaaaactaatagcgaaagaaattgcagaaactgtgggctcaggagatggctcagctaggaaaatgcttgctgtgcaaacgaggatccaagttcagtccccagaacccacgtaaatagaagaatacattctggagcttgctagtcatctagcctagtctagttggcaagttccaggccaatgaaagacactttccacatggaggtggtacacatctttacttccagctctcaggaggcagaagcagactcatctctgtgagttcaagaccagcctggtacacagagtaagttccaggacagccagagctacacagagaaaccctatttcaaaaagagagagagagagagagagagagaagaggaaaaaaaaaaacacagaaacacagtggctgacattgaggtggcatcttctggcttgtgcacacatgtgagcacacacccaagttacacacatactcatgaacaaacagcagatcagtgaagacattagggctgatatttaacaattcttagaagcatctgaaatgcaaatactactgatcaaactgtaaggcagttctaagaagatatgtttagctatgaagggttacattaaaaatcaagagatatgtatgtcactgcccccccaccccaaatctactcaatttattgctttaaaaaatgcagagggtgttggaagtagcatgaagttaatgattgtacttcaaggtcatagctccataggacaaaactaactacccaaaaatcagtacagagaaatgttgtgtctggccagcagctcacatgtgtgggttctagtctggaaaggcatcttggaaacctggaagagaagagggagctaggcgggcaagaaaaagatgtagctaagacaaaattctgatcaaagctcaattttactattccgacactcagttatgaaggagggagaggggcccgattcccgccaaataatcctggggtccagtagcagggtgaccatgtgtatggctctggaacagcaaagtggcaggttccagcagagggcgtggcagaatgattgggtggcaagctccatccagatgtaaacagtggaacctgaacaggcaggtttcaggctggtggaggggaggctacagagaaatagttgagtccatgaaagaaattaatgagatggagactattagtcagggttctctagagtcacagaacttatagatagtctctatatagtataggaatttattgatgacttacagtctgcagtccaattcccaacactggttcagtagtagctgtgaattgaaggccaaggatctagcagttacttaagtcccacacggcaagcaggcgaaagagtgagagcatgactcccttcttccaatgtctccagcagaaggtgtagcccagattaaaggtgtgtgcaccacacctttaatcccagatgaccttggactctgagacctccctgtcttcaagatctccataccaagatccaggtcagaaacttgtatctcccagcctccagattagggtcactggtgagccttccaattctggattgtagttcattccaaatatagtcaagttgacaaccaggaatggccactgcagagacttaactaagaacagtatggtaagtcagtccagagggctggctcagtaaaggtaacttgataaagagacaatttgaaataatacattagagatgaagattgggcattatatcaagtaacagtgacgtcctggggattgttaggaatactttgaatagcctgcattccagaagctggcggacccgaggaagaaatggacagataaatgagatggtacccagtctgcctaactaataccagcgtgccagctcccttacactctgattgagcaataaaagacacgatcatgctcatatataaaacacacatttcaaatcaggaggcggctaagtctggcggctcaggcttgtcatcccagctacctgggggctgaggcaagagggtcagagctcagcatctgcctgtgctgcagaatacatttagaaccagcctgggcaagttggtaagacctccaaggaggagtcaaaatgtagctcagtgtagaatgcttgcaaaggaggttcataggccctataattaatcgtgagaaggggggggggggggcttgaaatataactatccagtatattcatgatacacaccctatgtttgaaatcaaaagctaagttatttcagtttgctaaagaaagcatagtcataaaggtagtaaaaatagatctcttgtatagactactgaaataaagctaagaacagtttaagcaggatctggctcagctcttaaagacacttgctgctcttatagatgacccaggttcagttcccagcatccacaagggcctcacaaccacaacttgagttccaggggatctgacactctcctctagcctgcacagacactgggctagcgtgtgatgcacagaaaaaagaaatcacaaggtattgattgattgattgattgattgattatgccaatgatgagtttaccaagaaagggattcaagaaataacattgtattcacagtagcttttaaaaaattgattgggctgggagcaggagagatggctcagagcactggctgctcttccagaggtcctgagttcaattcccagaaatcacattgtggttcacaaccatctgtaatgggatcccatgccctcttctggtgtgtctgaagacagcaacagtgtattcatataaattaaattaataaatctttcaaataaaattggggtaggtatgtagttcagtggtagggtattaaactagcaacacataggcagtatgttcagtccctaatgccacagtaacaaagaaaacaacacacccccttccctgcacgctaggaatgcacctagtcaaagaagtaaaagacctttacaatggaaaaatgtaacactaccccagggccaggtgtggtggtgcacgcctttaatcctagcacttgggaggcagaggcaggcggatttctgagttcgaggccagcctggtctacaaagtgagttccaggacagccagggctacacagagaaaccctgtctcgaaaaaaacaaaaaacaaacaaacaaatcattaaaaaaaagaacactaccttaggcctggagaactgactcttttaagagcacatgaagctctgccagaggccctgagtcagtgtccagcctctgtaactccagctcctgagggtctgatgtcctcttctggtcttcatggttacccaagcgtacacatagagacacagataaatgacaattaatatgcaaatataatacaattattttttttaaacccactaaagacacttagaagaaaagacctccaatgcttataagaatgcgaaattaattctgtgaacatggctgtattcctaagagcagtctagaaatagttttttttattcccttccattgatattctttatagaactaaataaaggtgatcttaatatttatgtggaagcacaagtatctcaggtaactaacgcagccctgaacagaaagctttaacagctacgggagggagggagggagggattgtgtaccttacttaagcagacccagagccatggaaccacagcagcatagtgctgctcagagactggtctttcccaaagatgcagaacatagacgtggagaagaaagagcctcctcacacaaaaggtgctgctaagactagatagatacccaatgtggagaagggtgagtctaacctgtctctcatatcatacaaaagtcatccagtgcacataaaaattcctgtgtaagacctggagctgagaaggactccagtagctcaataaataatcaaaactgacaactagtgttccatgggataagattcttttgcacagcaaaggaagcagtctcaacagtgggagcagagaacctctgcttagtctacgttttacagggaattactatggagacaaacatcgtgtgctttttttttaatgaaagctagaggtgcagagtgtgggagagagcgatgagtagggggagggacggggtaaggaatgccagagcataatgggaataaaggagacaagtgccacccacccactcattctatcatatgtaaaatctaaagttttccaaatgtataaaggacacaaacgtagcgggcaggaaggacctaaagggagggtacacattggactctagctttgactaatgtaaatctgtttataggtcaaagcaaaagagggagcatgtgggagaaggaagggtccagcaggagaacagagaaaggtagagagggctaacctaggtagagaccagtgatagaccctggagccaggggcaggtagatcttcaaggccggtctggtctatagaatgagttccaggacagacaaggctacacagaaatcctgccttaaaaccatttccccaaaagaaagaaatttcagctcagagatcttggtaaacaaaaccagttaaacctactatgtagtcagccaaaacactagagtctttggttgagctgcaataaatatcttagccacgtctcagttctatgtcttttttatggtcctgatttgtttcagctagtacttcataaccgtttaaccgactgcttcatctttcagttaagagccctaggaaggattctctccttagagcccagcatgcctgccttctagtctcatgctagcactttattttgtgtctatccataaggtattctcttcctgggctttgttttgcatctgtcatgtgaaagtgggcattgtgaactctgaaagtggtgttttgtaacttcttggtaattataggcattgttgcatagcttcattgacaaggtgctccatactttgatctcatggaagatctttgtatagctttggggatgagctacatcagcatttccttggttactatcctgtctgaaaagccttcaacaacatagcacaaagcccagatcttcttatttcagtaacttttgccagaaaacataaacatcttcagatattgaaaaaaaatatttaaaagcctgtaaattcagagctgggttccatatatgaacctgactaggaagtatatctttggttcatagtgtgaggcatttaggtcaggcttgtcgttggtctccagggaagcctgcttgtgaccctaaagtgtcaagaaggagataatataaaaagcagactcatgccagtgatgccccatgtcagaaatatatgtaagaagttttaggagggatgtaccctagtgcaagattgtggaggatggctgcgggtaaactgtctgtgaatgttgagctttgctcttagaaatgacaggacattgaaagaacaattcaccaccaaccaagataaaagaaacagcaagtgccgcagccaccacagtccagtgccagtgtgagcaagtgtggggagaagcagtgtccgtgccagtgtgagcaagtgtggggagaagcagtgtccgtgccagtgtgagcaagtgtgggaagaagcagtgtccagtgccagtgtgagcaagtgtggggagaagcagtgtccagtgccagtgtgagcaagtgtggagagaagcagtgtccagtgccagtgtgagcaagtgtggagagaagcagtgtccagtgccagtgtgagcaagtgtggggagaagcagtgtccagtgccagtgtgagcaagtgtggagagaagcagtgtccagtgccagtgtgagcaagtgtggggagaagcagtgctgagctgtccagggcgcagctctctggagagccagccccacttggagctgttgttttgtttttcaaaatgcagatgagctggaagaaagaggaagtaggtagcctgcttgccttctccctcaggggagctgtcacaagctgcctgtcttagccaacaacaaaatgtcagaaaaacacacacaggggacgatctgccagtcacctgtttacctcttgaggaggaacaagccaggatccctcctggggtcagaagaagacacttgggttgcatgccatcattgtcacccagggcagctaatgagacccaaacaataattttgaaaataagattttcttgagttggagtaactttttatgtaatagtaactttttcctgtgtgtagctattaagttctttcccgtcgtaacgagttagcctcttgtatgtgaaagagtttctttgatgcccggctccatttcagcagctctgcgctgtctaagcgcagcagcaggtctaaggaaatgctcttccgccccgtcgccctgttttcatgtgttgggacaaagggaaactatttcagataaatctgcttatgtgttctctctctgaacttaggaaattttacatttttgagagagcctctgaactttgggtgtcctacctccttgaattcgagggttgcctggcacatgtggtcctcaggatcaaacccagggcttcatgcatgttgggcaagcactcttataactgagtctcaccttcagccctgtgactgaggtgtgctgtatttctgcagaaaatgtgtagattcctcagcttagaactcatgttgtctcacaggatgaacagggctctgcacatggtaccgagcaccatgtcctgctctaagaatctgtaagaactcatgttcttggaaaagattttcgttttttgactccattccatttctgagaaacagttggtcctgtccttttttccaatcttttatgttttgagggaattttgtgatgtttctttaagttataactgagtggtgtaaagatcatttagtttgcaggcgggagtaacctgcgtacctgctatttcataatgataaacagtgctttgtgggaggcgaacgctggatgggtagacaggcttgttctgcagggttttaccagggcctctcttggctgctctgtgggcagggtgactgagtactttggtcctcagtattgctgtagtgagatggacttgttacatggctttagaaatctttcaaaatgagttttaatagatttaggtttatagatagtgttgtgcgagaatgaatcagggcacttgaaatgttttgtttgtttgtttgttggttggttggttggttagttgtttttttgttttgttttgtttttccaagtatgctgaggtgtttatagtggatggtctttaggcatttggggggaggggcatatgcatgcacgttcacttaactgagggggggttagtgtcagccaaccattatggttcatgctaggttagtgctctgctgctgaggttattcccccccccccccatcctcgatctgaaccttgttgctgtttttattgtttcagttcattcttggagacctggctgggctcatattaattaccttagaggatgctgtaatttaatcacttggagatttgggggttctttttgcatgaagtatggcattccttgtgtgctgtattagtgctgtctccattgtggccatacctatgtggctagcttgcttgtttggtctttttgtcaagtgcgttttcaaaaagacatgtgtttagttgcttctcctaagcactgctgctgtttctgcgcttaatttcaggtgcagttatttgtacctgttttcctcgttcttgttctttgttgaaaacatggttatttaaaaacctgacttacttaaaaaatagaaaagacaaaagaaaacttgctgttgtctcctgaggacggacgcttctggcttggcttgtggagttccctggtgttggctgtctggaatcccctttctaaggccccacttccctgcacactagcttggtgtgctcagagaagctgcagagtctgttggctggtctttatttacggaaacagcagggttgagattgattgcgttgtggagagacagtgtgtggatgagggagggtcacagcacatgctcagtcctgtcagagtgagggaagtttcagcgttctgcgtgaaggcttaggtcatagcacaagctcagtgagagagagctctgtgaggtctcagcctgcatgggcctccattttgagtacttagagtagaaaagggcagagttttagcagtaagtagaggtgcagggatccagctagactcacgagagcccgtgttagtcatggatgatccattcagcccctgcaggtaggcgatcttcccctggcctttcgaagacattggctttgctgctcaagctccttctgaagatgtttatgaatcatcttgccattcatagtgcatgtgcctaaagcctttgattctgccagctggccatgcagaggtggcattgcgaagcataaaatcagagctgtgcatggggtctaccaggagatgaattaagcaaatgtacagtgtgaagctttgtgagtctctatccatgtctctacccctttccttcacctcttcctctcttccgtgtgattatagcctgggtttgcccagtgcattttgtagagcttgtctgtcttaaagacctgcagagcagacctgcagactgcctcattagccatgtgccttgtggtgatcgctgggccacaggatggatctgtttggctgttttaggaagggtggtaggtgggcaactattggttgctttgaaggtgggtggaacttgttttgattgagagcctgttcactagagcaaattataattcttgtgaggtgacacatgagggggatagctgtggatgacgattgcaactgtatcatcttagtgtgttttcaaagggaactgtcatatcacatcagcttctcttctgttctttctgaaggagcaaagccttctttttggagtttgtggcaattctctttccagcttggagaggctataaacattgacatctatgttaaaattgagattcacatacttttctttattcttgtatgttagtttttgctgtggtgtatgtgtattttgtgtgatttttttgcattgagtaggaggagagtggaaatggaaagggtttgctgccaaagaaggcagaggtgtggacaaggtcacgtttggtacctgtggcttgatgtctgaccatgaagtagccctctctacccaggtgaagctgttttgttttgtttgtttttacctcttgtttgcagagagagcccaggtaggggctgtgactatggtttactagggagccaatcaggattagcagattttgtgcagtggaattcttactcagacagggaattagagaaatttgggattgccttgctgcctgtcatttcctctcccctttagggttgggaacaatttagacataagtcaggttttgtgcagttgtaaggactatagaaaacactacaagatagaagaatgtgattcatcttctaggggacaggaaagttcactgtgtattgactctaaggaagaagactcataaggtcttagctggagacagggatcttgtctgaagaggcctctgattgggccagggtttagcagtgctgacatttaaaatattcctaaagcattaaatttgtatgcttaattgtagaatttgaactaaagaaacgctatgtagagaagtaaggtggtgctagggtcttagttgatatttctgtgtttgattcccattcctgtgagggccactttcttttatgactgtgcacttctgaacattatgtttggaagtttggggttaatacccagtgtttcccacagtgtataatagtgcttctggaagcagaccatatgcctgaacatttgggagaatgctgacttgtggttgttgttggaaggaccttacttcctcctcctctttagtttgaacgttcagagtctcggtccacctgcttggctgactggctgctcggcttgcacggcgttgtggtacagccacctgctttgatggaagatttggagttcctggctctgctttgtggtgacctctgggtttccgagttgattttacatgcattgaaatcagcaacactgctttctctgtttatgcatttgttctttattctcctgtcttgagaaaatacatttttgggaaagttgcttctgaatgtctgtctcttgtctggggttttgggacatgtctggaggtgaagggtagcatcgcagttattcctggttgctgagggcctctgtgcaggttgatcagtaggtaatgctggccggtttggctcattccccactggctgcacttgggactatcaggaagtaggaggaaacataggaggatggacttcagagagaatggacagttctcagatctttttatttcagtatagaataaagtttactcaggccatggggaggggagttaagatggtagtagaggcagagaaagagagagtagagaaatagaggccggccatgagcacatggaagccatgggtgggggtgtgaggaaggagcaaggggacagagcaggaggaagaagggaagagcaagagaggagcaagagctagactctcgaccatgaatttgagtgaagccgtgcatttcaagtttgtgtgcctacgagtgcagcccatcttgagcagcctggtaccaaaaacacacttgttctaagcctgtgaaagatgttggatgggggaaggtaggaaacaccagctgaaggaagactttagaggcacgagctcatgagtcttcgggaaaagcccacgtggttgataatctttggaatcctaagtttctgatccaggtggcacaggtgcttacatatatgtttaaaatagtgtgcactatcatactgacactcaggcaaactgttatttaactcagctgggctagaggtcatttctgttaacattctttgaaatatacatttatttgtggctatgtgattatcttttctgttgagcaggggtcacttcttcctttaaaaaaaaaaaaacgaattatttcctggctgtcctagaacttgctctgtagaccaggctggcctcagacacatagaggtccacctgcctctgcctcctgagtgctgggattgaagacatgcaccaccactacccagccatttagtcttataacctccattcctagtttaggacttggcaaatggatcaccttgtggggataagagggactgagatagggtttcattatgcagtaccggttgacctagaattcaaagacctacttacctttgccacacaagtgccaccatgcttgacacaaacgaatctttgacataaatatgtttaaatgggtgtagaggcacagacctttaatcttagcatccagaggcaaggaatgaggatttctgtgagtttgcagcaattctggtctacaaagtgaattccaagccagtcagcaatacatagttaggccctatttccaaaaaaaaaacaaaaacaaaaacaaaaacaaaaaaaaacctgcaatcacaaaccaaaatgtgttcagtaaatgattgatgtcgggagtaagagaagtgactagatctgaagccagatggtgttgatatcccacatactcagtggactggaccagctgctcgtgtgctctgagctcggcttccaatgggcctgatctctgtaaagatgatgagaacaatgcagagtgcttgtgtgctgtcatgactccaagtcctcatctccagtttcttgacgatgtgttcagaagcagaacagcattaggaattgtcttggctgtttgtaaccagctgtccacacctgaccagtctacctcctccttgctctttttaaatgcttatctttggtcctcttgaataaaactttttttccctctacttgttggtagctaaatgctcaaccattaagttgtatactctgtcttcattgtattttgagataggatctcactaagttgcctagactggccttaaacttggcaatcctactgtttcacctccttcgtagctgggattgcaatcatatactacctttctaggtcctgaaatttttttttttttttttttttttttttactttttttcttcttttactttatgtttattagtgatttgcccatgtgtgtgtctgtgtaccactagcttgcctggtgcctgaattcaccagaagagggcatttgatccccggaactggaattccagatggtgatgagccaccatatggttgggaggaattgaacctaggtccactagaagagcagttagtgcttttaactgcttagccatctctctagcccctttgtttttaaagaagacctccttctatatctggtaacatttggtgtttctattctttttttgttttgttttgtttttgttgttagtggtggttttttttgagacagggtttctctgtatagccctggctgtcctggaactcactctgtagaccaggctggcctctcagaaatccacctgcctctgcctcccgagtgctgggattaaaggcatgcgccaccacgcccggcggtgtttctattcttaaccttgcccagtatagttacatagatgaggaaggtaattgatgccttttgcctctttgcccaccatattcacagaactacagtaaagagttctcttatgcattggcctggactttaagcgtttcagactcttccagtggggcagagagaccttggaagtgtgctgtggcccttgcttactggctctgtcttctctctctgggagtgctgtcaggcttagtgtgtagtttgatttcagtgcatggaaagtcctgtctttgcttaggagatcaactcaatcctggaggacaactgttacatttggtatgcatatgtacccatatgcacttttgctaagctgtggttgttaaagccatttgtgtttgtacagaagatgaagacagtaaagtccaggaagagcctggaatggggttagagatagatacagttgccaggtgccctgggcagaccactgaatggcaggtaagaaaggaaggcagtgaacaaggtgtcacagcacttgggagcaactccttctcctctgttgtctacattgtcttccttccagctagccagcaaatgctgctgctgcttccttttacagtagcccaactctcccagcttcaggctcagcctcgtgccaccacacccaattctcacattgttttcagcctgtttctctgatatgagatggttttgagtgaaaggtatttatggttcttctcagggtaggtagagtttgttactccgcagctaatgcctagctcttagttctggacactggattatagtctgaagaagcccgtgggagaattgcttctgtaattattgctgtgacttcttgagagggtagagtaagtagcctttacttcctcagacttggctctctcctgcagagctgtacggctgtcacaagcttctcaggagctcactcagaggcgcttacgctgtgcttccagctttgcagcacacctgtgctgactccatgcctgtgggcgtgggctgttctccatactttactgtttttgagtgaaagctggactttgttcctgtttgtcagacctgttctcggattgattttgcttggaagattagccttctgtccccagtgactttctttattaccttggaataaagccagtagttgctgtctatagctaagacacacttgatttagaatattagagttattgttcattcaaaaaatatgtattagtgtccaacctctttagacaccaggaaatgcacatcaaaactacatcaagattctgtctcacttcagtcagagactgtcattaagaaagcaaattaggggtgtggtgagatggctcagtgggtaagagcacccgactgctcttccgaaagtccagagttcaaatcccagcaaccacatggtggctcacaaccatccgtaacgagatctgacgccctcttctggagtgtctgaagatagctacaatgtacttccatataataaataaataaatctttaaaaaaaaaaaaaaagaaagcaaattaggggtgtgggatgggaaagtctctggacagatgggacagtggtcaagtgcactcactgcccttccagaggctctgggacttagttacaactatccataaccctannnnnnnnnnnnnnnnnnnnnnnnnnnnnnnnnnnnnnnnnnnnnnnnnnnnnnnnnnnnnnnnnnnnnnnnnnnnnnnnnnnnnnnnnnnnnnnnnnnnnnnnnnnnnnnnnnnnnnnnnnnnnnnnnnnnnnnnnnnnnnnnnnnnnnnnnnnnnnnnnnnnnnnnnnnnnnnnnnnnnnnnnnnnnnnnnnnnnnnnnnnnnnnnnnnnnnnnnnnnnnnnnnnnnnnnnnnnnnnnnnnnnnnnnnnnnnnnnnnnnnnnnnnnnnnnnnnnnnnnnnnnnnnnnnnnnnnnnnnnnnnnnnnnnnnnnnnnnnnnnnnnnnnnnnnnnnnnnnnnnnnnnnnnnnnnnnnnnnnnnnnnnnnnnnnnnnnnnnnnnnnnnnnnnnnnnnnnnnnnnnnnnnnnnnnnnnnnnnnnnnnnnnnnnnnnnnnnnnnnnnnnnnnnnnnnnnnnnnnnnnnnnnnnnnnnnnnnnnnnnnnnnnnnnnnnnnnnnnnnnnnnnnnnnnnnnnnnnnnnnnnnnnnnnnnnnnnnnnnnnnnnnnnnnnnnnnnnnnnnnnnnnnnnnnnnnnnnnnnnnnnnnnnnnnnnnnnnntagggagctaaaagtaggcttggttcctatcttcacggtggtttttctcttcagtaacaggacagccatttgtatgatctgtgactgttccagaaagtcatgactgatagaggctgcagtgaagtttgcagatttgtcctgttgtaactgatagccatcacattgtgctaagaatagcagtgactgtccagcaggcctctgtctagttcataccatagctgcagccttagttatttgcccttaagagctggagtatatatatatatatatatatatatatatatcatgtccagactacatgtgaaactaaagttgacctgagtcattgtcttgttctggagtgcagagtacttgtactgtgcagcacatatccacagaggctgctccctcttccctttctttgggatgatgaaatgatgctgtccattctcaggccagccctagggtggtgcaggcctgagggaccaagtcaggagaagcctctctgtggctggtggcttccgccttgcctcctggcacagactcttctcccttttagaaattcagatacaagctttctgcctttctgtccactccctgtttacttcttcgactaaactgtttccatggtaacaggttacttttcaaagggaacatcttgtcattttatttaatccactgcagctgaagagagctgaaatattaagttgtagttgctatggatactgctttgttacatcagtttcttttgtatcagttttcatatacaatgagttctcttttctttttcttttgatactacaaaaataaacacaatgacttaccatcatcattgttatttggcttttgcaactggttagttttttatatcctaaccaaagatttgtagaatactagaggttgagagtcagctatttttcaaaacataatttatattagctatacagagaaattatctgtgctaggagggacaatggtaatttttaaatagaatgaacacagatatacatattaagttggatccatagtattttggtgtttcaaatcacagaggttcctaggaagtagaaaatgtaagaagtcagcaggtacaatggagctgacctatgatctttggaaggcaaagccagattgtcagtttgagtccagtatggacttcataggaatacacacacaccctgtctctcactcacagactcaacacacactcatatactcactcgcacacagacacactttctgggatttcttgtcattattttaaattagatgtcttggagtttgttgattgttctggccttttctgagacagtttctctgtgtagccttggctgccctagaactcagagttccacctagctctgcctcctgaatgctgggattaaaggcttttgccaccacctccaaccttggagttagttgactctgcaacagtactggctcagttctttgtatagacctggaggctgtgtctgttactcagcctctctcatgtctgcctttctttcctatttcagtctatttgtagcccatctgttgactttttaaaaaatttagctcctgccttgtagtagtggtacacacctttaatcccagcactcagaaagcagaggcaggtgatctctgagtttgaggccatctggtctacagaaagagattcaggacagccagttctacactgagaaaccctgtctcaaacaaacaaacaaacatagaaccacaagcagaagagcatgcaagtgtggggggaagtttctgcctgcctctgtgtatgtgtgcacgagcgtgcgtgcacgtgccctggagtgctcatgcaagcgcacgagtgcatatctgtgctcctatatcagggtgcaactgttgtctcttccaagctctcagtcccgctgccctttccctaggtagttctatccttccctcccaatcccagcacctacagcctctgagctttctcctggtcaagaaagttacaatgatgttattgtttgtatgtaattgggattctttttaagttttaaaattaactttacacacgtgtaaatcagagttgggactctccttccatcatgttttctaattcatgtcatcaagcttggttgcacgtccctttatcccctgagccattctgtagacccctcacttaaaaaattttttcgggctggtgagatggctccgtgggtaagagcacccgactgctcttccgaaggtccggagttcaaatcccagcaaccacatggtggctcacaaccatctgtaacgagatctgactccctcttctggagtgtctgaagacagctacagtgtgcttacatataataagtaaataaatctttaaaaaatatattttttcaaattactttatgcgtgtgtatggacattccatgatgcataggtggaggctagaggacaagtttccagaattgattttctccttgtatcatgtgacaatccagaagattattaataagtgttcacattgtataccagctttcgtgtgggaacttaaattggcagtagggtggttgccgttccagcaataaagcaaaacagaaaccaaagcattgcacactgtctttaaaatatcaactattattggatcttggtgcagtactagaacaatggtaaacagcgtggcggctctcataggtcttgagtttgaggctaggtattgagatattgcctcagaaagtaatcatagctggcctatctataacttatcatgcagaccatgagagccttgaactcacagctctgcctgcttctcctaaataagtgggatagtaggtagatcgcacaaccattagggaaccataaagtagcagagacattctagaataggccaaagattgagctgtaaattcaagtcaccagagaagctgtggttcaggctttctgaggtacaataggagctccttgcattcagaaagcatttgaaaagtctgtggcaaggctttggcaggctagtttggtcatggctgtctaggaaatagaaatgaacatgttagggtggaaatagtggctatgccaagtgaaaaaagcaagcaggttggtttggtgtggtgatgtacactctagagtcggggcaggcagatctctgagttccaggccagcctcatctacacagtaaattgtagctgagctgagcttacacagagaaaccttgtctcccagaaccaaaaccaaaaccaaaccaagccaagccaagccaagccaagccaagccaagccaagccaagccaagcaggtagttttagaaagttgatgtgacttggtctgttgaattctcaacatggttcttgttctctacataaacctacctgagtagtccaactacaagcttctttctcaaaaaggaaagcagatgcctaccctttcaaaatgagcttcttgtgtgagtgtgtcagcatcataacctttctagtcagtctgcttctggtgagctgttgtagttttatttccccttgaaaatgcccaccttcttccttgccgcctccttcagaggcatccagttcactccaggccgagtgacttggctgtgtgtgccagaggtagggggtacacaggataacaaaacaaaagcaaatgaacaattttgccacctcagcaggtattggttgaactttgggaggtgtacatcttgtttaaaccatagcacattgttgtaacacacaaagttcacactggagagacacgggatggaggcgtaacacagttgtcaagaatgaccatttatgtagggtcatgggcattgttagcctgggctgtatgcagctggttggacattgggaacctggctggtttctttaactctcgtagtatttttgtgaagtttcttctggaatgggatatcttatgtttatgataatggtatctgggtcttttctggttgggggatggatgccacctccctgacaggttcattctaagaatcttagtactggcactacattttttgtgttatttttgctgtcctctcgccctttgtcattgctactgctgacctacctccctgatagcacccccaaatagttctcttggtgagaacgtttgttggagtgtaaaaaaaaagtgagacaggtcctgtagctccgttggtaaagtgcttgcctgccatacatggttcctgagtctggtcttcaggatactgagcgtggtgagacatgccgtggttttgttcattgttcggttggttggtttttgagacttttctctgtgcagtcctggaagtcactctatagatcaatcatgcaaactcacagaggtccacctgcctctgcctcctaagtgagtgctgggattaaaggtctatgtcaccatccctcacacaggtaatctcagcccccaggaaggaaggaaagatcagaagttcagattccccctaatctatatagtgagagcaaggaggatagccagggcttcatggagagctcctgcctcacacaagtgctataggtagaagacagtagaagagactgcagtcagctggagagacggctcagcagttaagagcactggctgctcttccagaggtcccaggttcaattccaaagcacccacgtggtagctcacaatgtctgtagcttcagttccatgtccatctgatgccctcttctgtcctcagaagacaggaggacacacagaagtaaataaacaagtagtaatgacaaataggtgtctcttatctacttgaagtgactttagttcccttgaaaaagagtcttcaaatatttatgccagaacagctgtgttaaccttgtgttctcttcactgcaggcggctgaatagtacccaaggggaaattcgagttggccctagccaccaggtaaaatatcttactaacttaatagctttttagttcctggtttgttttttttttttcagttgcatctttattcttttgaacagcatcttaagaatggttattgatgtggagaattttctatttttaaatccagagttataggttttgtctgtctgtctgtctctctctgtgtgtgtgtctgtctgtctgtgtgtgtgtgtgtgtgtgtgtgtgtgtgtgtgtagccaggtgacactctctacgttgtccttttgagaccattttcactggtcctgtagttaggcggatggccggcaggctgcaccagttccctcgccctgtccctgctacaggtgcagcaggcacgcctggctctttgtgtggttcctgggatctgaagtaaggccttcatgcttatgtagtaaatgtgctctcttcccatcctgaaggttttgattttgttgattttgagacagtgtactgccctgtagccaaaactggctttaagctgtttgtagcagctaggcggtggtgacacaagcctttaatcccagcacttgggaggcagaggcaggcggatttctgagttcgaggccaccctggtttacagagtgagttcgaggacagccagggctgtacagagaaaccctgtctcgaaaacaacaacaaaaccaaaaaaaaaccaaaccagtttgtaacatagactagacttgcacttccaatccctctgcctctgtctcctcagtgcactgcatccagcttcaggggtctttcctcctggccagactaccaagtattaaaacgttaaaagtaaccgtgggaagatgggacgacagataggaagaaagtgaggatggtctggaatgtgtgtgctcagccttcagtttttatggagtgttataatgaagcccatcattttctaccataacctaaaagttcataagaaagaaaaaaaattatatatatttactttctttatatgagtacactgtagctgtctttttgtgtgagtgtagttgtcttcagacacaccagaagagagcttcagatcctgttacagatggttgtgagccaccatgtggttgctaggaattgaactcgggacctctggaagattagacatgttcttaaccactgagcaaaggtttattcatccattgtgtatatgtatttcactgtttctttattcatccattgatgaacattgagttactgtacactttaattcaaagataattcaaagagctggattcttggtgaagaacatatactgctcttccgtaggacccaggttcagttgcctggcatccacatggtggttagcaaccgtctataactctagttctaggggatttgatcccttttctggtttctgtagacaccaggctcacatatgctacatatacatgcatactggtaaagtactcatgcgtatgaaataaaaataagcagcattttattaaaatgaagactgagagtgttgctcagtggtggagcactcctaccaccactaggaagaaggagacatattctaaacactctttccttcagagagtcaagatggctggtcctgttcagctggatcgtggatgagctgtgctctctggcatgcgtttggcgcactaaggttcctctgcttaggcttctggtaccagttaggaagctctgatgggcagcgctctggccactacagatgttcacaccttctgcagagcagtcagtccggcacgctcttctgggagcattgctagcattctcatgcttctagtctgtcctccacaggtgggagctccgttcagtgcttttgacatggacatgtgttgagtcatgtggccattgctaagtcccaggggaaatgggcgtgatgactctggactgtcactttagtgagctgtgtgttggggagatagccagtatgcttggaattaccggtcacagcagtccttgtggctgtaaaggatttaggtgtctcctaattgttctcttgctgctgttgttgtttggttggttggttttggttagcttttcaatatctttatatgccacatacatttattcagaacttattttaactctgatgagagaaaagtaaaaaaaaaaaaaaaatgacatatttatcagaatgcagaaaccaacaaagggatagtgtttctagatgtttctcaatttatagcaaaggcagaaatacacaatatattgcaggacctttaattttggtcttgttcaaggatagtcttcccagagtgggctgttaggtgggagtcctggcaggctcctgatcaggactgcctctggactgtggatttgtcggggtggtgcccacaggcagttatgaggtgcctgaagtgggttctgggaaccaaacttgagccccttgtttgattttaggcggtggatagcttatcaatatgtagcctagatggactctgccttctgagtgctgaaactacaggcatgtactattgtactagacatcatctttgggttgtgttttttttctatttacagttatcatgcatgcgtgcgtgcgtacctgtgtgtgtgcatgtacatgcatgcatgcctgtgaacatcagaggacaacttggaggagcagatttttttttcttgtactgcacaggtcccaaggatcaaactaggttgtcctacttggcaacaggtctctactctgcagctgtgatataaatccaggacccagttcttgcttgtcacactttctctcttctcttccccctgtgctatactttctacacattttctcttccacagtctgtttccagggttgcaggatctacatactagactttgacttaagatttatttactaccctgacagaaacggtgatttctagggtaggatgtgcctaaaaccagaatgaagcaaacttgtttgacttgggtttgtgcactttcatttaagtaaaatgcacattcattatcagatctgaaaaaaaaaatttattttaaagaaaagttttggagtaccaaaatcagattaccttctgtcttaattagggtcttactgttgtgaacagacaccatgaccaaggcaactcttatacggacaacatttaagtgggactggcttataggttcagaggttcagtccattatcaccaaggcaggcacatggcaacatccgagcaggcatagagcaggagaagctgagagttctccatcttcatctgaaggctgctagcagaatactggcttccaggcagctaggatgagggtcttaaagcccacacccacagtgccacacctactccaacaaggccacaccttctaatagtgccattccctgggctaagcatatacaaaccatcacaccttcttaaagtttttagcatttttctagggtagatgataacatatacaaaagtgggaccataagacaatcttccacagtgttactgagctttgcagagttagcaagacttgtttcgtctgttctccctcaggctgcttcctatgtttgatcattgaaatgcatcacaaatccagtattttaattacaaatagtgcaatgataaagaagtcttcttataaaagacaattattatattttacgccaaatcaaatcagtaatatcttggggttgagagctacttgccatttgactggcaaattggctggagcctggagacctagtaatcctgccctacatggtggaaggagagaactgacttctgcatgcaacctgtggggcattgccaccctcaccgacacaagaataaatcagtttaactaaaaacaaacatacacacacacacacacactactcgccctgtaaacatgggaaccagagttcattagaacccataaaactgtcaagtcagtgtgctgttctacctgtgacctcctgcaggagagtagctcagtcataatggcaagctctggtgtgattgagagaccctgtctcaatcaataaaatcaaagagcaattgagtatgatttcctatatcaaccttaggcatctctgcctgttctccaacaaacacacatgcaatcaaatgcaatcaaatgcatacctatagatgcgcatcacgtgtgcaaaagacagtgaaacagtcatttcttcttaaaaatatttgctttcaatgtagagttatatgtgtatacttctgtctttggggactcatgtatgggagtataattgccccaggagatcagaagaggacattgaattcctctggatcttgagttatagttaattgtgaactgcctggtgtgggtgcacaattatatataaggggtgagggaatgcccctgggaaattatgctaagcaacagatctgatgtaaatggactctactggggggtaagggagaagagtaagggcctagagaagggatagaggctgggaagtggacataaagataggcgacaggtacaggtcagggtaaagccatgagggcagagaagaggcgggagtggtgcagagaaggacaaaaaagagagagagtgagaatgctgggtgactgacgcccagtgtagtcaggactcttaactgcagagccatctctccagcccacggacctcgtttcttatcattaaaagccatttccatttcttttgctttgtaccatccggttatatttctagtcccactctccccggggtcggttgtgttccccaactatagtactttctaactaatttaatgtccttttataggcagcccatacctggtgtacttggtggcagcaggtagatccctgggaggagcctagtggaatctcctgtaagccaacattggtaactgaactctgtcctctgcaagaacaatacttgactgttaactgctgaaccaccccaggaaccccaaatgagtcatcttcaacatcttcccacttctccctccctcgttcccctttccctgtaattctgcttttatgtatgtgtaaaactagatatgtaaattcattttgacgcttataatttaaatttaaaactttaaacatgagccaggcgtggtggcacacacctttttaatcccagcacttgggaggcagaggcaggtggatctcctaaaagaaaagacagagaatggatgagaaaggagctctgagccgggcatggtggcgcacacctttaatcccagtacttgggaggcagaggcaggcggatttctgagttccaggccagcctggtctacaaagtgagttccaggacagccagggctatacagagaaaccctgagggctgtgtaggtaaattaatgttttagcattacttgaaacagttccccagcagaacagttgagcctgttcctacgtgctgctcgtcggctttagagactttatgatgttcttcttcccactgttagtctcctccttttacgtcaatggtagataatactcactcactaggcttccttccttttgttgccttcagagctggtctgtcctccaggtttaagccccttccttttccaccctgcataagatagagcatgtctgagctgcctgccctgttttgagtagtgctgcagtgaatggcctgtgcatatcaaggtcacaatgtccttaaaaaggggcctgtagacttcctgatggcattcccctccctagtctttgtgatagaggagagtggagtttgctgttaacctgcgctccttgtttggacttccttccttccttccttccttccttccttccttccttccttccttccttccctccctccctccctccctccctttaatttttaatgatttatttatttatgtatatgagtacactgtaactgtcttcagacataccagaagaaggtatccagccagaagaggggctccaggaatctaacctgggtgctcaggcttgggtggcatcgagtacctgaacctccagcccagtgggttgttttttttttttttttaaagatttatttttatttatatcagtacactgcagctgtcttcagacacatactagaagagggcatcggatcccattacagatggttgtgagccaccatgtggttgctgagaattgaactcagaacctctggaagagcagtcagtgctctcttttcttttcttttcttttcttttcttttcttttcttttcttttcttttcttttcctttcttttcttttcttttcttttttggtttttcgagacagggtttctctgtgtagccctggctgtcctggagctcactttgtagaccaggctggcctcgaactcagagatctgcctgcctctgcctcccaaatactaggattaaaggcgtgtgccaccacgcccagtgtagtcaggactcttaactgcagagccatctctccagcccatggacctcgtttcttatcattaaaagccatttccatttcttttgctttgtaccatccggttatatttctagtctcactctccccagggtcggttgtgttccccaactatagtactttctaactaatttaataaagtaaagagccattattatattgatacaggacctgcttatgcaaagcccagtcataggtggtacctatgaccttctatataggtacccgtcctgttctcatcttaacacagtgtctcactatatattaagtaagattaattttgacatctgtaattgatggggcagagaaactacagagctagaccactcagtgggcagaaaggaagactgattagggatcaaactgccaaggctatgtgggggtagggtgcagagagaaaagcaaagtggtagaaaagctgacagattttatacaacggagtgagaatcggagctggtacaagttgtgtggattgatccagaattcaaggtgcctttgcagaggtagctgagttgggaaaggttaagttaaaggagactccaggggattaatggtggttcctgcttctctagtaaacaggaccagccagccagccaaccagccaaccagccaaccagccagccagccaagactttggagaagatgagagttttataggagtttaagtatatcagggttggccagtggctgcagagcagatatatagcttgtccaccatcagaagcagtgccatgggcacatttcgtatgtgaaattgcagtcatcttccatactttcctgtgtcatagatgatgtcatagggtagcagcactgaggaacaaacttagaactaccttaaaacttgaatatctgggctggcgagatggctcagcgggtaagagcactgactgcttttctgaaggtcctgagttcaattcctagcacccacatggtggctcacaaccacccataatgagatcttactccctattccggtgtgtctgaagacagctacagtgtacttatttataataataaataaatctttgggccggagcaagcatggactgagcgagcagggtcaaccagagtgaacagaggtcctaaattcaattcccaacaaccagattaaggttcacaaccatttgtacagctacagcgtactcatatacataaaataaataaataactctttaaaaccaaaaaacccaaaaacctgactatccagcattcagaaatagaagccatcattaaaagtgaagatcaccaggtggggagtgagggagacagtttctgtgaaataagggcatcccctggatggggtagtcctgttcctgtctttgctttaccctctacatgcacattgactgataagcagcccgcctaatgagattggcatatggagttttgtctcttgtatgtgatagactatttcaaattaaatatctgtccctttgcatttccagtgtttgcttctaccctcgtctgttttgttttttttttttcacgtaaactctatatgagcgagggctttttaacttcagcatagtataaaatatcaaagcaacgtgcccatgcttctcatttgctgggacaagaatgttgggtaactagcaggtgtgtggcctttcccaggcagttatgttagatggttatggcagccatcgtccctgcctgctctgctttagcagggcgaaggccaaagacctgattacttagaatctggttagtcatcacttcggttctcacttggaatatttgtgttacatctgatgcgttgttttgttttgttggttttttgagacagggtttctctgtgtagccctggctgtcctggaactcactttgtagaccaggctggcctcgaactcagaaatccacctgcctctgcttcccaagtgctgggattaaaggcgtgtgccaccactgcctggctgatgggttgttcttatgtgtactattcaatttgctttgtggagtcagagcaagtcacagacagtcctttccgtccagagagctccatcctgtttcttggtaagcagctctcttattcccggccatgctgtttctaccatttaagttaaaactaactgtttttagtgttcacttcagcagctctctccgttttaaccatcacatgttcgccttaggtgcagtcctgtgagtcactgtgtgtctgacttgtgagtgtgttttggagatgtgtgtcttgttctttttcagagctgtcactgggtgatacattggggtctgtttgttccattgtgtgttggattctttcacatttcataatattctttcataatactgtcggctttgagcctctcactgctccttcagtggagtcttagattcacgtttactcttgcctttctgctgcccaaggaaagaggctcacaaggtgtaccagtgtacctgctccagaagatgcctctgcaataactctttccagcagcctaccttgatggtgacttctccatccctgtcttacaggccaaacttccagatctgcaaccatttccttctccagatggtgatactgtgactcagcatgaggaacttgtctggatgcctggagtcagtgactgtgacctcctcatgtacttgagggcagcaaggtaatgggaaattagccccaatgtttctgaattaggacaccccgactgatgggcgtctgtaaaatctttccctccatataggtagtgggccttttctctctgagcagtgctctctgcactagtgagccttcctacctcacacaaatagctttcctctttttgcatttgctacacataagacttagcaatcctcaggaggagcctcttgagccatacatttgagactattagcaccctcactgcagttcagagctgtttacctcacttgacagttcctttgctgagtttctgttctcctcattagtgtttgaccccagcttgacatttgtgtgacttccctacacaagaacatttatctgtgagtatcccatagaacttgcatacatgcaaatgacagagaggaagaagagaaacgtgagtccctttatgccgtagcaggcagcacttacctttgtggtgatgtgggggtactccctgcagcctcaccagtgtgcagtagcaaaaactgaagtgcatagcttggggctgctgatccatcttggctgtgtgcagttcacagtgctgcacagtggtgcagagaggaggcagtgtaaatgaagtaggtggctgcctgttcttgtctcttcactgttagttcattgaaaggcagttggtatgtagatgagaattaatttcacctattttctagggacttcaaagttttaaattaataccgagtaatagtacatatgggtactttaaaaatatcacaatcagtagagtactgtgagaaacaggtttttcatgtgcttaggtttgaaacataagtatgcacaagagaaagaacatggacccgacgcgagttacacttttgtcccaggctgaagactggcctaatgtacatgcattaatagaatcttccagaaaatgtacatgcaaagtaaggattaaaaatcatcgtgtagtcggatattgatcaaggaaactccattcttttccccaaaggagcatggcagcatttgcagggatgtgtgatggaggctccacagaggatggctgtgttgcagcatctcgggatgacaccactctcaatgcactgaacacagtaagtctccggatgtcattttagagagcacaagagaaacatgcagcaaggtgtggcaaagctatagggtactgtggtgttgctaggaaacagaaatgatgctggttctgcagttcagagtgcttgttgtactcacacatgagctgactttgaaaatccctcctgcaccttcctcccccatgacataccctcatatacataacttacataaatagacttaattcaagatgaacagaagcattgtggaggctggtgaggtggctcagcacttaggagcactgatgctcttgcagagaagctgtgcttagttcccagcactggcgtggcttcttacagctgcccataaccttagttccaggaggagccaaagcccctcctctgatttgacatgacatctgtgtgctcctgcatacacatggtatacattcatacacttgggttgcatgtacacacacacacacacacacacacacacacacacacacacttacccaaaaaaacctgaaaaaacaaaaaatattgtagcctagccactggtccctgagattgtagggaaaggcattataactccaggtctgtatcttaatctgtctgacctctgggattgtgagatgcttcaaatgagttcctagtaataaatgtctttactgaaacctcgttcatttgggtcctgggtacacagatgatcttaggttatcttcacaatgcccactaaaggagattctgctattgttaccttaaaaaataaaataagccaagtgtagtggcagacagcaacagtgggagttggaggcagaggaaggcagatctctaagttagagagcagcctgatctacaaaccaagtcccaagacagccatggttacacagagaaaccctgtcacaaaaacaaacaaacctttatctattttgtgaggaaggaacagcatgccacttttggagttgtggaggtcagagaacatcctacaagagtcatttctctacttccaccgtgtggtttctgggattaagaactcagattggcaggtcgtggcggcactttcctttaatcttggcactgaggaggcagaggcaggcggatctcaagtctgaggccagcctggtctacagacagcctggctacacagagaaaccctgtttctgaaaaactcacaccacacacatacacacataccaccaccaccaccaccaccaccaccaccaacaacaacaacaaccacaaaacccacagattattgggcttggtggcacgttctcttagctgtgctccctgagcagacattgaatgccacccatagcggtgttactcaccttttgtttttaaagaattatttatttattttatgtgtaggagtacacagtagctgtcttcagacacaccagaagagggcgtcagatcccattacagatggttgtgagccaccatatggttgctgggatttgaactcaggatctctggaagagcagtcagtgctcttaactgctaagccatatctctagccctaggggttttttttgtttttgtttttttttttattaaagacttatgaaataattctgctttcatgattatacttaggatttaagatttgaattctgaagctagaaatgtgattaatgtcccctcctggcatgttcgaggtctcactcctagccctcaggattctcctgagtatgggttactgagtagttctggtagttttctgctttgtgaggagtggggtggggagcatggtagcctgcaggcagacatagtgctggaggaggagctcagagttatatatatatatatatatatatatatatatatatatatatatatatatatatgtatatatatatgtatatgtatatgtatattaaatttattttatgtatgtgattacattgtagctgtcttcagacacaccagaagaaggcatcagctcccattatagatggttatgagccaccatgtggttgctgggaattgaactcagaacctctggaagagcagtcttaactgctaagccatctctccagccctcaagttctgtatcttgatctgtaggcaacaggagcctgtgtgtcacactgggtgtaacttgagttataccagctcaaaagtgacatactttctccaacaaggccatacctactccaataaggccacatctcctaaaggtgccactgcctctgagccaagcatttaaacacaggaatctattcctattcaaaccagcacacaaagcttctccctgtagccctgactgtcctggaacttcctctgtagagcaagctggccttgaactcggagatttcctgcctttgcctctacttccagagtgctgggattaaagacgggcaattaatacctgtttcttatctgtgcttcctcaaattctcttggaattttcctcttctaagattttagtagtgagtcatgaaagactcagtgttgattttcttggttggtcgttttgtagctgatgaggtcatcacacactggctgtcttgttttgataggctgagagacattgccttcaaatggtaatcagctgttcattaatagaattaatctttctcagtcctgttatctcagttcatttgttaatattttgcctgttgtttgtttgtagtttttcaagatcatttttctctgtgtagccctgcctgtcctagaactcggatctgtagacaaggctgccacctgcctctgcctcccgagtgctgagattaagtgtataccccaccactgcccagttctgttaatattttccttaaagaacttcgtatatgggtccttgatggggtgttgacagatagtcttcatttttgtgtaattagtgaatctttaaaagtttttcttattgctaaacattgtaaagagatcagaatctgaatatttatttatgaattgttttaaaaagaacaagggccaccagcttgcagagcagtgccaggaggcagcactgggtgccacatgcctgagaccatggttggaggcaaagctgcaaaagacagtgggaaggctaaggcagtgtctttctcacatagaaagttatagtttcctatgggctgcgtccacagacacttgaagccatggacgagtgggtgcagttctggagtgcctcaccccccgctcaggcgcttctaaagatctcaaagtagtgcagtactccgagacacttgcagcttacaattccaggtgatgaagagttggattcacttatcaaggctaccatagccaggggcagtgtgatctcttgattggaacaaagggacagcagaaaactgcgtaggaagtaaccaatttctccccactgtctggaactgcatgtgtgggacagcagagacgagctgtagacaaggaaagacacatttgcatgtttttagactctcaaagcttgagaagtccatttccctgtggtcacagtcatgcattgattggccaggtttctccctgtgttttatacaaaaatggaattgataaaacatttttttacaaaattaaaaaacaaaaattaagtagggcctgtgatctgcctcagtgggtgaaggcatttcctgccaagtctcatgacttcagtttggttcttgaaacgcacaggtcgaaggagagaatatgctgcttctgtaaggggaaggatactgacgtccaggcgtccgtgcaggcatgtgtgtgtgtgtgtgtgtgtgtgtgtgtgtgtgtgtgtgtgtgtaggatactgacgtccaggcgtccgtgcaggcatgtgtgtgtgtgtgtgtgtgtgtgtgtgtgtgtgtgtgtgtgtgtaaggggaaggatactgacgtcccaggtgttcgtgcaggcatgtgtgtgtgtgtgtaaggggaaggatactgacgtccaggcgtctgtgcaggcatgtgtgtgtgtgtgtaaggggaaggatactgacgtccaggcgtccgtgcaggcatgtgtgtgtgtgtgtgtggaaggggaaggatactgacgtccaggcgtctgtgcaggcatgtgtgtgtgtggaaggggaaggatattgacctccaggcgtccgtgcaggcatgtgtgtgtgtgtgtaaggggaaggatactgacgtccaggcatctgtgcaggcatgtgtgtgtgtgtggaaggggaaggatactgacgtccaggcatctgtgcaggcatgtgtgtgtgtgtgtggaaggggaaggatactgacgtccaggcatctgtgcaggcatgtgtgtgtaaggggaaggatactgacgtccaggcgttcgtgcaggcatgtgtgtgtaaggggaaggatactgacgtccaggcgtccgtgcaggcatgtgtgtgtaaggggaaggatactgacgtccaggcgtccgtgcaggcatgtgtgtgtaaggggaacaatactgacatccaggcatctgtttagccatatgtgctgacatatgtatgatacacagatgtactcttgcgtgcacagtaagtaaagaaaagttaatgtttttaattttaattttttggggattgaagagacagacttagcacttgctgctcttctggaacaccggctttcagttcccaatagccatactgggcagttcccagagcacagttcctggggatccgatgtcctcttcttttaaaataataataaaccagtttaaagaataaaattatagagacagatctatcaaagtttatcttcatgttggtcagttttggtactatgtaagtctatgttttgaaccattttgtcttatttttctctagtttattgagtttagatgttaatgtctacagacttactaattgccggcctttcagtctttcctaagagctcggttttcttttctctgcatcgctctctgtaagtggagattcttcagagttgctcttttgagcagtaggtttgttctgtttgctctcccctgaacttgttcccttctacctggacgtccagatccctgtatttccaccctccacaatttggtgataaataactgttcttatcacagatttctttttcttctgctgctttcactttcatttccttgcttttacaaaattatttttaccttttttttttttttttgtaattttcttttgtggtttctcagccttggctgtccttgaactcatagaggttccccatccccctccctctcccgtctctgctatctctgcctcctgaatgctgggattaagggcaagctccaccactgcctgtctcatctttctaaatttcattttttggaatgttagtgatatttaattttgtgccagtcagagagtaattggtaagatttcagtcttatttccttgaggattcttctcattattttaaattctgtgtttagtgtctgtgtgtaggtatgtacatgtgagtacagctatcctaagaggccaggggacttgggtcctctggggatggacttcagcgtggtttgcagccacatgacgtactcgggtcctctgtaagagcagtatgggttcttatccagcaagctatccctctagttccaaaatttcaatcatttgcagtttgtttactggcttggcatttgatttatattgggtaaaatgcctcatatatttttagcgtgtgtgtgtgtgtgtgtgtgtgtgtgtaagaaagagagatggctttaaaattgcagggcagtggtctggaggtattgttcagtgggaaaaggcccttgccaccaaacctggtgacctggggtttgtcctcccaactgatctgtcttagaaccaacaagtacataattgttggtacagtatgaaaggcccgaataatagtcactattttaacatttttaatgctactgttagcgccttgctagaccctgtccatttgtgcagtggttttgaggttgtggtttgggtttgtggacctttgtagtacttgcgtgtattcactcttacacctttgagagaggggagagctctttgtacctagtaataacctttgtcttgctgcctcttgtgtctgatttcatctgggctcttcagctttctcatctttgctgcctccagctttctctagcttcttattttgaatcttgtctctgattgaagtagctcacttgtccttttgtgctttgttgttgtcttgcgctctgctctgacagtatctatggaactcagtctttttgtttgcttattggctgatttcttttgcatgttaaggcagagttccactgcacatccccatctgctctgcagttgtctaggctgcctgtgctagcctcttatctcagtcacccaaacgttgcattcgaggtgtgagtcaccacatgctgcatataacaactttgaactgtgagctctgtgaattcagggttgctaagctactaagacctttggaagtgtttctgtgacctaggtagtgttagcttgtgtgtggatgtgtgacatttgatgccataaagcatagaagcaccttcttatcctgatgagtttgattcagccatctctgctgctgccctttacaaaagagaacatctgccatgctgaattatttttactaaagcgatactatgcggctccattttcttcctttaagaaaataaacttcttctaagtaattggttgccatttttatgtttaccttttcttccagcactcagcatctgttttggtttatacttgatataagtaaaagtttacaatcatgcagcagagatcacacctctgcctagacagcgttagtctctgaaatgtggctggctgttagatatgtggatgaagctttttacatagtcaagagagcgtgtgtttgcttgtttcttcatgcacacccacatctccaacaaaagactaaaagctcccattgtctgagtgatcactaaattagtctgttagatagttaacaacaatttgttcactgtcagttattgatcccactgttttctgagtcctgccctgcttccgggcaggtggtggagaaaggctgaatgtcccctgtctggttggataaacaaacccagctccaggctctgtcagagctgatcgtggagaactttgcagaatccaccgaggagctcaccgaaaagactccctcacctcatttgcccctttgtagtctgaaaaatacatctttagaattttccttagagattttctattcttttatcttataaaattactgcattggcatctcccagcctgtattgttagcttcgcagtgctttcgagtatttagggggtatctaatatttaagttaggtttttacttctgtgaacagacaccttgaccaaagcaactttttactttttggtttttcgagacagggtttctttgtgtagccctggctgtcctggaactcactctgtagaccaggctatcctggaactcaaaaatccgcctgcctctgctcccaagtgctgggattaaaagtgtacaccgccactgcccggctaaggcaactcttataaggacaacttttatttggggctggtttacggattcagaagttcggtctatcatcatcaaggcaggaacgtggcagtgtccgtggggctggaggagctaagaattccacctcttgttctgaagatagctagcagaagactggcttccaagtagctaggatggaggtcataaagctcaagcccacagtgacacacccactccaacaaggccacacttccagatagtgccactccctatgccaagtgtattcaaaccacctcaaggggtgtggcgatttctagttccaaataaggtactacagaggcccctctgtgacgctgtgcgcacagctccttctcacttgatttcatgggtgttcactagtaagtagtactgctttagtacacaaggcaacagtaagtggttactctttgctaacctgggttaaagcaggattttggggtgaaggagtgctttgttgttgaaaaggctaatggaaaaaattaacatgctgtctgttcattatgcagatccaataaacttcagggtagtagctcatatagatcaatcctgacgagcctttatgcagcaacagagtatcagtgtgtgcaggactgtactctgtctggtctctgctttgaagagggtgtggacagagcttgtagtcaggggtttgttgtataaccaaaatcttctcagctggttgtcagcgcagcagtgcgcacaattcagcctctttcataggttgtgcttagaccacttgggaagttgtaaaaatgaagtgaatggaaatttactattgccaggcagtggtggcgcatgcctttaatcccagcacttgggaggcagaggcaggcagatttctgagttcgatgccagcctggtctacaaactaagttccaggacagccagggctacacagagaaaccctgagaagggctggagagatggctcagccgttaagagcactgactgctcttctgaatgtcctgagttcaattcccagcaaccacatggtggctcaaaaccatctgtaatgggatctgatgccctcttctggtgtgtctgaagacagcgacagtgtacttatatataattaataaacaaacaaacaaacaaacaaatctttaagaaaaaaaagaaatttactattttggtcaggcaaggtggtacacatgcagaggcagaaagatttttgaggccagattggagtgagacccaatcattaaaacttaaacaaaggaataaatgggaagaaagatatttactaacatagctacctttgtagtcagacttagttctaaagttccatgtaaagacattttaacataaattatatctttcactcctggtctcatttaaataagggtagattttagcttttaattttttaatattttgttccttatttggcaggctgtagctttacttagttggactggtttctctggtgtggatgggaggagcattaatactagtgataacatgtttgccttgtgttttttaatctctgtcacatggaagtctcgctccttgcatgggtccccacagtctaggccccagctctgcttttccatgtgaaccaccctcaagtgtttttttacccctttctttgtagggccctggaaggttagtaggtatttgtattctgttgctatgaacagacaccatgaccacagaaactttttgttgttattgattttaagatttatttattttttcttaatttttttattatttacatgcattttaaacatcaaacattaataatgttgagtattttgagaatcaaataatacattaaaaatgtgtccaacttttatattcatatcctttcatgacctaaaaatatcattaatgaatatttaatactctccatagctaagggtcctgtatctaatgttccgtactaaattgtttcaaaccatacagaatattctttgggggttaagcatagtaaaagagtataaaatattaaaaatgaatcattaagaaatatattcaagggctggtgagatggctcagtgggtaagagcacccgactgctcttccgaaggtttgaagttcaaatcccagcaaccacatggtggctcacaaccatctgtaacaagatctgactccctcttctggagtgtctgaagacagctacagtgtacttacatataataaataaatgaatctttaaaaaagaaaaaagaaatatattcaaaagcccattctgcctttatatgttacttgacctttttcccttactgtttttaatattctttctttgcttagtgcatttggtgttttgattattatgtgatggtaggaatttcttttccggtctagtctatttggagttctgtaggcttcttgtatgttcatgggcatctctttctttaggttagggaagttttcttctataattttgttgaaaatatttactggccctttaagttgggaatcttcactctcttctatacctattatccttaggtttggtcttctcattgcagcctggattttttgaatgatttgggttaggagctgtttgctttttgagttttctttgagtgttgtgttagtgttttctatggtatcttctgcacctgagagtctctgttctgtctctctcgtattctgttggtgatgcttgcatctatgactcctgacctctttcctaggttctctatctccagagttgtcaccctttatgatttctttattgtttttacttccaattttagatcctgcacggttttgttcatttcctttgcttgtttgattgtgttttcctataattctttaagggatttttgtgttgcctctttaatggcttcaaagtcctctatcaccatcatgagaagtgattttagatctgaatcttgcttttccagtgtgttggggtatccaagacttgctatggtgggagaattgggttctgatgatgccacgtaaccttggtttctgttgcttatgttcttacacttgcctcttgccatctgattatctctagtgctacctgccctcactatatctgatgagcctgtcctttgtgtgatcctcgttgtgtcagaactcaagagttcagctgtctcagtgatcctgtgatcctgagatcctgggtgtgtccgagaccctgggaatcaagctgcctttgggaccctgagatcctggtgtgaccaagctcctgggatcctgggatcctgtggtcctgggtgtgttatagctcctgagagtagaactccctttgggtgttgtgggaccagctgcagagatggctcagcagttaagagctgcatgttcttccagaggtcctgagttcaattcccagcaaccacatggtggctcacaaccatctgtattgggatctgattccctcttctggtgtgtctgaagacagctacagtgtactcctatacataaaataattcttttatttaaaaaaaaaaaaaagaggtgtgcagtttgacccaggtggtggtggcccacacctttcatcccagcattcaagagacagaaggatctctgagttcagggacagccagggctacatagagacaccctgtcttgaaaaaaaacataacaaaatgatgtgcagtttgcttctgatgtatttaagattcaggcggctactgccactatcaactttagagtattttttatcgccccataaaggagcgctgcctccattaactgtcactctctatgtcccccagctccttcagtcctggacaaccactcactgctttctgtcgctgtggatttgtctgttgagatcacttcaggtcgatttgcttgtacaataatcagctgtttgaactagtttctttcactgagaatactgtcttctattcatgcgtacataataaatgttgtcttaacagagcaccttccctaaaacagctctgataaggagtgactcccaaggtcaccccagagggtccccaaggttctcctgtgaatctgttctgagcacattcttttatgttttcagcctttgcttagtctctctttgtctaccgtcctttgttaacacttcggcttctctgtcctgcccagagcattgccactgaaatttaaaagttggtctttttttttttttaagatttgtgtgagcatgggtgtacacgtgtacacaagtgccctgtgcaccggtggaagtcatcgaacaacttgcagaagtcagttctcctactgcatggatcttggggatcagactcaggctgtcaggcgccctgcaagctatgccatcagccgagtgggacatggaactttttaagtttatagttattattttcattttattaggtattaattgttggttaactatctgacattaattgttgatatcaaatttttgggctcattgatttcttttttgtttgctaaacagagttactctgtatagccctggctgtcctggaactcatgctgtagaccaggctggcctggaactcagagatccactgcacagttgctcgctgatttctttcttacatgctaggcaaaatttgtgtttatgaattagcaaatttaatcttcatagttctttaaagtgtggtatcatctacaaaataataaacacacctgtttcttatgtataatcatttaaacttggggtaggtagaatagaggctggaatcttactcccagaatatctgatggatcagtcattgtgtcctgcctctgtcctatctcagatggtgaggcatcctgaggtgggaggataacaaggaggttgaggcccacaaagcatgcccttcccccttccatcaggctctgctgaggaaggagcctgagtcagcagttcttgttactgtagcttcctcatctgctccacagtccctccctcagcctagcatgctgcctcccatgatgcagtgtggctaggctgccattttctctgggaggatccctgttatttccctgacttgactgtaggttttgtagacagctgctaatgtctcctgctgccctgtttctttgttaccctgcatgatcctgattcagtgttcttgggctgtggatcagttaaccaaacactttaggaacataaatgactgtgtcgttctggtcggcctcagcttctgcctcccagacactgagagctgctgctgttctaaccaggtagaggtctgtatgtgtgggtgcagttagttacctgctggttgccaatttagggactgtgaggcagctccactgctaaggctcagcacgagtagcgtagctggagagcacggctcacacaggctttctccttcttaccagaggaacgtttcttcagctcagccctggcgaagcgtgcagactgaagagcagccatccgactttccatactctgagccttgcatgtgttactgtgtgagcactttgggttgtgtttgtatgtttgttgttgttgttcctcataattctattgttatgtacagaacattgagtataattatttacacaacattaaaattgcttgttgtcagccactgcaggtaaggttggcggcagctgttctccattgactgctatagagtttaaagcaagttcgcaggtgtgtctccttattaacataacagttcttcactagtgtgtgtctaactaacacaggcagacctttttctggagcagattggcagttatgagtggttttccctgtgctacaccaggtagatacacctgtggtcttcctgttactctgggtccttttgcccaggtttggatttcattgtttggcttgtttcaaaactgtgagagtgctgtgctgtttgcttgttgatgtttgttaaggacaggcagggttggtcacaggacactaatcagattctcaaagccaactccagagttgctccacattcttaggttggtgttgattttgttgctgtttctattaggtcttctctcctctgcttccatgcttcttcgccttacccacccttagcttcaagacacaggtctagaaaaaggagggctatgcttgctgcatcactgcaaatgaaccccctgtgcccatcacgagcactgcattgtctgcctacagtggctccaggctgagcattgtaggtctgggactgcagcattgacttcttcctggattgtgttaaaccccagctgttgcttcatgccacaggaaggccactaagtgatgcgtataccctaccgtttctctgtgtaactcaggattagcatacctttagggccttgttattatctagaaagtaatttgggcaggggatgcctgtgtagcagttccagagcactggcttagtgtgctcaggtcctggagcttactcaaaaatgacagtaggagagatagccaaggattctattttcttgtaagaattaatagtacctttccttcaaaccttttctaagcagttaaaattctgtggttttgccattgtttctttgttcccattagtatatttagacaaagttaactgcagaggtacctaagtagcaatacttgatggaccagtgactaaacaaaataaattccatactggtagggttttttttttttttttttttgggagggggttgttgttgttgttgtgttcttctaagacaggatttctctgtgtaacagccctgactgactttgaactcactctgtagacacagatggcctcaaactcacagaaatctgtttacctatgcctcctgagtgctgggattaaaggcatgccagggttggttggttggttgtttgtagacaggctctttctatgtatcccttggctggtcttggactcccagagatctacctgcctctgccttctgaatgctaggcttatagttgtgcatcaccacaccttatttttttaaagatgtattcatgtattatctgtaagtacactgtagctgtgttcagacaccccagaagagggcatcagatctcattacagatggttgtgaaccaccatatggttgctgggatttgaactcatgaccttcagaagagcagttggtgctcttaaccgctgagccatctctccagctttatgtattaaataatactcatataaaataatacataaaaatatatatcatatatcatactttgtactcagtacttggttactaatgttggagttatgaatgtatctattaactacagttatggagagaaagacatttgacaaggcctctttttttttttttaacatatgttaatagtaaagtacatgaagcaggctggtgagatagctgagcaggtaaattgactgctgcccaatctccccatctgagtctggtccctggaacccatagagtaggagagcactgcccactgcaagttgtcctccgacctccacatgtgcactcatacacagaacacctacacgtgaaggatttttaaaagaattatgaaatcaaaatcttgcttttcacctttctaagttattttgattgttttttttttctgtgtatatagcatattttggatagcaaaagactgtaatcttaccttgttcttaaaagactacatttatgaaacatttggctttaaagcaatctgactgaggcttttcctgcagttaccctaatgactgtaattgtaaaaggtgttttggtatggtagaaactatcaggcacactgccatttgatctgaaaaggtcacgggaaaagggacatttaaattaagttataaattacaattgaagaacaatattttgatgtgtgaaaccagagatgtcagagcagggagatgtaattcatggcttcattatagagcagaggtgcctgacagctgagccatgccaaaaagaacatttatttgcaacatcacacaggcagaaatggcagctcctatgagaagccagagcagaaactagaaaccttgtggtaatacttgagtttatgctaatgagaaagctagagacccagagatgtttaatgactgctgtaatgtaaatgaggtgttctgacattgtgcacattttcaatcttacttaaattaagacctcatccttgctctgtaaaatagcatactttataacccggcattaaagctggttctctcacctctgtgttcaatgcacagagttgctgaaatttgagaattgtagaggcaggagagttaagacttgagacaagatttctacgcatggcggctttgaggaagggtataatttaatgtttatggcagtccatgagaagttcaatcatgagttaattaaactgtaggcagtcattaagtattatttattcttttgagaggcttgccaggaaagcacttatatatattaaattatagaaagtaataagcaaggggtgatttgtcgggtagagtaagaggaacatattgaacttaggcaattatgcagaaatgtgtttttcttcttgtggcatgatcctttctcactgctaatcgggaagggtcaggggctgtaaggagcctctgaacagtctgagccatgtatctgaaatagtatcgccagtgaggagaccactgtagggtttataactactttaaatctcatggtatctgatgctttgtgtctcaggtaaagcttcccatggcttcagggaagaaggcttcaggcagagtgctggtcctgtgcccatttgacaagtgaaaatgtccattccacagtttgcgatgcagctgggaacaagagcctaacagccctaggggctggagaggtggctcagcagttaagaacacttctcttggtgattctgcacttcctttcttagcatctacgtggtagctcacaaccatctgtcactccaagggatccgatgccctcttccgtcctctatgagtaaaacaatcatacatataattatgttggtggtggtgggtttttgtttgattggttggtttttaagagtttgaagccagatggtggtgatgcatgcgcaggggcaggcgggtctcttaagttccacgtggtctacacagtgagttccagtacagccagggcaatgcggagaaaccctgtcttgaaaaataagcaaaaaggaggatggagagatggctcataggttaagaatactgggtacttcttctagaggaccagggttcaattcccaacatccacatggcagtttacaactgtctgtaactccaattctgggggacttgatacgctcacatagacatacatgcagacaaatactaaggcacataatataaatttaagggaaaaaaaaagagtttgaccttgccttggaccctgtaccctctttgcaaagctacagaaccttagtagnnnnnnnnnnnnnnnnnnnnnnnnnnnnnnnnnnnnnnnnnnnnnnnnnnnnnnnnnnnnnnnnnnnnnnnnnnnnnnnnnnnnnnnnnnnnnnnnnnnnnnnnnnnnnnnnnnnnnnnnnnnnnnnnnnnnnnnnnnnnnnnnnnnnnnnnnnnnnnnnnnnnnnnnnnnnnnnnnnnnnnnnnnnnnnnnnnnnnnnnnnnnnnnnnnnnnnnnnnnnnnnnnnnnnnnnnnnnnnnnnnnnnnnnnnntagtttctccttggctctgtggttcaaatcaacagttacttacaaaaaaaagaaaagaaaaacgcgttggcgcacacctttaatcccagcacttgggaggcagaggcaggcagatttctgagttcgaggccagcctggtctacaaagtgagtgccagaacagccagagctatacagagaaaccctgtctcgagaaaccaaaagaaaaagagagtagaaacaagccaactgtttcccggaagctgctgctgctaagcagggacatcctctgccctgtccttgcacagtctgtctctcgctgtgcatcttggaggctggcatgctgagttactcagacagctctttgtagattagtgtagacacacttcctgcttgtccagtgctctctgcttttctgaatgggaaatgtggtgggactagacccgtaagaaatttctgtatgctctgtgacaaaaatgtgctaaaaagaaggacaggacacattgtgaccaacgcctgtgaggtgcagtccagggccacaggagacacttggctagaaagaagaaactgatggggctgtttgaaagctggtaggttcatgaaggatccccactttgttaccagatctccatttttagatcctggttcattggctgaaaacaagaactcatgctgctcccccttggctgcccccatgatgatgcatttggatgtgtttcccatagtgacatctgtttagtaggtgatggtgggcagtctcagtgcttctccactcacctgctgtcaaagatctaagactgagccatgcagctagtttttgcagtgatgttttcagtagttccaaaatacatagttgtctgtgctttccattaaataaaacaaacaaacaaacaaacaaacaaatgcatttaatcccagattttatctgcctagcttggtacaagtggacagaaaggtttacttgtgaattaccctgctttggttgcctttccatggctacagagtgaagcagtagtagagctgaggtttccactgtctcatcactgttttttcccagctttctctcgggacctttcacctcaggaaaagcatgaagcctgccctgcttggccacagtggagacctggaggcaggagacatgcatggctgagcagttaagaggagttgctgctcttgcctaggaccgggatttttttcctagcacccatgtcatgtgtcagttcttgcacctggtattagatacacacatgcacacgcacacgcacacacacacacacgaataaaataatcacaataaaaaggaacaatatgttatgttcaaaccaaggctgtgaggtatttaggtaatggtgcttgttatcaggcacaggaaaataattttttaaaaaagatttatttattttatgtatgtgattatactgttgctgtcttcagacacaccagaagagaacattggatcccattacagatggttgtgagccaccatgtggttgctagaattgaactcaggacctctggaagaacagtcagtgctcctaatcgctgcaccatctctccagcccaaaagaaaataattttaatggccattttgagagattcgaataagatagctagtattttggtaaatttaccaactctgactgacttgaggaatgtggggaaatgtccattttagctcctccttcagttagcttacttgttcgtggtgggtcaggcaacagttagaatccaacttctcagtagcctggggtctgtgtggatgtgaatttgtctcctgtgcacggctccactttacaccatggttagccatacgttccctctgccatctccattgttcccaactgtgtccacctgagaacctaaaagagggtctgttagaggtgagtaaaaatgaatccacattgaggggatgaggaggctctgccctccaggcctcccagcatgctgtagggatagcctaacctgttacagagctctgaaggccataacatttgtagaatattacaactgtatctttggtgaaatatgattacagttgcatgttctctctccagcccccagtctgtctttctactgtgagttacctgcagtccagaactagaagtactcatcccatcactctgaggcagacaggagaatgtggagttcccagccctccttgactacatagtgagttagaagctatgtggagccctgccctaaataggatctcatgtgtagccctggctgtcctagaaatcgctgtgtaagctggcctgaaactcacagacatacacctgcctttctgcctgctaagtgtatctaccacccaagcctggccctgcatcccacccccactcccactctattttttgagacagggtatctctacatagtcttgaccatctttgaactcactgtaaatcagactggcctctgacttacagagttctacttgcctctgcctcttgaatgctgggattaaatgaaacacttgttttttttgttttggtttggtttggttttggtttttcaagaccgggtttctctgtgtagccctgactgtcctggaactcactttgtagaccaggctgtcctcgaactcagaaatccacctgcctctgtctcccgagtgctgggattaaaggcgtgcgccaccactgcctggcttgacttttttaattatatgaaaaattccagaacaaaacatgtcatagatggcatgaaactttcttatggtatattgttatactgttctattttattagtggttattagtctataaatgtatttacttaggttgacatttggggaaacacctggtatgcatgggtcccaccctccatctcaggcgtccactgagtcttggcagcccctcccatggagaagggggcagtgctccttttccttctctctttcttcgccccctccctcggttttatgagacagggtttctctgtgtagcctcagctgtcctgcaactctctctgtagaccaggctagcctcagacttagcgatcctgaccctagtaggagacataaccatgtagatgctgagaactgaaccccatcctctgcaaggacagagactagccaccaagcatctcctagcccagtgtggtgcagagtgctggaattgaaggtgtgcactaccacccagtctgccctgagctttctcaaataggattcctttcaactgggtgtgaatgattgttacattaagatgttatccctcagtgacaggatgctcatcagttaagacatacgatgcttttgcagaaggttcaggtctgactcttagcatccgtgtcaggcatctttcagtcacctataattccagcaccaagggacctgagttttatagatacctgcacttacatgcctgcacacacagacatacatgcagagatacacatacatgtaattgaaataaatgtggtaattttcaaggtggtggtggtggtaataataataataatagaaggtggggtctctctagcaagattccctgtgctttccagatgtatgtttgtttcagggaagaactgggtgtgatagttcttaagtattgattgagctaagattgggagaagccgggatatgttaagaggctaggctgccaatgggtcagtttcttgttgagaacataggaactggagagcaaaggaggctcagggtaccatcatggttgcttcgggtatcggtgtggtctgaagcatgcccagatggaggcatatatgcaggagtgagggggtgtctcttcatttagcaccccacccgaaagtccgctgagggtcttatgcaagcagcgttatgttctctgacaaaccatcagccacatgtccattctctcatatttttccaactgtagcctaacgctctgtctagttctcccagaggcaggcaggattaatgacattcgatatcagttcacctctagaccaggctgtatgttcttaggagcagtttcctagtcccagacatctaagatttaatgtttaaaaaatctcctgtgtactatagtagagttctcatgaaatttcatgaactgcagtattacatggctttgtttatagccgagccaggcctggtcctgcatgcctgtagtcctcagtcccagcactcaggaggcagaggcgggtggattgcctgagagcgtttcctctctgtgactttcccttccgagcactcctcccacaaccctcccagagcccagtttgagtacatgtgtaaaagccagaggttgacatcatgcgttggccttaatcgctatccactttcttttctttttatttattttatgtatatgagtatactgtcttcagacacacaagagggcattggatcccattacagatggttgtgagccaccatgtggttgctgggagttgattcaggatggctggaagaacagccagtgtgcttttaacctctgagccatccctccagccccctctttgcccttttaaatatattctttaaattttacttatactcatgcgtatatgtctccagtcacatgactatcagtgccctcaggacttgaggcgctggatcccctggaactagcattgcaggcagttgtgaggcacctgcagtgagtgctaggtactgactgattcagacctcaggaagggctttgtgagctagcacctccacaccataaattttgaggtagactcactatctcactgaccaatccagcaagactcactcttatgagttatttcctgggttttttatgcaagcagaccctctctatggcccgtagttttccatgctgcctaatcattattccatacactagaataactgcttataaaacgttattaatttcttgccctgaagtttttatttgaagtttcaatttgatcaaggtgattttattttaaattatcactttaaaaaatgtgttttttaaatggaacaggcatataaattttccttctgttcagtttcattttgtattatatcattaaaagtcctcattgtattagagaacctggcaaatggccccttgttttaagcagagtgtgaacatctgactttatttaactctttttgtgcatctgaaagaaggcaggctgaagacgatggacgataaagcttgataagtgtaggtaaacagctttccacttgggcggagtctgcagagggacaggacttgaaggcctttattcttttaatttaacaagtatctctcagtcatcttgaactatgatgggaagaaagacagatttcagccagagatttagagagagctctgtaggtagaaggtgtagattgagcgtgaggatccttctgcccagggctctcatcaccattgaaaggaaagggaggctgtagaggcctcagcagggtgcctttgtggggcaggagtggccagtggcatagcactgcttgctgctgggaaacctgtgggctatgagctttgataggaaaggcagctgctctgaagggccagcttctttattcagaactgcgggtacacagtgatgtcttttgaaagtctatattttggacccttttaatgctttctagcaaattacttcactaaaaagaatctagtctatcctcggcctgttttggaaagaatggaataagagccaggcatggtggcacacatctttagttccagcagcacccaggaggcagaggcaggtggatctctgagtttgaggccagccagggatacatagagagaccctgtctcaaaagatcaaagcaaacaaaagaatggaacaggagcgtgaggcttctgctgggtttgagtcttgactcccaccttgtggtgagcatctaaaggcatctttccaaggcatgtggtctcctcacttgtgagatggtgtggcagttgttcttatatcgtaagattaagtacgagtctgtctgtcttacaggattagtgaaggcactgagggcannnnnnnnnnnnnnnnnnnnnnnnnnnnnnnnnnnnnnnnnnnnnnnnnnnnnnnnnnnnnnnnnnnnnnnnnnnnnnnnnnnnnnnnnnnnnnnnnnnnnnnnnnnnnnnnnnnnnnnnnnnnnnnnnnnnnnnnnnnnnnnnnnnnnnnnnnnnnnnnnnnnnnnnnnnnnnnnnnnnnnnnnnnnnnnnnnnnnnnnnnnnnnnnnnnnnnnnnnnnnnnnnnnnnnnnnnnnnnnnnnnnnnnnnnnnnnnnnnnnnnnnnnnnnnnnnnnnnnnnnnnnnnnnnnnnnnnnnnnnnnnnnnnnnncctcccaaatgctgggattaaaggcgtgtaccaccatgcctggcatgtttggtttttcaagacagggtttctctgtatagccctggctgtcctggaattccctctgtagaccaggctggccttgacctcagacctcagcctgcctctgctgagattaaagactcacacccccgccaagccttaatgctgttcttattgccagaatgttctctgctttacttgtctccttccttgtgcaaatcagttttctattattatagcaaatatctaagctaaatcatctcaggaatgtaagaggttcgtttattttgcccacaacttcacaggttttaatatgtggtattgcttggctggttaccttttgtgcttgcagttaaggaaacatgttacatagtagaggctgtatgaaggaggaagctgctcatcttgtagtaggtgggaaacaaaccggtgtaggtcctccccctcgaagttctaacacttcccagtgacatcatgctgggagctgaaccttcaatacttgtaccataaagggacagtccagtagcggggatgaggattaagtggggacggcagaggtcaggtggcagtggattaccacaaactattgttcttccatggttcctctaaaagaataaaggtatatatgtgtgtgtgtgtatgtatgtgtgtatatatatatatatatatatatgtatatatatatatgggagagagagagagagagagagagagagagagagagaatgtaaaggtatgggacttgtaatcattgatttgtctcgatgcctatgtgggacagttaattaactaaagtcattgtcgtctcagctacatgaaagcagttatgatgccggcaaagccctgcagcgcctggtgaagaagcctgtgcccaagctgatcgagaagtgctggacagaggatgaagtggtgagcatcgtcctgtgtgtgccttgtgttccgggcctttgggatggtacttcttgtatgcaacctccctgctccccacgggaaggggttcagttcagaagacagactgttcatggtaaagggaacagctatgctgagaagagcccttgctatatactcatgaggacctgagtccaaatccctactgcctttttttttaaagctgagtgtgattgcatgtgactctgtgactctcaagtcatgaggagctgtgacaggaggggtgctgtgctgctgactgccaccctttctctaagttcagcgagaccctgtctcaaaggaacaaaacagcagaacaccctgtgtccttctctgctgactctgagaggtgcctataatgtatcacactccagggaaaacctgtaagaaagactggatttgattttagtatcgttaagatccataggtggtggggaaattttctctgagtttaacagttactcctaaacaaggttggtgtgattttgtttttggtgcaggatagtgtgtggtacttctctgttttaaccatgtcccaaccatgtcagaaccagaacctggaatagtgtgttggtgacttaaatttaggacctcaggctgaaagcagttgctccagagcaggaagcgtagacttgattgaacactagaggagatggggagagaaaggagcccataaacatagacctgcaaccacagagctcatgcagctacatcgctgctggtgacttttaaaaggtattgctgtaactagctcaggtttcctgtgcctttgcagtgtgacagtgactgcctgacacttgcccttgaggtcaaatgcaattgaaatgcagagttggtggaatattcctcaatctaaggaaaagtgtttaaaagtgtttttgtgatactgttcactttcatgcagcagtgtttatagcaggcctactgtgtactatgtactaggtcctatgctaggagcactgttaagagcatgatatttcttagagtcctaagagggaaaccctcttagctcagtatgtgctagtggtgggaagtgcccagaagacaagggtggtataaggtaggagcagctgggcagatgggctctgccttaaagaatcaaggacaggaagaccttggggagtaagaaggggagaaaagaagtctaggcacttaggtggaaactgtgaatgctatgtgcaagaattaaatagagagggtagtggctgaggcatagtgaagagagagcagaagggaggagggggaggaggtggcccccaggggtaggacaattgtctccaagtggggaactgtggttgaaatgttgtcatttgctccacaaatacatttttctggttagtgggcattagggtcaggttcttgtgtaaggaaggcagagccacgggaattacatgttcaggtgatggatggctaaagcaaaaaccccaaaacctgagctgttttgagaggccatgttgacacactttcaccataagcctgtttttataggaaggagctagaattccagttggtacgattttcagttctgcaaaagcctttgggctggagagatggctcagtggttaagagcactgactgctcttccagaggtcctgagttcaaatcccagcaaccacatggtggctcacaaccatctgtaatgggatccgatgtcctcttctgttgtgtctgaaaacagctacagtgtactcatatacataaaataagtacacacacacacacacacacatacacacacatatatatatatatataataaaatctttaaggagcaaaaaggacggagcggctgtgtaactagactgtctgaaatgtccctctcccttggcctgtcacagggcatcatgcctgtgcaagtgtagtaatgactgcatgtatccattcctgcagcctgaactgcatctctcctgagtgtctctcctcatctgtaggccatggttccctcaccttctcctgcctcctctggtnnnnnnnnnnnnnnnnnnnntctcagactcaacagaagaaatgcaaagacatgggatctgtttagcttttgtgaatgtgatcccagaaaacatgcacatacacgtgacaagggctaagacatatgataagcaaattatgacatcatcagcaaaagttgttatcatttatggtgaaatgaactcaactctagaagtcagctttagaagatgggaatatttatttgcacacagaatttggatcacaacctcacaatgggatgtcatcacaattaaaagagatttcaaccttgatttcttcatgggactgtcacttgtgcacgccacccacccacccccatccccccttcttgctccacctcccactgctccagccctgactccactgtcctttctggcataacctctcattccctctggaatgtttagagtacacagcagagtcctctcctgcttttctaaaagaaagatgagttccttttctgtagctcttctcatgccagccctgctgctgcaggagggtgggggatgaggagccttgggcatctgaaagaatccagcttcattttgaaaaacaaaacagggatccaaagtggcaaacattccaagtgtagaataatgattcttaaccgtggaagcacacattgatttgggctcatttttaccatgtttgcttcttgtttgagaaatagtttggcagccacccagccttgcagagcttaagggatctaatggttcccttgtttgtgaaagctaagctttgctttctgaaacctcaaacctggaaggtgactgagaggacatgatggctgattgataggctggagggagcttccgattcacctgtatcgagtctgagtagctagcagtggcaacagggcagccccgctttcccttagcctgcacttggctatgagagcatccgctgtgttaacggggccccttctgttgagttcaccacattttctctggtgatttctccctggaagtaacaggaataagctacacaaacgtcgctaagctgaaatagctgcatatgcctaactccctttgatttcccttcttggtgttccatatacttggaacattctggtcattttactttgctgtcttcagcgtgttaatttgatcataaactcagtatctatctgatgtacctaagtgacttccacaaaatgggttttaaatgctgagatcagagttcctcttctgggctagaaaggtgacctgcatttccttactttgccaagcaactgttccatgaagaatccagcttctgtcccattggttctcaacctgtgtgatctggaggttgcatatcagatatcctatatatcagatatttacactatgattcataactggcaaaattacagttatgaagtagcaatgaaataattttatggttgggagtcaccacaacctgagaaagtatattaaagggtcgcagcgttaggaagggtgaggaccactagtgtagaccctcactgtaccttaaagctgagctcagtcctctgcctgctctggaaccattgtccctttctgacctataccttctttgctcctcttttttctttctcttttgtttgtccccttgagacaggtcttatgtcccaggctctcaagtctcacgtggagctgaggttgaccctgaactccttatcctcctgcctctaccttccaggtgccgggattgcagacatgtgctctttttcattgtttttatatttagatttgttgttgttttgaataaaacttaaacacaagcgaggacctcagagtggcttcagactgccctggagctggagtcagtgtggatgttgggaggtgatgactcgtcttctatgggagcagcaagtgtccatcccgcaggctctctccagccctatccatctccagaccgagttgactgtagtcctacttttttttttttttaaagatttatttatttatatgtaagtacaatgtagctattctcagaaaccccagaagagggcatcagatctcataacagatggttgtaaaccaccatgtggttgctggggtttgaactcaggacctctggaagagcagtcagtgctcttaacctctgagccatctctccagccctgtagtcctactttataaacttgtgaaagatgagcacttactgatggtgagggtagcgtctcccagggacgaacttgcagactgttgtttgcaaagactgtctgctctaactaagttcatctggagtccagcatttttaaatgtggaatggttgattgatatttatgaattgatataaaaacttttacatgcttcccagaattgacctgaaattgtaggcttttgtagctgacttagcggtgagcatctttaatcccaacacttgggtggcagaggcaggctggtctctgtgtctgaaagtccaggaaactcagagataacacagccctgtctcggttgggagcaggtggattttgactttgaagaagtcttcaggttcttcttcttcatctttggcagcagcatcatggcagcctctctttctggagacagtgtcttccccttgtgtcttagtccctctcctcttttatggagatgatgttctaaggggaatttaagttggggctgatgaaaataagccctgctactctaaaatcaaacttactctagtgcttaattagggatactattgtgatgaaacactgtgtcccaaagtgacaggatttattttgcttacaattccacattactgttcatcattgaaggaagtcaggacaggaactcaaacagagcaggaacctgaaggcaggggctgatgcagaggccatggagggatgctgcttactggcttgctctgcctgtgttcttatagaacccaggaccaccagcctgggaggccacatccataatggactaggtcctcccacattaatcactaattaagaaattgctcaggtggtgagatggctcagcagttaagagcactgactgcttttccgaaggttctgagttcaaatcccagcaacagcatggtggatcacaaccatctgtaatgggatccaataccctcttctggtttgtctgaagacagctacagtgtactcatatacataaaataaataaatttaaatttttaaaataaataaaaacacaaatcctaggttactaagtttttaattaaatatgataaacatatttaaatatgatccagaggccacaggagtctcccttccctgcttctgtagttactgattcagtctgtctgagagcgcaaggctctggggctgtgctgctcttgctgtgaggggattccattggtgcctgctgctgtgcttctaattagcattcagctgttgattaaggaaatactgggatgctaattgaattcttgttaaaattctaggcctgcatttcccttgtggagttgggctatcttgcagggctataggattgggtgccctgctgctgcctgcgctgtgctgtgcactagcactcccccttgcttcctgctctgtggcctgctctgtgttgtggtttgttttgttttcatgctggctttcagcaaaatgtgtcattcaaagtaaaggttttattttacaatattacaatggggtgattccactcatcttgggtaattgtagcttttattgtgaaatatgcttcccgttaaattttttatatcagttttgttgaaattcattgaggtgaaccatctagtcaaaaaaattttttaaccaaatccacacaagtgacaaattgttcatgtgtatggattcattcacaagtttataaacttgaaaacatgtctaactcttcttgctgtttaaaacttagttatcatagatacacattaatagcctcctttcaaaattgacaggacacagcaaactaactttctgagtgtagtgcagtgagcagtgcagctggtcaagcagctacctcattacagaatgcaaacactagggtcttccccagcgcacttcagatgcctttgttatgtgcctttgcaatgtctgctggagaaaacattgttttcattgttcattctttccagccaggcatcatcaggatgcgccagaagacagctgcttagtggggcagaaatacagtgagtttcacttactgtttgtgtggcagcagaagaaaatgtcatctgcagcaaaatcaaagtcaacatccaagaaacagccaggagcctggggggggggggggggcggaggggtgacagtgctgcagaggaggaagctgtagctggcctgcgaggagttcacatcccagaggcctggttttaagccttaatccacagcacagggggaggcttatgtgacttattgtaggaaaggtgtcatttcctcaggtgttgatgttacacagtgacctgaatgatgctggggatgggcatccttcctgtccatcacctaagatggatctattagttttatttaaatatatgccattcccctaggttagaacattgttaaaacctgctttttggatctttttatgtaaatacatgttttataacattgtagtttaaattatctgcttagaattgtatgcatgtaaattgagccgtacagtattgaattctcggattgtttgtttgtttgtttgtttgttttttgagattgggtcatgctgtgtaccttccattgactgaactcagcagtcttcttgcctcagccttctaaacatggaatttcaacatgtgtgaccaagctgacttgaaattctgattatagggttattggggtttttgttgttattgttgttgtttttattttaatttggttggttggttgcttcgttgggtttttttgtttgtttgttttggtttggttttgtttgagacagggtcttagtttgaagctctggctagcctggaactcaaagaagctggactgaaacccagcccaatctgtctcatgagtgcagagatttaaggatgaacaagcactaccatgtccagttgatttaaaaaaaaaaaatggtgtttgggtgtgtgcacacgaggacaagtttcaggagatgccagaagcctatgatccccctggagctggagttactatcagttgtaagccactgtgtgagtgctggggactgaaacctgggcttctcgagaacaagaagtattcttgaggggctggagagatggctcagtggttaagggcactgactgctcttccgaaggtcctgagttcaaatgccagcaatcacatggtggctcacaaccatctgtaacgagatctaatgtcctcttctggtgtgtctgacgacagctgcagtatacttacatacaataaataaataaatctttatgaagaagaagaggaggaggaggagaaagaagaagaaggagaagaaagaaagaaaaagaagaagtagtagtagtagtagtagtagtagtagtagtagtagtagtagtagtagtagtagtagtcttgaccactgagccatctagaccaaaattctaagctgaaaactatcaaccttcctgtggaaactctgcagtgatttaaagcacaggtgtgttgtgcttaatcgtgtttatcatcacacgacgtctatttactgggaagaatgagcctctctgtgctaagtaccctacccttcctctgtttttaaactgaatgcatactattcctccatctgttcctttttcttccattttgttttgtttggttttggacatggtcatactgtttctcagacccatctagagttggcagtcttctttctttagactctcaagttctgtgtggattgcaggtggcatcaccacacccagctttaagttgattctgttcctaacgaaacgcttaagttctcagctataagagtaggaaacagaggggctagaggaatgactcagcaggtaagagcactgactgctcttccagaggtcctgagttcaatttccagcaaccacatggtggctcacaaccatctgtaacgggatctgatgccctcttctggtgtgtctgaagacagcgacagtgtactcccatacatttattgataataaataaatattagagaaaaaaaagagtagggaacagagaaagatggatgttgactgctactgaccactcagtcgggtgtgtgcttgtagtgggacccaaggtcatgttcagaccttcctaactaagacaaagctagattcaggtaagatttgcctaatatttcaactgtccataaagttgggctgctcccttcagtctttgaagtaaactctaattgtttaaagaagtcagtagtgtgggtagagaacagaatttattgtcaagtccttttagaaataagacagtgaattaaaaatcagttatatgtacagaaaggtggcggaaggcaatcagttctgtcagttagtttgcaaaaagattctactgtctaacaagctgtaaggagaaatagctttaactccttgggtaacatttaggagcattagaggaaggccttcgcctctggagtatacagatgaggctccaccttccctttcacacgatggcttccttacagcaagctcccttggagagtgtggccaaagatgtgtgtggttttctattttttcccttttcatttgtaaagcaaatgtcattttcatatgctgggcatggtggtgcatgcctttaatcccagcactcgggaggcaggggcaggcagatttctgagtccaaggccagcctggtctacagagagagttccaggacagccagggctacacagagaaaccctgtctcaaaaaaaaaaaaaaaaaaaagtcattttcttttgcccttttctatacctcattatctctccgccatatttttacttggttttcttttaaagccagcaatacataatgtccccatccagggctcctggtgtgtgtgtgtttgtgtgtgtgtgtgtgtgtgtgtgtgtgtgtgtgtgtgtgtgttttgtgtttggaccttggagctaggtagagtagagctgaggtagggaaagaaccccaccatggacatgaacatgccttgccttgtagttcaggataatcattttagccaaagattactttttattgagcatttttcatttttccttgagagggacaatggggatatcttcagcttgaaagattcataaatactagggcagtgggctgttgaaaccacatttccatctcgttttcaaggacatgtaaaaaaaaaatggagctagcatacacttctcagtgctcagtcatctttccctgttcttttaaaaaatgagaacaaggcacaagggggcttgggaaattgcatgtagttctcccatagacaaagtggatattttataaatgaagaggatagaaacccttttcttcttcagtttcttagcaacagaacagagagagttttaatgtgtgtgcttggaacattatgtctttatcaacatcagagccttcctcgttcatgggtgagatatactagactgctaactgggatttggagttgggagaaaggaaaaaaatgaggtagaggggctggagagatggttcagaggttatgaggactgactgctctgctgaaggtcctgagttcaattcccagcaatcacatggtggctcacaagcatctgtaacgagatctgatgccctcttctgagtgtctggcgacagctacagtgtacttacatatataataaataaatcttaaaaataaataaataaataaaataaaggaggtagaaaacaggagctgtgccctgaggatggaactcattccgagccagctcttagtcccctgcgttcctctgtgtgattttgaaggcctttcctgtagaggtagtggtcatcagggtagccgcgcggttgccaggaggggggagggtttgttgggttctgacttggacttaccgagtgaagtccagccaggcagctttggtttctgttgtgctgaggctatagcagagcaaaataggcaaatatgcctgccctcgtgcactcaacgtgtaattaatactcattgacaagtgttaactcagtgaaatgagaaacagcataggaaagcagtatgcagtgcagggcagcacttggaactttacttaaggtaaccctgaaacgtcactcttgagtgaagacatagaaaacatttgagagccagctttgcaaataaataggagaagaacattctaaaaccaaagaaacggaatgcagtaattcccctcatatttgtgagaggtcctatccaatgtgggtgctgtgctgagtacaaaggaggctgtctggtctaggctttgtccatgtggtttaagccgtggtcactgtgctagaatggtattggtcatctgggtgtctgtacactggatgaggaaatctgagtgtagggccttggcttgggagtgccccagagagccccaggaagagatgaaataagtaggctgcgggcggcatcttgaagctcatgcctgctcctctgaattcctttcctgtaactgagcaaatgggtgtgctgtgagcagttctgcttcctcctgccttgcccctccctgccgcgtctctgtggtttctgttttgtacgattctgagtcagcctcttctcactctaccagactgtgggccgagtctgagcattctggcttataaccagagcggacagtgtttactgtactacctgtgtttacctagattccacatttgtgcaagcagctgttttcttaagtattcacgcataagaaaaacacctgaaaaggaaatggcataaactgtccctgccccagagcagctattactaggaagttaaccaagggagtaaacttgaagcaatttaggattatcaatccaatactctgaattttatcacctattggaaagaaagggtttaaaaaagaaactttcctttgagtccaatgctagttttgaaagtctactcaggaaaaagatctctgtgataccattatttgacaaagctgggtagtttctgtgtccactgacttttgttgtagttgtttgtttgtttgtttgtttgtttttgacagcagtcactatgtagccatggctggcatggaactcactatgtggacccggctaaactcaaacttacagatttctccctgcctctgcctttagaattctttgtaatttaaattttttctaacacctattttaaatgatggttcttaaatgctttaagctctcctttagcctactacccaccagagggagtgggaaagaaaggatacaggggaagtggacctgcttagaaaggttctttggagcagctcctgtctgtgttgtctggaaatcagccattcagttcacacgtcatcactgggagctcgatccactcgcaaactcttcacggatagatacaccagcagcccagttcagtagagtcaggagagcaaacaggaatcagtagtggggcactacctagcagagacagccaggcctcagcctcagcccgagtcagcaggagggaccagggccaataggaacaccaggaggagttttcagctgtgcctctctcagggaagcgaaaatctgtggaaactcaagacccacaagcgttgcacagctagatatatcagcaagccaagctcagcctccatcactgtccatcaagccctagttataccctgtcctcctcgcgccttgccttagcacatgcatccaatcagctggagtccgcagaagcagcaagaaactgcagcacaccaccagaagttttttggtgcgtttctctctatggcgtcctgacaaatgcatatcaactacgcaatgtaaggcggaccaatgcatgtgtgttgttagcaaagaatccttcatcacgtgtcctttcacatgcttgctttagcaaaacatcctttcacctgtgcctgcttcactggaacgttccttcatgtgtttgtgccagcaaaacaccatccagccaactttccaaagaacccttaagtttccacttcagctctggaattaacagtttgcactacactctgctatgtgtagtaactgggtactggccaggtttaattcccagcagtactctgttcttctctcccaacacttcagtcctaggctctgatggtgtgtcaagtctgcccaatgtcatggtcacacagacttagtaaggtattatctgtgagcaggaaggagcttggcagcagtagcccaggttagcctggcctctctgacaagctgttcaccctagtgctctttccaaagcagagtgactgctctgttgatctgattctcgaagctgcctgctgtgatacacactccaacctcagtgtgcctcccttcttctaccactatcagtgcttgcttcccttgcaaagggttttctgcatagttattcttgactgtgcgaactaggaaagtatcaaatagaccagagaactagggagggagggataaggaagttgcacagtaaaggaaggtcagaggatgaagcagactgaagtgaccaaagtgcagcccactgcctgaggcctacgaagcctctgacgccatccatactctatttaatatttagtgtgggggctggagagatggctcagcggttaagagcactgactgcgcttccaaaggtcctgagttcaaatcccagcaactacatggtggctcacaaccatctataacaagatctgatgccctcttcggggtgtctgaagacagctacagtgttcttacatataataaataaatctttaaaaaaccatttagtgtgtatatactgctgtcatgggccgttttaccaagtgttcaggaatgatgcttccaaaacaccaagaagactactattctatacacagaccgtcttagggtgcagctctgtggctactacccagcatcagcatccgcagtccctgccctgaggcaaacttagctttgtggaggtagtgatggctgagtcatgttcttttcccctagagaaaacttaggacttgctagacctggtggtgaatacctgtgaacctatctacctgggactctgagacaggagaatcacaagttcaagaatggtctaggctactcagttcaagccagtttgagcaacctgatgataccttgactcaaaataacaagtagaggaggccagtgagagggcacagaaggtagagggagacacttgtcacgtaagtctggcaacccaaattcaacctctgaaaccctagtaaggtggatggagagaactcagtccatatgtgtgcctcagcctaaattccccatcccattagtaaataaaaaaagaattttttcttaataacaagttggaggagccgggtgtaatggcagagacctttaatcccagcatttgtgacacaggaagatcggtgagtttgaagccagcctggtgcagctccctttcaggatcccaagaagataagattcctttccctgtggggttttgtttttttgtttttggttttggttttttggttttttggttttttttttttttttttttttggtttttcaagacagtatttctctgtgtagccctggctatcctggaactcactctgtagaccaggctgtccttgaactcagaaatccacctgcctctgcctctgctgggattaaaggcgtgcgccaccacgccaggctgtgggtttggtttttattttactctaagaaatgataggaaaaaaggaaggggaggagggaagctttgcactcactggcagatgtgattgacaggaagtttggatctgatgtcattctattcttttcctcccctagtaaggaaaatggacctgcgactgtctcttaaatcaggttattctattaaagaaacgggaagctagtgagatggctcagcagttgagagtacttactgctacagtctgggttcagttcccagcatccatatcaggcagctcacaactgcctgtaactccagctctgccctccacaggcacctatatacatggtgcacataaactcaccaaagcaacatacaaaggtaaataagttttaaaatgaaactaaagtgtgtatattcacaaacacagttgtgctggaactttgctaatctccccctctgcacagatagacttcagagatgtgtgctaggcatctgcctgtgagctgtgtggaatgggagggaatggtgcaccatggtggagcctgtgctgtgagctgaccccatcccattctccctctgcagttctgaactgtcttttgggaagctttaacattaaatctatgcacatgtcaagcattgcttgtcagtggtctccaaacaggtgtggtactcactcctaaatgagccatccagggcctcaactcctaagcagcttggttatctattttccttcctattttccttccttcttttttttttttttttttttttaataagaaggctcatctactttttggtttttcaagacagtttctctgtatagccctggctgtcctcgaactcagaaatccgcctgcctcagcatgtcaagtactgggattaaaggtgtgtgctaccactggctggctctcatctacattcttgcaaaaaaaaaaaaaatatttgttttacagcaggctagaagagggcaccaaatatcattatagatgattctgagttcaattcccagcaacccatcatgtggttgctgggaattgaactcagtacctctggaagagtagccagtgtacttaacctctgagtcatctctctagtcttccttccttctttttaatgaattttttttttttttatttctgtggattggtggtttgcttgcctatatgtacagatagttgtgagctttcatatggtcattggaaattgaattttaggacctctgcttgctcccgtcgacctgctcgctgtagctgacttcagacgcaccagaagagggtatcaaatctcattacgggtggttgtgagccaccgtgtggttgctgggatttgaactcaggacctttggaagagcagtcagtgctcttacccgctgagccgtctctccagccctgaaatggactttatatatagaaagcactagtgcctgtgctgactgtccctgtgaccaaagctgctcacaggtcaccaactatggggtggactttgaactgtttggattctcctggctctgtccctagtccttcgacagcacaaatcttaaggttgttttcagatcaccccgggaggcagcctaacttcttcctcagttttgaggttacttcagactttatgatcctcacgcagcatgtcattggtacgtcgtcagccttgtataatcatctcccgtccacttttaagttcccgtcggacatgctgcatcctagtcatacagtgaggtgtgtcatctgcttgctcccacagctcaagaaggctcaagtgtgcctcctgcacactgctctgtgcccagtgggcactgatgcccaccaggctaagcaggctgtgcctgtgcaaggggccttacttctgtacttgaatatcttgcaattgcttagcagtgtggcaggcaactctgacctcctatggtgtctttgacaagtttagctatgaatgacagcaacatggtttaaacttttctgtgcctccgctgtttctgacagttctgagtcccgacttgtgaggagctggatagccagcagctggggagagagctgtcgaggagatgaaattggaggggagccttatggaacagatgggatttcaccaagcagcgcggacacccagctgatgaggagtgggtcaggctggtagtaggctgcccagattgagtgtagcttatgggttggggacagcaaagatggcctgttctgccttgccgtcccgagaaatctatgtctgcctttgagtgtctggtggcagagttgagtctgcctctgagaagcagccctggttagcagaagggggatttnnnnnnnnnnnnnnnnnnnncacaaagaagctgtgttccagagatagccaaggttgtactcctgctgcagtgggacttggtaatgtgtaagggtcacccaggtggtactggttttgaaggcatgaaggggtcacgcagagcagctgaggctcggcactgtgagaggccatggaaggccattggtgaaggtgcagcctcagttgcaattgacagcccaggactgaaggggtcatgcagtgttttggagatgccagtaccatgagatgaccaccaagagcagcagcagtggagtacaggcatctggagcctagaggatgacgtgtgtgctacaaagggcatagctgaagaagtggcccaagcccttggaggagcccagaagatcgtgagttggatccccagacattggatggttggagattgatttttgcttttgattgtgactgtgccctgatattttccctcttgaaggaaggaaatattttagtggatcccacagttaagagacttttaattgtaaaaagactttggactttaaaagatattggacattttaaagggattgacttttaatatgtaaagactgtgggacttttaaagttgtttagatcttggggatgaataagaaactaaggtttgaggcttactagtgatgtgtttgtgtatcaagttgacaaggggtcaattgtactggctagttttgtgtcaacttgacacagctggagttatcacagaaaaaggaacttcagttgaggaaatgcctccatgagatccaactgtaaggcattttctcaattagtgatcaagggggaaaggcccttgtgggtgggaccatctctgggctggtagtcttggttctataagagagcaggctgagcaagccaggggaagcaagccagtaaagagcatccctccatggcttctgcatcagctcctgcttcctgacctgcttgagttccagtcctgacttccttggtgatgaacggcagtgtggaaatgtaagccaaataaaccctttcctccccaatttgcttcttggtcatgatgtttgtgcaggaatagaaaccctgactaaggcaccttcctaactaagacaaagctagattcaggtaagatttgcctaatatttcaactgtccataaagttgggctgctcccttcagtctttgaagtaaactctaattgtttaaagaagtcagtagtgtgggtagagaacagaatttattgtcaagtccttttagaaataagacagtgaattaaaaatcagttatatgtacagaaaggtggcggaaggcaatcagttctgtcagttagtttgcaaaaagattctactgtctaacaagctgtaaggagaaatagctttaactccttgggtaacatttaggagcattagaggaaggccttcgcctctggagtatacagatgaggctccaccttccctttcacacgatggcttccttacagcaagctcccttggagagtgtggccaaagatgtgtgtggttttctattttttcccttttcatttgtaaagcaaatgtcattttcatatgctgggcatggtggtgcatgcctttaatcccagcactcgggaggcaggggcaggcagatttctgagtccaaggccagcctggtctacagagagagttccaggacagccagggctacacagagaaaccctgtctcaaaaaaaaaaaaaaaaaaaagtcattttcttttgcccttttctatacctcattatctctccgccatatttttacttggttttcttttaaagccagcaatacataatgtnnnnnnnnnnnnnnnnnnnnacttgaatatcttgcaattgcttagcagtgtggcaggcaactctgacctcctatggtgtctttgacaagtttagctatgaatgacagcaacatggtttaaacttttctgtgcctccgctgtttctgacagttctgagtcccgacttgtgaggagctggatagccagcagctggagagagagctgtcgaggagatgaaattggaggggagccttatggaacagatgggatttcaccaagcagcgcggacacccagctgatgaggagtgggccaggctggtagtaggctgcccagattgagtgtagcttatgggttggggacagcaaagatggcctgttctgccttgccgtcccgagaaatctatgtctgcctttgagtgtctggtggcagagttgagtctgcctctgagaagcagcctggttagcagaagggggatttcgagaagagggctctgaggtcacacagtcacactcactgctggaattgcaagtgtcccagtgccctggccagtgctggtgctggggtcctggagaccactagactgggtgagaaccgtgctgactgttgaaggtatggaaaatgtcagttggcaccttcgctcaacatggcttgcaatccagagtcatcggacaaactctttacttgggccttagcctggagactctgaggatgtggtgcactcctgacagctccagtagaggggaactgaggtagaggaagcaaaaggaaacacagaagcagcttcatagaataatcatgagaccgtcagtcccaggtggtgtcctgagtgtttgcatggcacttacagacaggtagtcccagacgtgcatgtccttcccaggccacagagcgagcgcaggactagggacatttgtttcccactgtgctctagacacatagccacatagccacagaagctcaggtgtggaggaggctggtgctgacctgtgggcagagcagaagggtttgtggtgcatttgaaggaactgtggaagatgtaaattgatttagcaattaggaatgaatgaagcttgttgaaaaaaaggaaggcttgttggctgcagcggggtctcggctgaggaatctgctctgtgtggttatagagtgttctgtggctgcagaacagggatctgaagaagttgccagcatagcgtgcagtttaaggaggtcctctgagatgggccaagagaggcacaaagtggctgttgtggtagagacagatatcagaaggtagacgaaagatttctttaataagaaatataatcttattaaagattatgttaggaaatgaaaaatatattattttaaaggctgggttgcacaagcccaggccagcttctgtaacaggccataatgttgaacttctgaccctcacctcccatgtgctgggattgtaggcatgaatccatctgcccacatccactacttccttttatgtatttatttttatgtaggagtgctctgtctgcacatacacctctgtgtcagaagagaagacccctttatagatgatcatgagctacctacggttgctgggaactgagctcaggatccctggaagagcagtgttcttaacagctgagccatcatctctccaccccccacctcctcaccccacaatgctgctttttaaggtggagaatgctgggactagcgctgtccttggcttgaattcagtaggaagaccaggcagagaacctgcatagatgttcctgagcctggacctactactctctgcagcttctcccggagactaagaggtggaaagtggtgaaaggctgaacgtgggtttgtttacagttttggccatgactgaggacagaaaattcttgctttccttgccttttctgtattagaattaatagaaaagatgaaacaaatgtcaggagcagtgcacatgtagctttaactggaagttaaatcatcacaactcctgaaaggagttagcttcccttccaagttagcctgcggtgtaggattgcctggagaagtgtgtctgtctggtggtcagttgtatgtcattctcgtgttgttgtactgtcccctcctgcagtggtccctgttacactgtcacaagattatagctatccagaattcccacacaaggaaacttggaaatcaggacagaggtggtaggtgggtagatagccagggtcttccatcaggcaggggttttgtgggattaacattaggctgttcaagggtaaacaggaaagatgtttaatttttgtgtttggtgtggttccccacaggctgctttgtttagaattacaactcaccagaaataggacacagacagagccttagaaggtctgtggatgaaatgttcacggtctcacctgtgatgctggtagacaggtgaggaccactgctaaggcctgagcaagggcagtgggtgcactacctagatggcagagtggaattgctgccctgggattggaagcactaaggaatgctatatggatcttaatgagaggaagaggaggtcggggagcagaggacattggcacatttgtagaggacaatgcaggccaaagttgtggtggtacaaatagccatttagagtttctacagtggtgtctctggctgggaataagaatagtctgagatatgttggaggatcaaaggtgggaaatatgtacagttgctcatcaccttggtcccttgacaggggcatagcagtgctgttgttgatgagaatgtgcagctggcaaggtaacctgattgctccagaccttcctaactcggggaaacactgagcagctgggttgaaggtgtgcaggaactttgaggagggaggcagggttggggagtgggtgggcacgcacctaacactctgaggcatcatcctgttgtccgtttgcttactcacccaggaaggttaggtctctgctgtgtggggagagcattgtcttaacagtgaagttgggggtaactgtgacttccaagattgggaaggaatcttacagaagctgtgggcgatggtttcctgtggaccgagataggactgaggaaagtgtctgaacttaaaatgggactctatggtaggattcccttgtcaccatggtttcgttttctttgaagcttcctcagtatagtatattttatcaaaaagtctgaaaggcctaagataaacaaaaaaagacaaagaggagcctaatgtgtggatgattcgcttccttctgtgaaaggaagcaaatctctctccttttttaagcccagagagaattttttttttttctgctcttagcagattagatcttttttttttttttttttcattttgagacagggtttctctgtgtagccctggccgtcctggaactcactttgtagaccaggctggcctcgaactcagaaatccgcctgccctgcctcccaagtgctgggattaaaggcgtgcgccaccacgcccggctagcagattagatcttagtgcatgagccacaatgtccgactgcctgccctctgagcaccctgtgagactggtgtcctgttcatctttggtctgtgatttcctccagagtaagaaacttgtctcaccactcagttgtctcctttctgtctcatggagccagcctctcggggtgtgtgactgcttaaagcacaaaaagcaaaagtcaaatagccttgatttctgggagtcagtgccttggactcctttctctcaggacagggactaattcgacagttcggctctaagtacctaggaaggaaatgccactgaactgacagttactaaatggctgtcaggacaaggtttctggcagacatgacaacctcaacagaagggggtgatactgtaaggacagaagtcagaatgtgggaaggtcccctgaggccagcacagaggaagatgcaatgctgggactagctctggagccctcactggctctacagagttaatccagagtgtgctgagtctagttgatacggacagtgcttgcttggtactccagagaatttccatgtctctcttcagttggtacaaagtaaaacaaaacttaaaaaaaaaattgtcccaacccccaccaggcatggtagcactactgtaatcaccagcatttagaaaccagagccaggtgacctaggccagcacgctatctcaaaagaacacagtgcagaagctgcatgtgaagcatctagaagaaggtccctgcaaccattcacactgaccattttagtctctcatgcagcccaggctggaggtttcgaactctgttcctcctgtctcaccctccagtgtaaccaatacttcttgtgtgctagacaacactccactcgctgagccatatcactagccatctggcagttgtcgttgtgtgtcttgtttgtttgctttgtgtgtttttgtgtgtatgtggtttttttttttatcatgaggatgtcatttccaatgtacaaatgttgacatttaaaataaaatgggtgtctagagaactcctcggtggttaagagtacttaatgtcttacaggggaccctggtttagttcccagcaccaaatggtggctcacaatgtctgttagctccagtctaggagttcctatgctctctatgcctccagaagtcccaggaacatggtgcgcagacataaggcaaactaaaactcatccatcatacacattcccaagtgcgtgtcatcgctgcctggtgaatgcggtggactttctaaaaattagctcttagatgaacattagcatgaggtgatgttctgctcattcccgtttgtcagttatttgtagatgtcagtgccaggaagccatgcttacgtgaataaacagatggaaattaagggttgccagcaccactgatttacctgagttccttccataataatgcccaaagtatgatctgttgttgggttctgttttcagttgcctaacaaatggtatttcatcaaaacttcaattaggttgaaaacagaattaaaaagtatctaaagccgggtgtggtggcacacgcacacctttaatcccagcactcgggaggcagaggcaagtggatttctgagttcgaggccagcctggtctacagagtgagttccaggacagccagggctacacagagaaaccctgtcccagaaaacaacaacaacaacaaaaagtatccaacttagccctggggccttgaattgtgctctatgcagtgccctgagagcaccaaagcttcctcctaagagaagaggggagggaagaaagccggaggtggtgaagcacactctaatctcaggagcagaggccagtggatctctaggagttcaagccagattgagttccaggaaagccaaggctacacagagaaaccctgtctcaataataaaaacagacaacaacagaaacaaataaatagagatgagaaggaaaggtagataccggccctctctgacagatgaatcctacgaaagctgagggtttggaaatggattccctaagaactatttgaatcatcagtctggtccccaggagagtcctggagacctggtaggatatgggttggtagtataaagagagggtcatcctgggcgcccaagcatgaactggctgacattgctttgatagaatacttctgcccttgtactctgaagcccatgttgtgagctcacactgaaaaaaaatgcacaccaccacctcttccctatagcagaccctcaggtagttttgctctttattgttaatgtagcacacacaccactccagcacaccttttaaaatgttcaggtgccgggcgtggtggcgcacgcctttaatcccagtacttaggaggcagaggcaggcagatttctgagtttgaggccagcttggtctacaaagtgagttccaggacacccaaggctacacagagaaaccctgtctagaaaaatcaaaaaagaaaaaaaaggaaaaaatgtttaggtggagctggagaaatgtcttgctggtaagacttggccactctcaagaggccctggcttcagttcccagtacccacattgctgtggacaggagcctgtaagtctagttctaaggtatatgacaccatcttctggccttctcagggactgcacaaatgcagtgcactacatacatgcaggcaaacacttaatatacataaaaataaactttaaaaatgttttagtgatggaatttcattatcactggctccctctgaagtcccatgtatttaggcaaacacaaactgttttttaggagacttaggttggccagaatgacaaagtatctatggcataaaacagattaagaattgccccttgtttctggaacattcaagatgtcaggttcaatgccatggcctcagagttggtacttattatacctgtgggcgccgtgtgtgctggcttaggacacagaccctaggggctgcgcatgcttccttagactcttgtgtctcaaactggtcaaatcaacattatcctaagaatagaatgcattctgataatccaggtcacagttaagcatttgggagtccagttggaaccaccagcacgtgtggcttccaggaggtccttgatcaaccctgaagaggaaggacactcttgttgtctctaagccacagtgaacagttgaagagtttcttggtttttatcaagcagttgtgacttcccctgtaacgtagttgtctgggttgttcctttaacgtcctcctccatcagtcgctgttctccttccggtgcttctctggctgctgatttcctctgcgcaccaggtcccctgacttgaaatgacaaggccgcatttagctcaggtttctcaaacgctgcgacttcatctcgtttacagtatcacatttctgttgcagtacactgtgtgatctgggcctccccacagcattttaacaattggtaattgggcaggaagtatgtttttattacaggggccttttgattttgattttacagtcatgtcgtgtttagcagagagcaggaggtgggcaagtagtgctctgaaacacatttgtgacagagagaagtctgttgtttcagccacttggctatctgtcagctcttctcagacttcccccttgtgctggttgcctggcaacctggggctggagcaatcaaaccgtggccagtgcttttccaagcccagattgggagatgatttattggtgaaactgtaagcaccgtaaaccaagccttagaaatggatctctcttcccctccccctctcggtttataggaacgacgttgcgaaaagataaaagaaggaagttaattggaggatttttatcacacatacacacagaaaagaataaaattaggtccttgttgtgtccacatattgttattggaacttcttcctttattgctttcttttttttctctctccttttttttttttttccttcgagacagggtttctctgtgtagccctggctgtcctggaactcactctgtagaccaggctggcctggaactcagaaatctgcctgcctctgcctcccaagtgctgggtttaaaggtgtgcaccaccactgcccagctggtgggtctctttcaagcgtgtgcacagtatgtgtctgtgtgagcacagtatgtgtctgtgtgagcacaatatgtgtctgtgtgagcacaatatgtgtctgtgtgagcacaatatgtgtctgtgtgagcctattatagaagacagggcttctgattgttctttctgaacacgcccaggctccccactttctgcttctgcccatgctgccttttctcccatcccccacattacctccacttttcttttttgagataatctttcagtgtagctagcctagccttgaacagctgtcttgccttcaccagcaaaatgccagaagtaatgggtgccccctgctcctaactaaagtcactctagcaagatggattttcctgccaaaatgaaactccacagctcttatgacagtatctccttcctaacctcagataccttctccaacaaacaagtgcagggaaccatgttctgcatcagaagggaggagggggcagaaaagtctcagcttgcagctcagtgtgtccaactgtgaatgcaaatgcattagtagtgtgtttgtatcccttttaagcagatagagctgatctgtttgtgtgtgtgatttacacacagctgtgttcatgttccctcagtatcaatatttttagcaaaagtgaggtatcatgggagcactgttgttctgaacagaaaccagcagggcagccttgtgattggctcataccagctttctatctagaagcctccctttagggacttgcctgagtgtgatagccatcattcacgggggcagagtgagcaaacacagtgcctgtggtgggtaggagacagtgactgctggttgacaggaagcttactggtgactgaggtctgcctttgatggaagtgcttcttagctccactggactgcatttcttaaaaagacattgactttccttccctttgggctcataatcttgttttgttttgtttttaaagatttatttatttatttattatatgtaagtacactgtacctgtcttcagacactccagaagagggagtcaaatctcgttacggatggttgtgggccaccatgtggttgctgggatttgaactccggacctttggaagagcagtcgggtgctcttacccactgagccatctcaccagccctcataatcttgttttatgggttttttttcttctttgagtaggatctcactacgtagccctggatggtctggaatgtaccatgtacaccagacagactggctttgaacttacagagatcagcctgcctctgcctctccagttctggggctaaagatgtgaaccaccatgcccagctggttttctttgctttggtcggtgatatcttagctgaactcagtgaggaactcaggctaatatcatataaagggaaaataaagtccctaccagggattacagtgagcctgtggtgccttttcctgatctgggaagtcaggagacgtctcagtggcttacagatatagtgtatttgatttgagatcatatgtctgtatgaatatgggtcgttgttgcccagagctgtgctagtacagttatatagctccacaaaggtgaccatttggtgcttgggcgtcttgttattgtaagccactggtatacacacacacacacacacacacacacacacacacagaatatataaacagtatatatgtgtatgcaatataaatatatatatatacttacataaatataattttataatgtaaacacttatgaacacatatttttgagatataacctcttgtagctcagactgttcttgaatttcctatgtagctgagggtacctacccatcaacttgtgatccgtcagcatttcctttcctagcactggcctgtgctgctgctcctgatggggaatggatccagggcttcatactcagccctccaccctccaccccccaccccttttaaaacaggttttacaaagggctttctcactgaaatgacttttctcctttgcgctttaacagccaagctacagttctttttattttatacacctttgctctgtgctgagatcaactttgttaatgaaagctgaacctttaacagcatgtttctgaaccacgttctggagcatttgtatggagattcttgaatgataccacagggaaagaatggctgtttgtgttctgttattagtgccaggttatttttaatttgaacgtagctgtgtagccaataattggcaagatgtatttagtcagctgaatctttgcacctgttgatctgctgtttacctagcctctgacttgactgggccagtaccctgaagcaaaggactttgctgtgctcaacacagtcatctaacttaactcagagagtcataggtaaaggtaggtgggaggactcagctgttacttacaccacccgacatgtagtcattttcctactaggtatgtggtccttgaatgggaaatagagtaatgttcatttgctaggagacagcctgtgaaggagtagtcaatacacaaaggttgaaatagaaaactgcttattctttcccttaagcaggtagctggtaggaagaggatagcttgaatcctctagtaattgtgtaggtttggttggagaagataaggaaggcatcctttggttttgttagttatatttagacacttagcagtagaggcctgtggacagacagaatgaagccagacaatgtggaaggactgtggtcacctccagattattcatgtaatcaataaactgtgattgaggcccacttgctccatgtcatcagatgtggggcctgtaacacctgaagcagccccttgcctctgcagtttggcagaatctcatatgtgagtctcataccgtgtctgtgtgtgtccagaactaggagttcttagagcagagcttgctttgtgtccaagaagtagtagtttgcttctttatttacttgacaaacgttaagatcaaagggattttagtttgctttctttttgtcttgagatagggtcttctgtatgtatcaccagctactctcaaactcattctatagctaagactgtctttgaatttttgcctctgcctcccaagtacttggactacatgtgtatactgccagatgtggccaagattaaggttttagtgatctacataagtcaaatcactcctaacaatcacagacaaacaaaactaccctgaaaacagcattagaaatatgccctcccagccgggcggtggtggcgcacgcctttaatcccagcacttgggaggcagaggcaaggggatttctgagttcgaggccagcctggtctacaaagtgagttccaggacagccagggctacacagagaaaccctgtctcgaaggggagggggggggggaaatgtcctcccttaatttctgaggggggagaattgagtgaagagcagctcagagacctagtgtgagaagtgtggttgtgcacagtcatatgggctgtgggtttggaattcttcaagacccctcattcccatgctaggacatgactgctggggtggaattgtctggcctgttctccagcctgatgcttccagagtggctggagtttgtgtttagttggttggtttgggtttttggtttttggtttgttttgaagacagggtttctctggttgtcctggaactccctatgtagaccaggctgtcctggataaccagtgctgcaattaaaggcgtgtgccagcaccacttggctcagagtggctgaacttgtattactattgctggcactagttacttttctgttgctgtgataaaatgccatggccaaaagcagcttaggaacgagagagatcacagaacgtcagaggaagcatggcagcagttagctatagcaagcagaaagaaatcacatctttaactgcaaccaggcacttctataactcatctgcacctgacagcagtaggtactaagggatctaagaccctcactagggaaagaagctgggaaggctcaggggctcagataagctgcaagcaggatcttcgcctgtaccaggttctgactggtgagtattgagggcaggatcagtagatacagcagggcagcctggagtcccgagagtagccataggcctttacaactgtatattgtattgtatgcttatgaaatgttttattctctacctaatttcagccccaggagagtgtcctccataagaagtcaacagctgaggtgcagctattgaaataaaaggttgtgagggtgtgcacaggatcttgagatccatgtaggaagtaagcatagaagaacttcattgagcctgcccaggaagcatgttgatcacaaaaaggagtcctgcagggagggccccaggccttggcagtagcgcggcagggagtgtctaggatgaaggagtagatcaagctcttagcatgtacacaccacgtctgattcctgacctgtacagactcagggacacctgtctcagcaagtatattatggctatgtgtgttgctaccactgccgttactgtttacatcaagacctgaaggaaccatatgaactcggggaacttgagagacactgagaaattctagagaattctttaggctcagcactaaactgctttgagcatgtggtccagcacccctcagtcatagcctgagttgtcatatctttagcccatatagccttatatcaggacatgaaactggacaatatttctctgaataaaatgtgcattcaggtttgcctcaggggatatgtatggagagagggttctgggaaaatggctcttgcagaggactgggatgtttggagcacccacatggtggtccataaccatggaccccagtgtcttccgagctctcctggcacatgtaggcaaagcatgattaagtaacccccagaactcacagtgtgttacgagacagcgagaaacatgggacagtgggtttaagctttctagaaactagtcatttaggtcttttatgtagaattcatagaaaatgtttcttatatttcaacaagaacacagagctactgcatgctcctttactcagtgtatttgcaactttgctgtcttggaatagaatgtgagtgtaaaagataaaataaactagagatttgataataaccaataaaaggatagtatttgtttactttgggtttttgacacagagtctcactgtagctgccctggaactcactatgtagaccaggttggcttcagattcggaaatctgcctgcctctgcctcctgagggattaaaattgtgcagtaccatagctggcctaaacgaacaatagtttgcataatttgctatactgaaactctgaagttaattaaactttcaattggattggaataatactagccattgtggaatgtatttaaactggagacagaaaccaggagcagtggcctcctcctaggtacactgtggtgctatgtttcgccaaaatggtaggtacttcactgggacactttcattagtgtgcaagcttaagcctaaagcaggtgatgcagcagtgactctcagaaggcgatgggtggggtgatgttaattgactaccagagggctgtctgctgaactggagtagactgtcacccagcgggctcttagtcagggcagccacaggcatgatgctgtgcacgctttgggaaggggccagtattctttcctaacccaagaccccttgttagtcactttgaagacaccttttgtcctgcctttctacttctcaggaaactcgatagtttcccactgcctggctgaaggactcacacttttttgtctgtctcggggcagcggtaggaagactgtaggttgcttacttgcagatctgcttgctctttcgtcccctgagaaccaatgcattattaacataaagttctgtgcagcagacaggatagagcagaaggccattttcacagtgggactcattttaataccgacagtgttttctaaactgttacataagaggaccaagtagagaagtcacgtcgagtttctgactgtgatacactagttaaaattcaccagagggagttaattgtgagagttctcagccagtggctaatgcagaggtccacccccactcttctgctctcttcggggctgcagaccaggctcagatgatttctgagggagccatgtgtgcatgtgatctaggggtacaggcaacctgatcatccccagggctcacctttctcccacaagtcttaccacttccaatttgatgttcagagccggggggggggggggggcaggaaattttatgtaagcggcaaaggctgtttgagaggctgagacaagggtgaagagtgtgatatctttacttgcccatacagagatagttttaatattttatcttaaaacagaagcctttatctctgacctgtacaatgcttttaacttctgcaccccatcccagtctctaggttcccctgtttatgtatgccacctctgcccctcccaccctgaatcaaggatttgataccatataatttcctcatctctgagatggagctgttagacgctttgctcctaaggtggctgtagggagcctggggcagtggctgtgaaggcagcgtgcagccattaagtgcacctgcattaggtgcacctcaccaccctctccatgccaagacatgcataaactgccgctttgtctgctcatcgggaggactaacgggaggcttcttgtccaggcccagcaagccgtctctcagggtggacaggagcgcacacagtgggcatggagcccgttgtgcactgagagctcaggcaggtgttcccagcaacagcacaggaacctcagaacacattaacctggagagggagattaatgttactgcatttatttctgtaagcatcttcccatttcgggaatggctgtgactaaacagccatgtgggattctctgtgagacagaagagtagactgcacacagacctctctctcggcccctcccacctggatggtcggaagccctgggtagacggatacgtgcagtagatgaacacatcaaacatatcctgataacaaatcaacaagagcatatttgcaaactagtaatgtgggcgtgcttgttgacataaaaggagtccagggtgagtatttaataatgcaggatgttaaacattttgggggttgtttagagttattcaataacatgattgtataatgattgtataacatcaatgttgagatcacagcttcacataatatgtagttatgttatgtacaaaatggctggagtatgattagggccttttcggaaatggctgaaattctgttctaatcccaagccagaatttgacaattctttttatgaaactcaaacatctgtctttattaaaatttttttttcttaaatattgtttatttctgtgtgtcacaatgtttgtgttgggactttgcatgccataagtctcatttagaggtccgaggacaatttgcaggtcctagggatggaagtccggttgtcaggtttagatgcaagcccctttccatgctaagccacattgccagtcctcaaaaatgcccttttatgttattgggtttttgtttgttttgtttttcaagacagggtttctctgtgtaaccttgagtgtcctagcaaaacgtcaattttaaggagttttacattaagtcctgactgtaggatgcccagaagcattttactgatggccagagttttcccattcagtgagtttttaacttcatgactaaatatattctctgggtgagggcaacaggggaagagtttggggaagaatacggtactggatattggcaataattcgtttatttcatgtgaatgcgggggtttggatatagatatggtgtgtgtgtatatatatattccaccatgtggtgcctgatgcccttggaggtcagaagaggaggtcagttctccttgacctgcagttacacctggctgtgagccaccaccatgtgagtgctgggaatcaaacccagatccccatccaccccacccccaccccccagcaacaactgttcttaactgctgagtcctctctccagcccctggtcattttttttttttttttttcccaagacagggtttctctgtatagccctggctgtcctggagctcactttgtagaccaggctggcctcgaactcagaaatccgcctgcctctgccgcctgctgggattaaaggcgtgtgccaccacgcccggtgtcctggtcatatttctaaagccagaagtaaagttttccccactaggaacaagcctgtaactcactcactcataaaccgagttaccatggctaagtacagatttgtgtttgggtctcacctggctgtgaggatgcatgcatagaaaacaatgaggccttgcttccaaggtgcagagtactaaagaaacaagtgtcagtctcagcagccatgtgtgcaggtgatggctggccctggagcattaagcagggctacttagccctggcagtatgacccagccagttaccacagtttaaatatacacctattctttctctgtcacccttggcagcctggcattctgacattacaccttcaggaccagagaaataatatacaaggccttggaagtgttgagttcatgttcagttgctggaagacataagaaacagaccatgatcttagtggcttagcattcctctctgtaaacaagtcagcatgttaactattaaattactatcgaaaacatgaaggttttcatgtggagacaggggttcacagagggatggagttgcctgccttagaagctaggctcacatactgatgtcatccagctcctgtgtgctgagggcttggctttgtttcgattatttcagaggccgctctgcgtttctggtaaaccacaaggtaaagccgccctgcgaggcagatgtctggttggttttgaggcctgtggctttccatagagaagtaacaacacaggccacatgaagctttcacttcctctttttcttagaatagggccaagagtgctttgcacttgtttgtcatgcatgggcagcagtaataggtctgcactccccatcagatgctagttcatatttctggaagtgtagttagtttgagatgcctgtgagacagccacgtgagtgttctcagtgggattgcttcatagatgcagccttagagacactagtgagtatttttcaagaaacttacagccagaacacaggaggttggaggttgtcctgggaattttgaggagtagaaagaccaaagcagaccctggaagcacattgagaggataagtaaataattgggctgggtgtcacagggagtcatttcagcttccagagttcagagtggacatttttgtggtggtccttgtttgtttggtatgggtttgcttgctttggtttctttgctctgttttttttttttaattaatgtagggcagcctcagactcacagtgtatagaagaatgaccttgaattccttagcctcctgccttcatattccaagtgctggaattttaagcaagcaccatgttgcttggccatgggtccttctccatttcttagtccacgacgagccagtgctagcagagttgacttcacttgtttcagaaacttgagaacatcaactgtctagtaccataggaaggaacgtggcgtgtgatagaattcctgcctttgcagcttttatagatgagtacatgaagtctcctacaaatcaatgagtgggctggtcacaggactttaattttggagcaaggattccagtctgtattttaaatgaaccctggaagtagaactgatatcatcaggcatctggatggaaaggtagggtgggccttgacatcaggactcaaagaagcatgggcaccgtcctgcagggttaagcgttactttttttttttttttttttttggtttggttagttttctttttgtttttttcagagatgggggtctctctgtatagccctggctgccctggaactcactctgtagaccaggctggcctcaaactcagaaatccgcctgcctctgcctcccgagtgctgggatcaaaagtgtgcgccagcaacgccctgcaagtgttactctcagaagagctgggaaagataatgggagctgatggggaaagccataggtttgtgttgtttcgtgctgttctcaaatctgcttttagctgaggctgcccttgagcttcagctcccactgcttctgccttcctaggctagggctgcagtgtgcttaaaatctggaggcttgaaagcttcccttggcaaaggcttgtcacaggctgtgtggagagctgcgttccgggaaggagggctggaggggggacctgggccttcaataggtgggctggaaggaagagttgagctgctgatctcagatgtgaagaactggcacactggtgttaaatgaactggaaagtgtacagtcacaggacagctaccaacagactgaatttcatagagaatgttgggaaactaggacttgtgaggctggctgactctgatctgtttcatgatagaccttccttaggttggggatgatagagcacatgcttaataattacttttgatttgaatggtgtttctcataatctgtgaacgcatagattctgaattcattggcctgctctatcacattatccagatgttccagagtccgccttcttctctcttttctggtgaatacattgtatgttgctgggcactaaccctacatttgatgccacagtctggcactccaccctccaaactatctcctaccaaccatctccccttctcaaagctccctctaaccctacaaacactgctcctcccattggtaacctgccttggtgagaagatgttctggcctcccttggtgcacagttgcgatgccccttgctgctttcaggtagtaccctggagtgctctgtgatgactgtatgcacttactttacctgcaaaaagctagtcacagtttaagcatatcctgtcaaggtttttcaaagtccctcccagtgctagatgtacagtaactcaccagagtgaattcagggcctcctctcctacagtgctgtgccaccagcctcggctgctctcttcgtactccacaacttgggcctccccagggaacgctccaccttcaacccctggtcgaccattggatcttaactcctcaaagctcagtgcagcctgatcctcactgccctctaaaagtcatctacaagcagtcagtttttctttctgcataccttgtcctccttggagtttccagaatgttcctatgtccttcctgggcaactggaagcccagctggagctcacctggcaggcttatgctcttccttgtcaagtcccctaagtcaagcagagcttgcttcctcttccgagctccacccaccaccctttgttcctctactgctttctttataggcccaaggtccatctgtacctatttgcttctctgggctgattggaactccttgaggacttgctctagaggtgctgtgtgcagctcaggctgcctgttgattgtatgactgatgcagaagtcaagtaccagaagtctgctcttcataccaagaagtgtgcgctgctttcttgtgcctcacagaattctcccactgaactatatcaattatattgaaaattgacagtgatgagtcatatccagcactgggagaactcggaactcgcagagcctgcaggactagagcgggaggctgtagatgggtcttgtaggccaggtctggcccttctctgtgtttgtcccgcgggtctctcacacccagagtgggaggcctctcttcccagtgggcagctgatttattggctggggcgcttccgtggtgatcactagtgaagtgcaggctgatacccgggcctggcgggagcaaacgcctcagccgcgggctggagtggccacggcgggcgggagggaccggcgcgggtttcgctgcctcactgtgggcatgcggcctggccctggcgggtagcaagtttcaccgttgaggnnnnnnnnnnnnnnnnnnnnnnnnnnnnnnnnnnnnnnnnnnnnnnnnnnnnnnnnnnnnnnnnnnnnnnnnnnnnnnnnnnnnnnnnnnnnnnnnnnnnnnnnnnnnnnnnnnnnnnnnnnnnnnnnnnnnnnnnnnnnnnnnnnnnnnnnnnnnnnnnnnnnnnnnnnnnnnnnnnnnnnnnnnnnnnnnnnnnnnnnnnnnnnnnnnnnnnnnnnnnnnnnnnnnnnnnnnnnnnnnnnnnnnnnnnnnnnnnnnnnnnnnnnnnnnnnnnnnnnnnnnnnnnnnnnnnnnnnnnnnnnnnnnnnnnnnnnnnnnnnnnnnnnnnnnnnnnnnnnnnnnnnnnnnnnnnnnnnnnncggggcggagccgagcggccgcggcggcgatccaggccgccttttgcagccgcccgccgccgggctcgccgcgctccagcctcctcccccggcgccctccgctccccgcgccccgcgcggccccgccgcggtcacacgccaagcagcccgcggccgcctggccctgcgctttgtggagcccggggacgggcgcggcctctttacctgtagctgcgagtctccctcggatcggaggtgggagctgctcctggaacccggcaaagtgaaagtctgtttggggtcgggcagaccgggagggccgggggctcgaccccagaggctcccggctccaggactaccggctccttgtgggcttccgcggtcaggggatgggaagagggccagatcggcccgagacacttctgcgaaggcatctgcttccgcgggtgaaaagcagctatgttggtttattgcaacgcgggctgtttgttgtttgctccttcctgcagcttgtggttcccgaaggccgccttggctccgattgcttttcccccctgaaacgtgcggcgctgcttgtggttccccgcaggccgggggctgccctgccctgccctgccctgccagcaggtcccagctgtgccgctgaaagcctccagcctggctaatattcccgagctcagacttttctgtggttgcttttctgctgattgcagatatctttgctttgctgacatcctgttttggttttggtttttacatctcacttgtttcttttttatcacagaaacgcttcgttaaggggctccgacaatacggcaagaacttcttcagaatcagaaaggagctgcttcccagtaaggaaaccgtgagtacaattggactttatataacttgggttgttttttcccttgctctgctcctgctgcttcttcgaatctgggcttaggaaatggttcctttaaccccgctctgtgcctgacccaggctggccccggattcttacttttcactggtgattttaagatatcagagtgacatattgtgcttatccttctgaggaacgccttgtaacgggaagaacagagttgggagggggaggatcgctagagagttaacatctaattttaaatccactggctgaaatgggaaatggcattttatcgctagtttggatttggtaattgtcaaaagtcatcgtctaagccgaaggatagagctgagaggtttatggaactctgctgggatttcccctccgtttgtttaaattaaggttgttgtgttctagagaaaattcatttaaatctttactctctcagctttaaattttttcactttgtagtgaaaagggtttttattagttgcttaatgggggctttaaaaaaattcctttgctgtttcaaaagctgagggtcaaatgctgacctgaccattgcttttgatgaacttgctgtgggagagtgtgcggagacttccttggtaggtgacactgtaagggtacaagctcagttacctgtgggtgcttgcctccaggaaggtgggggtggaccacccacctcaccctgctggcagcctccagtctgacccagtgaccggaagtacctcccacctaggaggggaggagggctaggattgatatttagtctggcttttaggaagagaggggtgaatgaagaatatccattaccaaagtgatggtaggttttctcagttggtggttactgattgcctcttggtgtttaatgctcttacttattattaaaaatgaacagtttgtttctggactgtagaaccctgataactggggagaaaggttctgagattccaagtatatcccagtaaacagatttctccagttaatgataactaagttaagattaaatcatcattgtgcatctaaatgtgtggagatgggccactgagaggactcaaactatagatattaagatatattgtggaaacaacctgtttcttactctttccagaacaggttttgaagagactttgtaatggagagcagagcagcagcagcgatgtaaaaactcttaagtgttctgagaatctcatattttctaagtttgttacatactttaatgctaggcagtggtgtcgcacacctttaatcccagcacttgggaggcagaggcaggcggatttctgagtttgaggccagcctggtctacagagtgagttccaggacagccagggctacacagagaaaccctgtctctaaacaaacaaacaaacaaacaaacaaaaaacaaaataaaaaaagagtgtcttgactcaaaagtagcagccttctttgggctgagtagaaaagtcagtgagatgtgtcaagttgatagctcatttttagcctatcagctcagttggtctttttgtttgtttgtttgtttgttttgtttttttttctttttttttttttttttttttttttttttttttgttactggtgctgggattgagcccttagcaattatctcaaccctcctgctctagactcttatctgtctcttttatctgctgaaagttgtaaatcgtaaagatctgacaaaagaaatctggacaatctttttatcttgatgctttgtaggaccggaagggaggaagcaaggaagaaaaaagaaaagtagtacaattgaggattaaaccaaaatcttagatggaggtgggggctggggatgctgggaatccatccagggtcttgtgcttgcttaacaaccttggaaacgcaagacagttttattcagcagagtagcagaaagcaggcctggctgacctttaacctagcacagtgttccttacctggtttcctaactagaaagtctgtcctaatcccacctgaccctggctgcccacgtcagggtctgattcagttaacttgtgccctttcctgctgcggagcagccctgtcattccagggatgcttcccctcacctgccatgcctgtgccttctctaacaccgttccctcccagttcccagccgtttcgtgtgggcacagtccctagagtacaggaagcagagaggtctgcagccctggagggcctctcccacttctgctgagtgtcattaggtcccactcccttctccttgcttgggaggagtttggtagttgggtgaatctcttaattgttctagtcagctgggagaggcacttgtcttatattttccttagctatctaccgagcctggctaatcattacagaccactaagggaggaggcaaaggtcacttcattctgttgcagaagatgagggactttgcaggtaccagtgttccagaacttccttgataaaaaccttatggttatgaaactttctatagaaaattcttacaatctagatgctttgccacattttcttctattgtattacgggcttctttctttgctagtcccagaagatttgaaacatcagaagggcatgactgggttctgggggggtcagcagacctgtgttgtatcgatggtctggccggtatctatagcacctgatctctctgaaggttttttctggcttagtttgatgctgtgggaagttcaaatcacattttgacaggttactgggaagttattgtttctgaaatggtgcttctttgcatgagacagatgttctcagcctaaaaaaaagtggggtgctggggcctgggagaccctggagagatggctcatagcttaagagcacttcctgtcctaacagaagaacaggactcacttgacagcgcctacatccggcatctaaatctcttgttactgtagctcaggagatctagcactctctttagacctctcagcgcacacacacacacacacacacacacacacacacacacacacacacacacggcatacaggcgtatatataaaacaaataaaattgagatttttttttttaactttttttttttttttttttggtttttcgagacagggtttctctgtgtagccctggctgtcctagaactcactctgtagaccaggctggcctcgaactcaagagatccacctgcttctgcctcccgagtgctgggattaaaggcgtgcgccaccacgcccggcttttttttttttttttttttttacttttattgtatgtatatgatgttttgcctgaggaggtcagaagagggtatctgtggatcctctagaacaaagttacagttgcagatggtcatgagctacaatgtgggtgctggaaattaatcctgggccctctggaaaagcagtcaatgctcttaattgctgagccatctctctagcctcagaataaatatttttaaagattattttatgtgtatgagtgttttgcatgtatgtatgtctgtgcaccacatggatgcctgcagaggtcagaagggggcatttgatcccctggaactagaattacagacagttacgaaccaccatgtaggtgctggtaatcaaactgtgttctctacaaaaacagcaagcagcaagtattcttgtttgttttgttttgttttgtttcaagacagggtttcaggctttctctgtgtagccctggctgtcctggaactcactctgttgtagaccaggctggcctcgaactcagaaatccgcccaagcagcaagtattcttgtttgttttgttttgttttgtttcaagacagggtttcaggatttctnnnnnnnnnnnnnnnnnnnnnnnnnnnnnnnnnnnnnnnnnnnnnnnnnnnnnnnnnnnnnnnnnnnnnnnnnnnnnnnnnnnnnnnnnnnnnnnnnnnnnnnnnnnnnnnnnnnnnnnnnnnnnnnnnnnnnnnnnnnnnnnnnnnnnnnnnnnnnnnnnnnnnnnnnnnnnnnnnnnnnnnnnnnnnnnnnnnnnnnnnnnnnnnnnnnnnnnnnnnnnnnnnnnnnnnnnnnnnnnnnnnnnnnnnnnnnnnnnnnnnnnnnnnnnnnnnnnnnnnnnnnnnnnnnnnnnnnnnnnnnnnnnnnnnnnnnnnnnnnnnnnnnnnnnnnnnnnnnnnnnnnnntttagttggttggttttggttttattggggggggttgttttgtttgagacacatttctcatttctctgtgtaactctgactgtcctggaactcactctgtagatcagactggcctcaagctaaccaagatcctactgactgctgggattaaatatatgtgccaccactgcctaactaataaagataatttttttaaaaatgctttaaagaaaaaaaaaaatgaaaaggctaaagtactgtttaactgttgctgcaatggactgctgttgtctctgccactcatgctgtgggcttcaggcaggttactggacacttttgttttttgattcctgtgaaaccatgtgataactccaagttcttagaccatgagtgaaaatttaaatgaggtgatatctataaagagtatataaaaatattttcccaatctattatattctgttgaaaacaagtctttgtgtgcacatatgtgtgcttgctagggatcagaccctggtcgtcatcatgctagaaaagtgtttcccgctgagctctgcaccgttgccgccacaccatgcacacagtggttctgctctggagctgttctccccgtcacctgtccttgctcttgagttactcgggaaaggtggaggagagcctacaggagtccctgggtgggagcaggtctccttacctttggaggctcctgtaggagtcccattcctcccattcactacaggcctttatgtctgataaaagtgcctgtgcaacggacatcagctttcctaacacttggtttctggagtttgttatacaggggctaggtctggctttcctctgaatgctgctgcccactgaagtgggaatagtggctgtgattaggaaaaccaactgtttatagagggttagttgagtgggtattacgtgttaacctcatggcacccgagagaataacaagtcagatccttttagaattacatctgtgcagatacccagttcttccttcctttttccccatttgcctttctttaacatatgtataaaatatggttagtagattaaaatactaggagtgagcagtgtctcagaatgattgaggctgcccactgcagatctctcaactgtttacacagaggtctgggtgttagtgcatcgatgtaaacactgccaagtgtcctgcacttctgagaagacagggctagctcctctcccagatgttctggaatttgctgtcctccaagccaggtctctcattctaagtgctgtcactctgctgttgggtagatgagttacatggcccctgaccttgtatgttaaaaataaacaggcctaatagacttagatcctgatcacccacagggaacctatcttataatacagatcccaaaataactcatttctcacatacatggccatttcttataaaatctcaggatgactatactcaaaacataaggatggtctctcttcatcttgcaaacatggctgctttatatgaatggaagagtggctcctgggagattgtcctctgaaggctttgtgtacagctctgtctgctgttgccagcagtggaatgtggacaggagcaccaccctcaccgatagggagcagtggctcctgctcagatgcagtgcagattagcaagaagacagtttgatttggcccagctctgtaggagagaggagcctgtggggagggaaggcacgaaagcacttgtcctggacatcttagctgcccttctcttagtttccaacaactacctcaggaaagattgtactctggttatttgtaagtgcaggtggtcgtgtccgagtgttatcatcagatcgcattctcactccagtctcggtgccatgggtgaagaaggcaaagaggagacagttgtgaaacagaaccatgagggatgagcttgtgctctgcaggttgcgtttcaatgcaggcggatctggctcgcatcgcaggctttgggtttcccagagaaggtacagttagtctttattaagtttttgtgatggggtgggaaattttggagttttaatatgctagatagcagggaaatcagtcatgtttctgggggcaaattctatagatgatttgcagactagctctgtgagaactacatctctaggcagaatgacctgtgtcagcatgttctcccagatggaagaatgagtcatcaaagttctgttagcattaagagattaagaattactccagtgttcagcatgaagttttatttaatttccgatataaccttaggtaaacaatgcttaatcttacataagaaagcgtgggcttgtagtctgggttgctactctgagaacaggcagctgtaggacagctacggagtaacactgaggagttctctgctcttcactgtgtccctccagtgcaggtactgactgtcttaattgctcacaacacagtgggcagtgcaggctctcgggttccttgtccctgcctgttgagccaagatggctattttgttgttaaaatggaggtttaagtaaaattgaggttgttcagtaatgtttgggaactacttacacagcctcaaaatcctaacactccaaggtatattctattctattcttttctcacatttatgtatgcatgtgaatgcctgcatgcatctctgtgcactatgtgtaggcagtgatggtagaggtcaaaagagggagtcagagcctctgggactggaattacttggaggtgtgagccaccttgcaggtgctggaaattaaacttgaatcttccagaagagcggccagtgcttataattactgaatcttttattgttgttgttgttttgagataagtttctctgtgtaaaactagctgtcttgacactttctctgtagtagacaaggcttgcatttgaatttgagtaacagatggttgtgagcagccttttggatctgggtattgaatcttgggtcctctagaagaagagcagccagtgcttttaaccactgaaagacctctttgacccaatcatagaactaatcaatcaattaattcctttccaagatttagttagttagtttatatgagtacactgttgctgtcttcaaacacttaagaagaagccatcgggtcccattacagatggttgtgagccaccatgtggttgctgggaattgaactcaggacattcagaagagcagtcagtgctcttacccactgagccatttctccagccccatagagtttcttaatataaagcttcccccccccccctccaactctcactccattttcttttcttagaagtacagttgtggtctggaaagatggctggtggtcaaaacctcttgatgcccttcaagaggacctaatttcagtgcctagcacccatgtggggcagctcacaaccacctataactctggctcaaaggtctgacttcttatggtctctgaaggtgctccggaacacacaagtaaaattaagtacggaaagagaaagaaacccagttgtaacaccttattttatattttaaagatcttattcactaggtggtggtggtatacacctttaatcctagcactttaggagacagatgtctgtctcaaagactaaaacacaaacaaacaaaaatcttcaaatgtagctttctttactggcacagccagcctgggaagaaatgtgagtagatgtgagggattagtcagcaggcaaaatggagagcatttaagctctgaccactgtactctgcacagctcatctctaggtgctgcctgatgtctcccagcaagtgtgctgtggtgctgagggctgtctgcctcaatgtagtcacagcctggggctgtttgttatttgagtttttgtttttgtttggttgagtcagggtttttatagcagagactggccttgaactagagattgtcttgcttctggaatcctgggattgcaggtgtagggcgccatgccagcaggcactgttttaactaaagtaatctaagagggtgtggctgtttcccttgtgtgaatgcagcaggtgtgtgattttcatggaggaaacttggtgccagtgttggaaagaaaaggcgggttttttaaagctgaggtcttcgccctttgctgtttatagtgtgtgtcctacacctgcttgtgaagttatcctacacgtgcaaactgacaactgacaccagagtgctttatctttatgcagtgcattgtttgtagaaactatgtttataatgggctttaaaaaaaaaaaagaaaagaaaagattgaggtctggagagatggctcagtggttaagagcactgactgcttttcagaaggtcctgacttcaaatcccagcgaccatatggtggctcataaccatctgtaatgagatctgacaccctcttctggtgtgtctgaagacagctgcagtgtacttatatataataataaataaatttttaggccagagcgagcggggttgatcagaacgagtaaaggtcctaaattcaattcccaacaaccagatgaaggctcataaccatcttcagctacagtgcactcacacacattaaataaataaataaataggtttttaaaagatttatttctttaatttatagagtacactgttgctctcttcagacacaccagaagagggcattggatcccattacagatggctgtgagccaccatgtggttgctcggaattgaactcaggacctctgggagagcatagtcatctctctagcccctataatggacttttaaaaacatctttgtgcgcgcgcgcgcgcgcgcgcgcgcgtgtgtgtgtgtgtgtgtgtgtgtgtgtgtgtgtgtgcatgtgtgtgtgcactctagagatcaagctcagatgtccagccttggcatgagtggatctttattcacaacgccatcttgttggccttgctttggaccttgctgcctacaaggatcgtcattattcctttctgacccttcttacggtttcctttgaccttgcttaccagcatgacttatatgaagagatttaggactttcgagctctatagtttcattaggtaaaacaaacagaaggtattagtatgtctttagaattataaaagacaaaccttaatagctgtaataatgatcaatcattaatgatcatttagagcttatgtttttgtatcatagagtcatgtccttctctgtgatccattctgacttgaaagcctagcgtgcagagaagagtagctcagctggaagggcgcttgcatgccatgcatgaggcctggaccccatctaactgaacatgatgttgcccagataatcccagcacttttgagggcaaagccagactgggagacagatgagacatcctatcctttttaagatttattttttgtgcattggtgttttgcttgtgtgtatgtctgtgtgagggtgtcagatcccctggaactggagttaaagacaactgtgtgctgccatctatgtactgagaattgaacccaggccctcaggaagagcagctagtgctcttaaaccttgagccatctttccactgtctccaccctctcctttcttctaaggaaaagaaaacttagcttgctgatgtttgaaaaatacatttttttctgtgtgtgtgcttgtgtgtgtgtgttttgggttttttggtttggtttggtttggtttttgggttctttttcccttggtttttttttgtttgtttgtttgtttttgttttgtttttgtttgtttgtttgtttgtttttcgagacagggtttctctgtgtagccctggctgtcctggaactcactatgtagaccaggctggcctccaactcagaaatccacctgcctctgcctcccaagtgctgggattaaaggcatgcgccaccaccgcccggctgtgtgtgtgtattttaagtataaagtatattttaaatttttgtggggctggagggatggctcagaggttaagagcaccaactactcttccagaggtgcttgagttcaattcccagcaaccacatggtggctcacaaccatctgtaatgggatccaatgccctcgtctggtgtgtctggtgttcaaacctgactagtttaggagattttttaactcagctccttgtacttgcatggcagttactttaaccactcagccatctccccagctctttttaaaaaaaattttttttgttttttggtttttagtttttgggttttgtttatgggtgttttggcagtgctgaagatggatcccaggccctcgcaatgtactagacatggtcttaaccactgagcaacactccttcctggagtgttaacagttttcagttaaagttgcacttttctggccttttcttgttctgttttgtttgttttctgtttggttgtttggttggtttttttcctttgactttggaaatgtgattgttctgtttctgtcttgagtccacctgaagtgtgggattgtaatttctgacgattggcctttgagatttatacaccacaacagctggcagagtttgaagttgaagggaacttggtaaagttcaaacaagnnnnnnnnnnnnnnnnnnnnnataagtattcatgtctgctgcagagagcctgaggagcttctggtcagcagcgctgtgcagtgggtggtcagcagcgccgtacagtgggtggtcagcagcgccgtgcagtgcgtggtcagcagcgccgtacagtgggtggtcagcagcgccgtgcagtgggtggtcaccagcgccgtgcagtgggtggtcaccagcgccgtgcagtgggtggtcaccagcgctgtgcagtgggtggtcaccagcgctgtgcagtgggtggtcagcagcgctgtgcagtgggtggtcaccagcgctgtgcagtgggtggtcaccagcgctgtgcagtgggtggtcagcagcgctgtgcagtgggtggtcagcagcgccgtgcagtgggtggtcagcagcgccgtgcagtgggtggtcaccagcgccgtgcagtgggtggtcaccagcgccgtgcagtgggtggtcagcagcgctgtgcagtgggtggtcagcagcgctgtgcagtgggtggtcagcagcgccgtgcagtgggtggtcaccagcgccgtgcagtgcgtggtcagcagcaccgtgcagtgcgtggtcagcagcgccgtgcagtgcgtggtcagcagcgctgtgccgtgcgtggtcagcagtgctgtgccgtgcgtggtcagctgctggctttaaggttattaaaaacagagacactcagcaccttctacattgtagagtggacagagaacctataacttttttttttaagacttgtttattttttttttttatatttaagtacactgtagctgtattcagacacacctggaaagggcgtcagatgtcattaaggatggttgtaagccatcatgtggttgtgggatttgaactcaggacctttggaagagctgtcagtgctcttaaccgctgagccatctctccagcccccagaacctttaacttaatgtcccacagcttatgactagtacctgggttcactttatcacagagggccttcctacgttagtagtgtttgcacagaggctctgtgttctagattagaggattgaaaaccatgatttatttttctcagtgagtttattgtgccaatcaagaataaaatattgtctttagctctagaataaaccagtagcgtctttctgctcgcctttcaaatatgtgagcaagtgcacgcgcacactcctgcaagctgtgcccgtggaggtgtgtgaagttctaagcttcctgctgttgttggctttcttctcttcatctgttagtgagtcaccatcacatgctattttattatcttgcaaacagtctctggaattttttatcctttgtttttgcagtgtgagtggaaaaccactgaggttgctctgaacagcattcacatgaaggctttcctcggggacactttagttctatagttttggcttttgctgttacctctttgttcccatgcataaggtttggattggggggaagggttaaggatggtgacttttgcatgtttgagtatttgagaggcctaagaaggacatagatccagtcgccttggtacgttgttgatggttcccagcagcagggcttggttctgtttgggaaatgtgtcagtgaggtgctttgagcaggtcagttcctggtcctaagttaacaggaggagttaacaatccaccagagagccgaagacagccaagcctcagggagtcccatagctcctggctgcctccagtgctcatcttggttttgtacttgctgggactcacctaagaaatgggagggagagcctggtctacagagtgagttccaggacagccagggctatacagagaaatcctgtctcgaaaaaccaaaaaaaaaaaaaaaaaaaaagaaaagaaaagaaatgggagggaggtccttgcttcaaaatagcaggatttctttacccttgtcttcacttgcatgtggttcatgagaaacacaagagacttctttctgattagtgggaaactattttagggcaggatggcaaggaggagtccccttgtcctccctgacagcctgcccctgatcagcaagggcttcttaacttgtttggggggctccccaaacaatgttcttctggctttttgttcacctgctttcttccatacttcattccagcacatgtaacctttaaaccaaaaatgtattgctcataacagagcaagcctcttctgcttttattttgaaaagtcctccctgttgttaatgttgagggtattggtgctgaacgcctgttccaagtaggcagcatttgtgcatcccagaggggcttttgatgcatttccttacctctgccctcctttctctgcggtgcagaaacctgtaatgatctgtgaagcttggagacttcagtgcagaacagtagtggttttaaggaccccctcccaccttataaaaggcttgccaggttccacatgctgggttctgactccctgaaaagctagcctctcacaggcttttggttgtatggcagggcatcctgggttggggccttgatatggcttttttgaaacatttttcctccttttctcccaccctttgaaaaattgtaataaaaattctgggcttgtggccagcctgtgggatgcgatacagtagaaatgtctctggtgccctttgttactgctcggctttgattaagtttgtttccagtaagtttaaccctgctccccttgccccgcctgctcctcatggctgaggaggctgattgagccagggttaagcatggtgttgtgcaagctgctgaggcctcgtggacgccttgtgcctggcagaggaagcaaggcaaagcatgtctttgcaacgtgatgttttcttccttggctgccgtgtgcttttgagtgcgggaggcgacgagctgtgtggaagctgtgtcggtctcctttgctgcttttgctcaggggttccaggagagagcatgttccatgtacaacatgctctctctgtttctttttaaaattgtgacacactctggctgtgtggcctaggctgacctctaactccattttcctgcttcttgagtgctagggttattggtataggcctccatgtgaggctgtacagctggtcttgagattctgttaagtttaaaatcatgctgtccaacctctgcgactctgcctggtgcagggcggaggctcccagagcagcattgagcaaacagcggtgctcctttgatcttctgtggctctccatttcaaaagaaaaaagtggttgaagctttagaattttttttttaatattgctttgacctcatatttatagctcttttcatcctagcaacagagaacccttcagacagcattttcccagtcctcccaactcactggagggtgagagccaagatagtagatatgaacacagggaacatcaggcaggtcttaaggtggcccttacatacaccgtgcagcctcagtgctgggtgcttgctcggtttttaggcagtgtttacttttcatagaaagaaagtgagattttactcctataattcctgacttactgtaggattctttggccagcacacagggatgaagtctcatgtaaatctgtgcaatccctttgtatccgaatgatctggggacactggcctgtaagctagcagagggcattatgataaaaacttgtttgattcatgttgtagagtctcagtctcttgggaaaacagtggccccacttccttccagactagcctgtcagaactgagttgtttgaagacaaaattctgtaatgaccagcactgctctgtggtcctcaagtctatagaagatccaaatcaccaaacagaaattggccacagaaggagtctctgccaaatacggtttcctcaggttccccaaggtgactgaatctgcacctacactctgtagtgccagctgactgcccgtgtatgcattagtttcccgctccagccagagcttctttggatggtagagattttgaggtgagggtttgggaggattttgttgttttgttttgttttttccaagacagggtttctctgtacagtcctgactatcctggaactcacttagaggtgtgcctacctctgcctcctcctgagtactagggttaaagactgtgcattggacttttgtttttaaatttgtggttttgatggagctttggaagataggtggggctagttcttctcaccacttctcccaaaaacctatgaattctgattattgcctcttagttttctaaagactgtttgaataagtggagtggaaatgtcaacttctctagctgcaatagtttcttgtttttcacacatgtacaaacatctttgtggatgtaatagaatgatttaaaatgtctggctaagccctatgtaattctactactattcaaattccttctgcttgcttggggttatggacatgtagagaaaggcttttcacacaaactattcctgagagtgcttccctccgtattcattccttcatttagtcattgtgtatgagcatgcacatgcatgctcatgccaatgtgtgcatatggaagtcagaaaagacctttgtattgctgggggggcggggtgttagtttgcacatgcatgcatgtctgcctgcctgagtctatgcacatggggtacctggacctgtaccagcacctgcacatatagaagccagcagagagggttcagtgtgctctgtccctcttctgttcttttgaggcagggtctctacctgaatctggagctctcattgtctcacgtattctagaagccagaaaaccacaggtaatattcatgtctcctccactcccctcagagttagggttacatgtgttcattaggtgcctaccttggttgctaggatctgaactccagtcctcttggctatgtattaagtgctttaaacactgtggcacctgtgaagaagtgtgtgtagtgtgacacaaggtatttggaagcgttttattattgtttatttgtggaattgtttgcttgacagagggtctcatgtagccagttctggcttcagacttgctgcatggtcaaagctaaccttttctgttagctacttgtcttgcttggacagaatatctggtaaaagcatcccccacccctgagacagggcttctctgtgtatccagctgtcttggaactagctctatagaccaggctggtctggaactcagagataacaccttcctgcctctgcttcctgagtgctgggatcaaagatgtgcgctgccacctcttgggtataatagaaactttaacaaaggaggggtttattttgattcacagcaccaaggatacagaattattttcgtggcagtgaagttataatggaggaacatgaggcagatactgtcaggaagtaagagatgaattctggtgaccccagtccaaggcatggtgcacctacaggaaagtgggtctcccaccttgtttaatctggataatccctcataggcaagtccagagacttaattcctaggtgattgttgatctgttaactgactacaagtataaaccacggtcttgacctcctgatcatcctgctgtcacttccccagtgatggtgtcacagacattcgccctagcccctaacctctaaccctaagctcaaatgcagtttgctgcatatcacactctacgcagtgagcttacttctcattcctagtagtgatgacttgtggtgtactaggaatatgtaatctggaaacagtgactgcccaaaagtctaacatcatagttatggataaagcttttagtttaagatgaggaccaaaataaggacgctcaatcttactgcatcccgcataggtgtgggtgtgtgtgtgtgtgagagagaggggggggggagaacgagaacgagaacgcaaggaatgggaagacaaacttgagatttgtgatctgtttatatagaaaacccagagactataaatggaactatggagacatggaaaaattgctgtggttgaaatagtgaaagtgagtgatgttttgtggacccatgagagccaagtaaaacataagagagatttaaatgttgtctaaggtggcaataggaagtatagggtccttgcagtgggtatgatatttgatctgtgaggccttcgcttaaaaacaacaacaaaaagctattaaacaaaggcatttccaaggatgagggagccagggaagatacagtctcagcactcaggagaccttggcagggatgcaggcaaatgtaggctgcataatagggagatgctatttaaaaacagctagccaaagcctggatgaataggtgacaatggtggttgtgggtgcttctaaataaattcaacatgacttcaatttaaaaatgttttcattaaacagaattggcttcacacttataatgctgtttagactgccctgtctccatctcccaagtgcaggggttataggcatgaaccaccactgaacaggcaaacattttcttgttttgtggggtcagggagcaaactcagggctatgtgctactgccgttcaaagctttgacattttgagtgtgttgtttcctctgtgatgttgctgaacacaataaatgtgaccaggaagctgtattgtgatagggttttttgcatggttgttgaaaatagagagctcaaagttgaattttaaggcttagtttttctattcagtacttaaatccatgaaatatggggccaaaaaggactctgactaagttaaactgaaaatcagattgtataggcactgggtgtaggtcagtggtagtgaacttgcctaacagactcaaggctcttcattccatctctggcacctcaaaaaatcaattcgtttacaagttaacacagttgaaattatagctgatgctaattaaggccctttatgtaccaggcaatgtttggagcatttgatctggatgcaactcagtacagtcatgttgcaagctgctcctaccttcccccttagccttcagcaccagatcagaagatgccccacagctgagctcttttcctgcttcctaggaatgcaaacaaggcctcggagggaattgttcactctctgatattattaagcttattcttgtgcttggcttctttgggctgaggggtagatagacagtctctggtgaaggaagtctgaagccttagtgttcagaactagccagccacagtgaatcttcggattgttggtaattttttggtttcattttgtttacatgtgtttgtttactcagccagtcactagacattcaagttcctctgtgaaatatattttagttggaagcaggtggggtacaaaaaagtatgtgtgaattaaaaacaaacaagaaccatgtttactttatctttcgatgttttagacttctaagaaaagcacagagaacaggtgaagggtgtgataactgccgtatagggaccgcaagacatttgtaccgggtttctgccgggttgtggcttgcatcccaagttcacattttgtttctattttgcctttgttatagtctcctaaagctgtcaggtgactcaaattaaataagcactgggtagtccaagtacctgtcaggggggcctacagcagcgtcttccctcttccaggaagtctctggtgagtgggagtgtgtgcagttctgacttggccgccctcttgccaggactgctgcagtgagggttactgagcctagatgatgaagtgatcttgcactggcaaacctcatattttgagaatctgaaaaataaaacttaatactcagttgtacattttaaaatagatttaacttatcctttttatttttaaagattttttttaatttgtttatttatttatttatttattttatgtaagtacactgtagctatcttcagatgcaccagaagagggcatcagatctcgttacggatggttgtgagccaccatgtggttgctgggatttgaactcaggaccttcggaagagcagtcagtgctcttaaccactgagccatctctccagccccctatttttaaagatttaatcatgtatttaatgtatatgagtgctctgtcttcctgcacaccagaagaaggcgtcagatcccattacaaatggttgtgaaccaccattttggtgctgggaattgaactcaggatctctggaagagtagtcagtgctcttaacctctgagccatcttcaacaccaatttagattcttcataattatttgtgtgcatacgagtgtgtaggcgcccatatagaaggcgatgtctaatagagggcacaggatccttcagtctggagttaatctgaggctgtgagccacctgacctgggtgctgggagctaaactctgggtctctgcaagagtgttctgtactcttagccaccgagccacccctccagcccctaagtcactcattttaaaactgtacagtgttgctcagttttcttctctttctctttctcttccttttattttattttggccttagccacgtaagtgctgggactagcagactggtttatttggctcattcattcatttatatattttgatacaagatctcactgtataggagcctaggttgagctgaaactcacagaaacaaacctggctcagctcacttataatagaacgttctattaaactcctcagataatgtgttcaattgcacagtatctgaggtggatttgtgtgactttacctgggatttagttataacagtgcacttgaatcggaagtagatattggggttataggatgtcaagacaggcagctgtaagttgagcttcctcatgtcgctgtctttctggcatacttcttccttcatgttctcaaatgtccttcatatagactgtatgagcactgactgcccttccagaggtcctgagttcaattcccagcacccacatggtggctcacagccatctatagtaaaatccctcttttgggattcaggtgtacatgcagatactcatacattagataaaaagctcttttttaagaagaacaagaagaggaggaagaggaggaggaggagaagtagtagtagtagtagtagtagtagtagtagtaataatagtagtgtgtctaattggagtaatggctcacaggttgaggctgctctggtgattgccgttcatctctggacttcattctctttttattctctggctgctttggagtgagcagctctgtgctgccctccgtatcatgacttgccacagacccgcaccagaggccaagagaacatgaaccttggaaacaaggcgggatacatttgtttttcttttcaaattgtttcaagtattttgtccctccagtgaaagggggcacgctagtttgtgttctctctctctctctctctctctctctctctctctctctcacacacacacacacacacacacacctctttttatctttcttttcttgagatacttttaacttcactttctaaaacattcactcctctttttttttcctctgcttatcccaccactgtcagcacagaaggcctattatcttacagagaattttactctgtagtagcaaacacattaatcaatccattcagacactagagacagcatctgaggctacaggttaagctctaccatgtgtgccagctctacccccttcagaccctataatctggatacaaattgggtttgattaacttcctagggtagctgacaaacactactccacatttacttgttatatttaacaggaccccaagcaggtgagtggtatgtaggaaccatctggaggggtcttgaggacatgagcttctgtccccaaaacgttgatgtataccaactcttggtattctcttgggtgtataccaaccacctatggagaagagctccatagatgagttctctttttatttatattttgtgtgtgtgtgtgttttcccagcatgaatgtctgtgcactgcaagtggagaccagaagaggacattggatctcctgagctgccctgttaaatcctttggagagcagccagtgctcttaactggtgaaccatctctctagccctgaattgtttcctagtaaacatcttcattgagcttcccagaagctctctgaacttctgcctcagtggggatatggtgatgattttttagataggcgtttactggggtttaatggagggagattatgcatcattggtcattggtgatcaagttaaccttcaaccaagtttttctttctgaagtttggagaagggactaaaacctcagtcctttaattccactttgtaatcctaccttgatctttctggcagcctgccccatcctgtcgccactaggctttgggagtcattagcatagaaaagagtgcacccttttgaggctccttctctgtcaggaaatgagggcaatgaccaaatgtgtctgggaacctgaagtcatttaacttttctttggttcctgtagcacctgcttctgatgtagcagaactgagagttattgtcacagcttcttgtgcagtttgccggtgttaacaatggaaacaccactttgcctatgcctgcttttgctgctgggaagggctgagtttctcctatggacatatgtgttattcgggagcagagttcattttgtgagtagagtaaattaagacataacagtttaatgggtttctgtcaagttgtgtgcgggtagaggaagatggaaggtggtggttactggtgttgccagagcctgaggtctgtctagaagttggtggaaggaagtgtgtttatcccaatcttaaacttcagtgagacatcctagtgttaaagtgatctctgctgtgggagtgaaggctttctctccagggccccttttcctcttaaaagccacctgggacttgacctcctagggcaagcatctgcatttacacatatttttctgtaaattcctttgcacaaaggagaaggtagggtgtgttagaagataccctgaaaaaagggtgaaccagcgggtcctggttatactagcactctggagggtaaggcggctggaagcgtccctgcctgtctgggatgcagagtgagttctagaccagcctgagctgtaggctgtctcaaaataaaacattttgaatggactggggttcggctcagtgggaacatttgtttgaatcctttgtaacacacacacattccccacccccaccactctcaaattttttttcagctagctgaaagattggggaaaatattcataggaagcaaaactttgacttgactttgcattccagttcatatccttcagaatagccagctgcatgcgtttgtgggatattttatgttcttttgcacgttactataaaagtggtatctgcctgcactgatccctggccacactgggtgagtcttcctcaggtcagtgggagctttggtttatccttccgcagcagttaggggacttgggaagcctggactaatacagacagataaggccaagtgggaggtgtcaggagccctgtctgagtctttctgctcccgcctaggcatacaccgccacacacacacacacacacacacacacacacacgcctcatatacagtacagggtttggtacctcagtcaggagctttgtttctgaaatggagcttccctatgttgtctggtatggttttgaagtcctgagtcaagcaaacctcctgccttagcctcttaagcaacaggggcaataggtgcatgccattgtgcctgcctttccaggctgatttgttgttgtttggagaatatttgtttgcttgttttaatgtgtatagatgttttccctgtatatatgcctgtaccctttgtgtgtccaagaaggccagaagaggatgttgtgcccttagaactggagtgaaaacagacagtaatgagctgccatgtaggcactgggaattgaacccaggcagcttcatttttaatgttctactgaacatagtgctgtcattttctatgaaacggacactctggctgtgacccctgagctggtgttccttatcgcctgtgtgtgccgtttgtttgcatggctcacagtgctgttcgtgagtggctaaaactcactgaaggtatctcatcaattttgccgttctccagacagacgacccagttgatgaaacatttcactgcagccttggagcagctatgtgtttgcctgtccaaccttaaatgcatgcctgactctttagtgcagaggtctctattgtagacagactccgtaccattgtcagtagccataattttagggatataattaaagttaccaagtggaacagtagagataaaggcatgtggtttgttgataggaaagtcaaatgttacatcctgggctaattattagacaattaattgtcttaagcatgatggctgagacaggaaaagggttttgtgtatcttgttagatctggttagtatgggtgagcgctaagtagaaattagagtttttgcttttttttttttttgtgtgtgtgtgtgtgttctgcttgcatataagtctgtactatatgcatgcagtgcccatggaggccagaagacagtatcagatctcctagatagaaaattgtgagatgctaagtggtgtgtgtggatgctgggacctgaacttaggttttctggaagaaaagcctgtgctcttaaatactgagccatctctttgatccttaaaaagataatttaaaagaattattattccagcctctggggagaccggaagttgcagggtctgaagttagggaactctgaagaaccactctctttagaaaggagatggtctaaaggtacagcttagtggtagagcacatgcttagcatgtgaaggccctaaactcagctgcagcacaaagagcaaatgtgtgaaatggaagggagtccggccctgtgttggaactcaggctgccctaaagccagcctcctagccctgacctctgtcccctgcaccaaaccattctaactgtggtcaaggaaaccaggaataactcttgacttttctattacattttgttgggttttatatcttacaaaattgtatatgggtattatgccttttttttttaactttaaaaaaatatgacattctgtaagacaacgtgtggttttaggttgtttatttaagagatgagttagcatattcttcttactacccattcattttgtaactatttactaaatagctacagcattacataattgtaatgcagtggtagtaggtgtggctatgctcagtgcttcaaaaaaccaggaagtgcaggggaggaaatggtagtttgtctttggttttatggggttttggtaggttttttttgttttgttttgttttttgtttgtttgttactggtttgtttttttgttttgttttttgttttttgaataaagcccgtgttctctagttacagatgtcaggtctgtgacagagacagtgtaagtgacagtgtgtgaagccaggccctactgggcagattaggaaccctgctcaggttccactcacatactccatgtagccttgaactccagattttattatctgcacccaccagggactgggatttgaagcatgtgcctgacatgacaggacactgggaatttcaaacagaaaatgtaagggacacagtatggaaactgtaataggctgggttataatgcccgagagcagtggctctcagccttcctactgccctttgatacagttcctcattttgtgatgacccctcccccaccataaaattatttttgtttctgttttggaattataattttgctactgctatatgtcataatgtaaatatctgtggttgagaaagagtcattcgacctccagaggggtcacaacccacaggttgagagcagcagctctagagtatcccacatgaccacaagaaatactcatagtttgccaatagaagtgtgtgtgcgtgtgtgtatgtgtaactttggtggtggctcacccctttaatcctgacacttgggaggcagaggcaggcggatttctgagttctaggccagcctggtctataaagtgagttccaagacagccagggctatacagagaaaccctgtctccaaaaaaaaaaaaaaagtaaaaaataaaaataaaaggaaagaaaagaaaagaaaagtagttacaggatgttgcaagtcccccaacatcagtgtccagtcaacatcagtgatagttcttcaccgaacttgccccagaaacccctagtagccagctgtagactggtagctgtgtttcttgtttttgttcttaatcctactaaaactctgttaatgtacatatccttcctttttcttattttgtgtgtgtgtgtgtgtgtgtgtgtgtgtgttggctagagtcaagcccagtacttacttggtgaagtctgtgccactgcactatatccatcaagaattgaccctcagttcttctgctgatgaaatcagaatggaagcagggtgggcggggcagcagagaggctgctggtgtgcatgggcctgctagttcctagtgagatgctgagctgggagctgggcgtttagactgtgtccttcccaggcaccatcactagccctgagcttttttttaaaaacaagtctcactgtgtagccccagctgtcctagaactagctatatagatcagggtggcctcgaataatggccttactctatggctgtatgcggtgcctgtggtttgaggtgagtaagaacagaggaagaaagtatatttaaagttcatacttcccaggtgaacttagttctgaatttctggtccttttgtttgtttggggtttttgatttgttttaacttttgagacaatgtttctgtgtatagtactggctgtcaaccacaccaataaagaaaggcatcaatgttgacctccgctgactgtgcaagcaagggcctcagagagagtttagaagagcaagaaaaggcacagccagggaagcctagtgttctgttaccagatcatggaaggaaattctggctcaaggtagttttttaataggttaatgagtgtaaatgaaaaactatcatttgcagcagaaggtgctggtctgagctgtgttgagtcttgtttgtccatactggctgagattctggcctatagtgttagcattagttgtatgatgtgctgacgttcttcctgtgtatgcagaatgggcctcattgcgtcctgctcacagcagaactgtctgaggctttggagacctgtgtttcagttgtacagctccaggtgagaaaggctaaacagtaatgaataatagtttttcttcagtcgttccccagtggtgtaccaccacagacacatgcataggtaaacataccgtttaaccaatctagtgcctcagatgggaagccagcctcttcatctctgtggaggcagctgtggataacacccagttctatgcatgtgatgtgggagcagaggcgaatctgacatcactgtgatgcccactcatgggtggtggaggcattaacactgcctggagcagaaacataactactgtgggtgcttctggtcacagcactacctatgaactcatttcgattggtttttacagatagctgtatggtcgttccacagcctggtgcaggctctgcaagatgtgatgctcaatctctgctttgaggttctggtctgtctttttactcatcctgtgggcaggagtggctcaatggttaagagtactggctgtcctacattacacaggttcaatttccagcaccttatggtggctcacagcctcctgtaactccagttccaggagattgggcactcaagttgtgtgcaaacatttgagcaggcaaaacacccacgagcgtttaacatttaggggtggaaggacaggtcagaagatctaacagtgagaggtcagaaggaggtcagaagacctaacagtgagaatagggatactctgcttcaggaaaatgggctgagggccaaagtgtctttaagcctggggtcagtttagggctgatgctttttttgtttttctggtttggttgttggttggttggttggttggttggttttgttttgttttgagacagggtctcatgtagcctagcagttagtgataatgtccttgaactcctgatcctgctatctgccttctgggtgtaaagagattgtaaaggcatcatacctgacttctgactctggttttattcattcagcttaagacccaatagcatgaagcccaggcctgtgtggtttctcataggttgatttaaaaacaaaacagacaagagcatcaagcacagtgacttcccactacaggcctttgcctgtacatgactcatcctccctcactccacaccgaaggtctttgggatgaagaacctgtttccattgcttacagtgaccctaacagaactaagtgggttgagggactgactcttatctactgcatagataatcaacgccccatgaaagcttagtaagcttcagttttggttctcctagggaattttccatctacttatgtttacttcaggttactcttaagttctgatctccaaaacttaactagaccatttttgcaattgttggagaatttacctttgctttgtatagtccctgtgtggtattcctcctgtttgccggactcacactagtgaatgtttactgaccacctttttaaaaattatgtggatgtgtgcatgcccctgtccatttatgtgcacctgttcttgcaaaatgcctgaagaagccagaggatctcgggtcccctaggactgaaggtgtagctcatctggtaagtgggaaccaaacccacgtcctttggaagagtaataagtgttcttaattgatgagtgatctccagccctgtgagcgtcttctcaagtcgggcatctgctgtttaatgcttgggatcctgaatctagagtctagcaacatcctttgtgtttgagttcaacgagaaaagaatcagtcattcattttctttccactagactctttgacttgagccaccaaaggatcctactgagagagtgaccttcatgggaagaggctagcagaaactctcccttcaaatcaggaaagatagcaatgtcaggctgtagggttggctagcagcaaccaggaggatgtgttcctggagcctgggggccgaaaggcaggatgtgtggagaaagccgtcagctgtggatttttttttttttttttgtgaaggaagcattctagaagccagctgtagtggatgtgggggatccaaagtcataacagatgtcagagtagcatctggtgttagaactagtcccctgaaaggtggtgggctgtcagaaggtgctgctcttcttgactttggtttcccctcaagagagtgattgtttcaaagggaggtctctgtccacaggttgggaaaaactggttccaaagaagtcagtaactagaacctctctagttttaaagatcttaagtgaaaagttggtgggctttttttccagagttgtttctgggatttcaggtttgagtgggaagaatgcagagctcatctgtcagtgtccttcctcctggtggctttgttcaagcccaaaggaacctttcatttatcatgggctgcgtgaagaaaccaccttcacctctcagtcacctgcacatgtgcatggaggagtggggggtcacagtttctccacagagcagctcttcacactccttttggccaccctcccatgcctaccagggtgtgttgtggcaaagtgatttctccccagaagtgctctcaagattttcatgtaaaccttcagcatgctaatttaagtttatagcttaattatgaggaaggaccctagagctttacagtgtgttttagctgtctgtagtgcagctctggctgtgtaaccaaggctgcccttgaactcctgattgtcctgcctcccttgtccttgggataacacacatgcactactatgtcccgtgtcatctggcaattttaagataagaactaaatgtctaaggaagttctcagttttctgggaagccagcttctcctagcagctgcagtaattaatggagtccccagaaattggccatcagtgtgtcctgatagtgtagcagcctgcatggaggcagagtgccaaccatacactactagcttttttgtgtaggagccagctggcctgacaagacccttgaggagacctagccatggaccaaatctgtgattagaaaatctatctgggggctggtgagatggctcagtgggtaagagcacctgactgctcttcagaaggtccagagttcaaatcccagcaaccacatggtggctcacaaccatccgtaagtgtgaagagatctgactccctcttctggagtgtctgaagacagctacaatgtacttacatataataataaaaataaatctttaaaaaaaaagaaaaaaaaagaaaatttatctgtatttttatgttgtattttttaaacttgtgaagtgcatgttcatgtgagtacacacacacacacccctgccaggatcgcagagctattttgagagtgctcacacagttgcttgtcctggaacaggggctgtgttccttgcagaatgttttccctggccacagatggatgaagaagaatctgttgatgtgatggagcttagctttctaggtgtggaagctggggggggggggggtcctccttccaggtaagctgattctttggaactcagcactgggaaaggttccaggtagaactggttttcctgggtcactggagtagtgaagggatcacacagcgcatcttgtgactgcagtaaggtttagtgccagcttgcaaagaaggtggccagttgggtgagggtcagttactgtgctgtgtgcccacatccttcttctttggcaccttctgcccagtcaattgttcctcctctgcaggtagcctgctctaggagccctgctcacaggctgcaggacttgctggtttcccagacctcctgtgtttgttcagaccccaggacaaggggctgaagtgcatattttacataccaaagcaggcctggccttcaaattctcccagcatccctcagtccctacctggcagtcccccaaccctgaaatttccagcccaggaaccaggctacccttcccccaggctcttccctatatgatcaaacgtttgggtctgcacatgtgctttctcttccccctccctttctcccttcctgtggccaccccctggcctcagtccttggggccagtgaacatgcccaagagcaccttccgaataaacctgcatttaatacaatctaatctggcttgaattggctcattccactggcagagaaatactgttatcactcaagtcttctctttgcaaagctaaccaggaagcctgtcctagatttatagtcatctacccccacctgctgtaacaaaccaccacagacggggcttcaaaagcaaaaatttattttgtagtggttccagagatttggaaacacaggtggtagtagtgttgagatacacacacacacagagctaggcctctcttgtcttgtagctggctgtctcctcaggtgtctgacctaatataagaacaccaagactggacacacaccacacacctttaatcccagcactctggaatcagaggcaggtggatctctgagtcctaggacaaccaggctataaaaaacaacaaagaaggctggagagatggctcagtggttaagagcactgactgcttttccagaggtcctgatttcaattcccagcaaccacatggtggctcacaaccatctgtaatgagatctgatgccctcttctggtgtgtctgaagagagtggcagtgtactcatatacataaaataaataaataaatctttaaaacaacaaagagtaccagccaggctgtatcacccaaatgacctcatttaccttgaccgcctctttttgttattggattctgttccaaataacagcacactcaaggacagtggggatcaggacatagaatggattttgatgaacacaattcagcccatgcacttctatcctgggatgcttcagggttccaggagacagccactctggctacgagcacacccacacctatgctggcttatctaaattctcataagatctttgccttagctaaaatccccaaatttaggtaaaaagagttgaggtgtttgatgtctcagagtgtgaaattagttttccctttcctcccacctcctctgtgtatgtgaacgtctgtctgtgtttgtgtgtgagtgctcacatgagtactctgtgtatgtgaacgtctgtctgtgtttgtgtgtgagtgctcacatgagtactctgtgtatgtgaatgtctgtctgtgttggtgtgagtgctcacatgagtactttaaagagtaatctttgtttctgctcattttattaaataaatgtaatactattacaaaaattaaataccctttctttctctttctttcttcctttcctttcttctttctttgtaatgaagaagtctgtcctttatttgaacattcaacttgcagaaatagattatacgtgataatttgctattgagaccattaaaaaaaacataaaacacaagaaacagtgttagaatgcttgtcctcgtttcctggccatcattataatcttctacccaaaaaccatgtttctcctaactctcctttctgagctcaaaaatggatttccctccagcccctgtcagtcagttatcacctcagggaaatgcccaggtagaactgagggtcccttaaagcatcctgccgcacgccaccctccgttttcatctctcgcccagctcctgtcattaaatgttacatttcggtgtatattaccgggtggccctgagtgatgtcactttgatgctgtgcaaggataataagattgcacatacaatgaaaggccaataaatagaaagctgtttgtgaggcggagaaggacgggctaacgcattacagccttccctgtgcctttcttctctgctgctacaagtgtggtttcacttcaaaagcagacaaacacaaaagacccattagcacaggtgatatggcgacagagccaacagcatggcatccttcttgccctgttgctgaactccagtaaaatgaattcaggaaataatagagtgttcagctgggggaacaaaaactgatgacaagtgacttcctagggtttgagatgtcaactgagaaaacacaattccggtattggtgttatatctaaaacgttaacagtcttcatttaagcaaacagctcagtaaagccaaaaatcaaagctgtctgtacccttatgtgtgggttctgtggtacaccttgctgctgtgtcagaattcccagtgaatccctgagaaaggagcttggtggccttcacatttggtagaaacccctaggttcgtgctgtgctttcaacaatttgttatatggccttgggctcatttttaagtatgtcgtttataaagctgctacaggaaaaaaaagctaaatttatttttttggttaggtggaagaatcttatatatgttcgtaatcgatacttggcttttagaagacctattggcagaagcagtaacaaggcactggacgcagggacacccaccccagcagtgggccggcctgcctgtgcacttgttgcagggttttggctgtgaagtcttggctggtctagaactctcttagtacaccattttgacagtcctcctccctctcctcccaggtgttgggatgacagtcatataccacatcttaaagtccacttactcaggattatttcttattttgtctgagggaggtacacgtatagaagtcagaacttgtgagagccagttttctccaaccaccatggcttaaggggtctgtggcttggactgaaggccaaggaaaagccagttgaccatagtgtttggcacaagccaagagctgggagaggtggagaataggagaaagaaaaggagaaatcgggaagtgaggaactagctggaacctggtttggaaaggtgtcaggtatggtcagggctttgagaagactgagctagcctccaaagaagagagggtctaccaaggaaagggctacagcttccaagctgtactttgtagtagagatgtgaggcctgaggtaggatcacaggctgctgaaccagaaacccagacagcagaggattaggaactgaaaggtagcctgggctatttccatttctttgtgctatataaatgaagtataataactggaagagggggtacatttttaacctgtcaaataagggatttcttttctttttctttctcgtctttgctccttcttccttctactagaagggtacctgattcagaaccatctcttcgggctcttacatcattttggtagaccaaggccaagagcacttcccttgcatttgtctgtcgcagaagagatgctgaggacaggctgtgctaagtcaggagtcttctgagcctcttaagtgcaggaggctgtgattgcagaatgctactctctgtcctggaactaagagctctgcctgcctctgccttctgcgtgctgccattaaaggcaagagccatcatgcctggcaagctgataggacattcttaagagctggctgctcccaaacatagctgctcagtgctcagcctctaacctgagttttccccaacattgctagctctagcttgaatcagacagtggaaggaaggacctgcacaggggctctgtgccaggacactttactaccaagaaaagatggcactctaattccagggaaaccagcaagccaagctaggtttcttgagttggaagattcctggagctcatccaggggctgcttcccctttccagggatggctcatagtgacccccccccctttccagggatggctcatagtgacccccctttccagggatggctcatagtgacccccccctttccagggatggctcatagtgacccctcccctttccagggatggctcatagtgaccccccttttccagggatggctcatagtgacccccctttccagggatggctcatagtgaccccccctttccagggatggctcatagtgaccccccctccaagccctccccatcctcacaccttgccagggccttctccactgtctgggtacaggggttgggaaaggctgatgctctctcgctctctcttgctctctgccacctatgtagtttggatcttgtttttaattgtctgctgtaggtgcaatgtccccttgggaaatagcatggaacccttgttaaaggtggtgcagagcatggacacatctgtaatccacagatgagggacaagtgtcagtcctggcccagctacgtgctgagatccttggcaggagcagattctgcagtcattctccattcttcccgtgggattggttgggagttatgaagctcccctgtagagcattctttcagcacagtgttggcattctgaattaacaagagtttcattttaaattcatataaacatcttctacattggttacttagcagcccttttttctatgtacccatgttaaaatatttatctttcacataggaacaaataatgctatctcctttttttaaatttatttatttaatttggggggggcaggaggtagtggtgcacaccttcaataccagcactcaggtgacagagataggcagatctctaagttcagggccatcttggtctacatattgagttccaagtcagtaggggagagaggcaggtggtagttgttgtcatagcagctcaatgtctggctggaccaggccaatacagttccacatgagagcggtttcttgtgggggtaagggggaaaaggggtggtggagacaaaggggaaagagggagcgaaggtcaatatggtctgccttttatttaggctataacataacccactctcaggtaagggtaggagatgagccagatggatgctgggaatgcatggagattgccatggcaacagatgcatgggtccctgttgactctgggtgacgtcactgtcatcactggattcagaggtggactgtaacccatgaagccggttccaataccagcacacctcccttttccttatcgtaaagagaaaaacaaaggggaaaggggaagaggggtatcctatctcttaaactgcttcctgctgtccaggggcattgtcaatttcagggtgtagctgactttcaccatcggggtccacttagaaaatgttcacattaggctcctctgtgaacaggggctgacaatcctgtaacaggaactgattaatagtttggttagaaattttttatatttgccgttgaaggaatgtagaaacaagattaatgaggcagggagcgaataataacaccaagaagatgaaaaggcattatgaaaacgagtatccacttccatatatggtgtttgaaaatccaggaattggaggcctcacgttccttagtatggtgcaaaaacagttggcctgtagctctcacctctgttggaaagtagaaagggttaggtagaagaggataggggtcagagagactcgtgggggagggaggatggtcagaggggtgtgtgtgtgtgtgtgtgtaagaataaatacacttcaaagtaataataagtgcctcaccttttcctgcccctcaccagcctcccagagggtcctgtctgagaaattagtgccaagccaaggcgttagagaagtacaaggacagggcagggtgatgggtctcaacccagatccatgcccaatctgggggcatgtccttaagagtgggccttcagaggccaagcacacctttactcttggcatttgtaaggctgagacaggaggatctcttgagtttgaagccaaaggctacatagaacctgtttggaaaagaacgggtggagctttgatgtgttagatgcttccagtgcctccgcagtctatacttcatttccctgggcccctcaggacagagcagacagacacctcatctttaaaaaagaatcaccttttaattgagcaagacaagagactcatgtctcagctttacagcagctgacaaaaatgaacaaatccaactctggagttcaccaaatgccagctgataaatgtcaactgatagaccagcaaacctgcttgtaagacacagggggcaggcaggcaggcaggcaggctggtgctggccagcctcagccttcagcctccttcctcatttgtctgctagagacatacccatgacaggatgggacacagcctgctggtttcgccacagcagcagaacttgtgcctgaaatggctttagaccaggtccaagatgggagcaactccaccccgcatcacttcaaccaggctacacaggcagctacactgacacgctatgcttgtgtgagtgaacttgatagaccaaccaagcccaaccaagaaggctctgaagtcaagtggtggggaagatgggaccctggagctgtttcccacagctctggctctctgttagtctttgctgaccacttaagaggaaggctttccctaagctgcacaccccctccctacctcctgcctttgcttctgtgtatggcctgtatggcactcccttccccttgtttatcttttcacagaaacatcattagaacccaacagtagtctccccctcaccaactacgtgttgtatgaatatccagggaggacatctctatggattggagcctttgcctgtgacccagcttccagttacaaaaaaaaaaaaaagaggggactgggaaggagagggtgctgtaacacaggccagtagggtaccacactggggcctgtggctgacaattgaagaagtggctttgtcctcttccctcccaacccccatctttttttcccaggctctgtattggattagcatctcatggtgtgtgtagctacagcacctgatgtcacatgagttggctgtgacacactattctgagatgaggtgagagcattgggaacaaaatgattattataggccattcgtgtcaacaacatttagacctccgtgtttgcttgcaagcaaaagcaggagctaatttgcaaggctgcctttgtggagctgccttttgatcaatgattgcctgtgttaatgtttcagtgagctattgatttctgcagcagcttttgttcctgaatttatgtgcagcaggtctgctgtgcaccatgcatgtttgattaaagtgcagttgactccgttcccagtgaggctgagagctgcttcactccctatttgtagaaccagagctttcccaacatgttcttttgtttgtactcaagacctagccacccatgcaggcagcaatatgctgtttctaatcctccatgtttaatccctcagtggccatggcagtctttgagaagcagctgataaaacctggcctggatttattattgtttttatcaacttaattgacatataattgacatgtgtcatatgctctgtgtggaggggtgtaaatgaatatacccacattctaagtatacagtcagttaagttttgacaagtgtatacatctgtgtaaataacaccatttatgtataggcctttgtatattcttcctgggtaattacttggttgggtcctccgcaggcactctcctgacccacctgacagccctcagcagccactgacctcctgttctccctgtagctttcctggtcattaacatttcagtgggtacttaagagtccaactgtaattcctctagctaaacttgcttcctttttcttgtttggggccactaagaataatgtttctgtgaatgtctgtgtgaaagtctttatgtgggacctgagagctgcctccgcatggtcctgctcttctagaggagcgagttggttcccagcacccactgcatgcagcaaactacctgtaactccagctccagggaattctgttccctcttctggccttggacatccccataccatacacagcaggaatttaaaaactgaagcctttgagcacatttttgttcttttggataaacaagcaaggcataaagtctgtggtccttgtttaagcaggtaaaatctgcaggcggtttttacaaagtagccttgactgcctgtgttcccaccagcaacttctagttgtgtaggccttctgcattttaaatttatattctttaatttcctcagccagggtttccacctggactaggtggctggtcatcgtgacccatggtgcccaggtttattaatctgctctgggcgctttattcttccattaccgctgttgtaacttgttgaggaagcttgctgtggcctgcactattacacttaccttgaggtctcagctgttaaaagacaacaagttcaggagtcaggtggagtggatcagcctggcttctggaacctttttactatttgctgtctagcaatgggctggtttcttactgtcactgatctctgaggtctccttttctagtctagttgtgctgtctttttatattatttaacttacgtgtattggtgttttgcctgcatgtatgtctttatgaaggtttcagacaattgtgagctgccatgtaggtactgggaattgaacccaggtccacgaggaagagcaatctgtgtggtcttacccactgagccatctctacagctcctgtgctgtcttctaaaaccattccagactcttccaaacattcatgtttaaaaagtagggtggagttgccatgagaggcagagacaggtagatctcttgagttcaaggctagactggtctacagagagagttctgggatagccaaggctacaaagaagaaccctgtctcagaaaaaaaacaaaaacaaaaacctgggaggttcagatgctgcttagaaacgtttttgttggggtctggagagatggctcagtggttaagagcattgactgctctttagaggaactgagttcaattcccagcaaccatgcggtagctcacaaccatctgtaatgggatctgttgttctcttctggtgggtctgagatagcagtggcttgcttttggtttttgcttcttctctccagctccagagtaacctctggtctattggacagagttgcccacttgcgctgaggaagtgccactgaggaagtgccactgaggaagtgccactgaggaagtgcttgaagggtggctgtggcccacaggataaactaaggcagctcacttttcagtaggcagagattttgagatccactaactagtaggtgtcagtgcccaattttagtgtgggaagctgcattccctgtcacgatggtggggagtaaagtggcaggaggcaagagaagcaccatagtaactcacctctcaggctcagggcagtgaccacagcacagtgacagagacgtcagagcgctccctggcagctttcctgagttccccttattgttcagttagcactaggtggagctcagctgaggtgcacacttacctgggcatgagtgttgtaggctttggtggaagtcccctgccctccccagcctgggactgtgcttcatttgtgcagcattggtggtaagtggcattgtgttagtattgaacggttaggaaggttgacgcacatccacagcttcaagagatgggtacattagtcaggtcctgcttcatagacctctattaggatctgatgacaggcatggcagctcacttctatactcatagaacactggtgttgggagcaagagggtcatgagttcaaagtcaacctgggctatacagtgggaccctgtctccaaaatccaagtactgacacctgggacttgccatgcaaatgtgagaaactgagtctgctccccgggtaccatgtgaagaagccaggtgtaatggtgcatgcttgtgaccccagtgctgggctcagaggcagggccatccctgaggctagctagccagccagcctagcctgcctgagaagttccagtccattgagagttcctggttctcctccctcccgacacacatgtacatgtgaacatagacctgaggaacaacacccaaggtagtgttggggacactgatagtcacggccaccggcagtgttggcatgaaggctgctgtgactgggcctgtcagtcacaagatttgcacatggtctccagacattcttgcctggttttcctacccgtcttcctggctccccccaaaacagctttgcctcttgctttcctggtccatccatgagatagcaagtattcgagggaaagacggagcaaggctcaaaagcagcaagcaaaagtattgattcatttaagactgaagcagagacttcctaagaaataacacttttataaaaaaattttttttaaactccattatttcatatgcttaataaattttaaaccttttttgttgttgttgttttgtttttgttttttttgagacagggtttctctgcatagccctggctgacctggaactcactctgtagaccaggctgacctcgaactcagaaatccgcctgcctctgcctcccttaaactttattatttaaaggttgtcactggccagcctctgctaggtgaaagtgttctttgtgtgggagacaggaagcagtgagctcagcgtatggctgcctcggtgctcccacaccgttacgctgcctttttcaggaaggcttagcatgtgaagggtgtcggtccctctgtcttcttttgctaggccccaggaatttcctgctagtttgtgcaagtgtgcccattgaaaaggtcaagggaggtagaagaaagcattttgtttcctggccctggcttccaccagttcacctgtggtctgtttggtagatagatgtctctgaggtagtgagcacccctcacatacttgtgatttcactgggtgctggacagatgctttctatgcacactcacaactatggctccctaaaagtgggtaccatctttcctttttgtctcttgtgcagtctgggttcttggtgtatggagtaatactctgctgggctgcaggacggaaccctcaagcttcactctggaacactgctgccccctgctcagcagcaggcacaggaggatgtgatgatgggagagctgtgcgggtgcacactacagctgcctttctgtcttgcagggggaactgattaccttctattactactggaagaaaacaccagaggcggccagctcccgtgcccaccgccgccaccgcaggcaggcagtgttcagaagaattaagactcgcacagcgtccacccctgtcaacacgccctccagaccaccttccagtgaattctgtaagtggggtatcttggcactgctcgcatgcaggcatatctgtgtccagctctaagcctgtagacctgctgagccagggatttgtatgttgtggtttgtgtgttagtgtgttcatgtttgtatattagtgctgacaactgacaattgtgggagaatttaaaaattactctttttttttttttttaaagatttatttatttcatgtatgtgagtacactgtagctgtcttcagacacaccacaagagggcatcagatcccattacagatggttgtgagccaccatgtggttgctaggaattgaacccaggtaacctggaagagcagtcagtgctcttaaccgctggagccatctctccagcccttaaaaattattcttacatttaagcatttctaataaactgttcttttgtattttgtgaaatgtaagcttgacctaaggttccactttcttcttttgtctgctgtaccaaacttagcttcctagtcctggagtgacagtcactctgataaggcagggaggctctgtgggtcctacagtcttggcccctgtgagctggagtgaaagagtagagctatgcaggtctgcccagcccagaacactgcccaggggccccagtgttgtgtgttctgctttgtgagagccagaagccatctaggttcaataagacggaattctaggctgctcggatgtacgaggaaggcattgtgggtacagattcacctgtgctggccaccacaggattcaggtgtgagtgacatcagcctcccaaaatctagcagggcaggaccttgagtactttccgcacaggtgcaagctctttgctctggtgacagctcctgaggaattaaaaatgagcctttgtgactgatgcttacctcagtatgtgtggttattttactgctggtcccattcccagctgaacatgatggtgtctcttctgtttccactttggcccatctttgtacagtggacctgagttcagctagtgaggatgactttgacagtgaggacagcgaacaggagctgaaggggtacgcctgccgtcactgcttcaccaccagtaagtggcctcgggtgccctccatgcagggcaggtgctcactcccgggccgggcgaggctctgggctgccagattaagaacctttcatgtgctggatggaagtgtggtgagcactgactgacttgatgcttgggttgcttgaaagccttgagcctttcttcttctgacttgcttcccggtgagctacgctgtactcagaactaacttactgggtaggagggactcatacacggtgagggggcagcttctgttgttcctgagcagtggttatcatctgaaagaggtggctacatgggactggccagtggaatcccctcatcagcttgggttgtccaggggcaggcatctatccaagctcatagtcactcttgtgactcagggtcaagtggagcccacagaagggcccctctgttcagatatcccagagacagatggtttccaacattgcctgcctccactcatgtagcctccaaagactggcaccacgggggccgggaaaacatcctactgtgcacggactgtcgcatccacttcaagaagtacggtgagctgccacccatcgagaagcccgtggaccccccgcccttcatgttcaagcctgtcaaggaggaggacgatgggctcagtgggaagcatagcatgaggacgcggcggagccggggctcggtgagcgggggcgcgcgcacacacacacacacacacacacacacacacacacacacgtgccctccctgaaggcagtggccttgcctgtggactggggccatggagtgctcagggagcttggtgttgtttgtaatccagtgccacctcccccgggccctcggaactcttgtctcgggcatgtacgccacttgcctccaatgggcacatctctaacttttaacttcgtagtttctttttcttagaatttgatcctacatttttacataggttagtgaagatttgtccacctagccatggtggctcacatctataatcctaacatttgggagctgtggcagaaggattgccgtaaactcaaagccaacctgcctacatgtggtacctttaatcccagcattcaggaggcagagacaggccaatctctgaatttgaggccagcctggtttatggagtaaggtccaggacagccagggcgacacagagaacccctgtttgtggggtgggggagcacagcaatggctgcagctttgtttaacctaggtcaggtgtgtctagggccatgcgagggtctttgaggcttgcggcagtgagcactgagggatctttctccccagcactgacctctccgagggcctttctggcaggtgaacagaatggtctgacctcagctgagccacagccaggcaactgtgcgagttgcctgcagtacttcacagccttgtctccttgggtgacttctgtccttttgattaatccacagatgttctgtggtgtggtttgttggtgagcatgggcagtcagctgacttctccttacccctcagagccctgctcatttccgaggtcttccctcaggatgtgtttctgggtttgggtgaatttatgaactcactgttgagcctaccttgccaatgactagacttagatggcatctgtggggcctggaagtccattctcacttttgtttggttttggaggggcagatgtctacactacgcagtggtcggaagaagcagcccaccagtcctgatggtcgtgcctcacccatcaatgaagacatccgatccagtggccggaactcccccagtgctgctagcacttccagcaatgacagtaaagcagagacagtgaagaagtcagccaaggtcagggactggggtgcagtggaagctccctgctctctccctcccatctgggccttgacatttccctggctagggcctagagaaatggggtcttctgccacaaatttgccaaggccccagagacagaatggagtggttggtaggctcctagggccgaggattctcctttctagctagctgctcctttggcccccttattggccctttggagagcagcgtccacaaactctcatctcttctgcttccactgtagaaggtgaaggaagaggctgcatcccctctgaagagcaccaagcgccagcgggagaaggtggcctctgacacagaagacactgataggatcacctccaaaaagacaaagacccaggtgaggctcctgtgacaccctgacaccccacctccactgcacacaagctcaggtcctcctggggaaggcattgcctaacttccaggaaagaacaagtctggatcctgccttcttcgggcaagagctgagctccctgctgcctctgcatagaccttggttgtgtcacacactagccatgcgtgcagagctctactttctacatctcttgcttctctgcttttaggagattagccgtcccaactctccctctgaaggagagggggagagttcggacagtcgcagtgtcaacgatgagggcagcagtgacccgaaagacattgaccaggataatcgcagcacgtctcccagtatccccagccctcaggataatgagagtgactcggactcatcagcacagcagcagatgttgcaggcccagcccccagccttgcaagctcccagtggtgctgcctcggctccctccacagcccctccaggaacaccccagcttcccacccaaggacccacaccctctgccactgcagtccctccacagggctcccctgcaacctcacagccccctaaccagactcagtctacagttgcacctgcagcccacacccacatccaacaggcacccaccctgcacccccctcggctgccctcacctcatcctccactgcagcctatgactgcaccgcctagccagagctctgcacaacctcacccccagccctccttgcacggtcagggcccgcctggccctcacagcctacagactggacccctgttacagcacccaggacctcctcagccctttggacttccttcccagccctcccaaggtcagggccctctgggcccctccccggcagcagctcatcctcatagcaccatacagcttccagcgtcgcagtcagcgctgcagccccaacagcccccaagggaacagcccttgcctcctgcccctttagctatgcctcacatcaaacccccacccaccacaccaattccccagcttccagcaccacaagcccacaaacatccgcctcacctctcaggcccctcccccttctctctgaatgccaatctgccacccccgccagccctgaaacccctgagctcactgtgcacacaccaccctccctcagcccaccctccacccttacaactcatgcctcagagccagcccttgccctcttcacctgcccagccacctgggctgacccagagccagagcctaccacctcctgctgcctcccatcctaccactggcctccaccaggtgccctcccaatccccatttccccagcaccctttcgtacctggaggcccccctcccatcaccccgccctcctgcccccccacttccacccctcctgccgggcccagctcctcatcacagccaccctgctctgctgctgtgtcttctggaggcagtgttcctggggcgccatcttgcccactccctgctgtgcaaatcaaggaggaggctctggatgaagctgaggagccagagagccctcctccaccccccaggagcccatcccctgagcccactgtagtggacacccccagccatgccagccagtctgccaggtactgcttctgaggaccgtgggcccacctgggtgtgggtggacttggtggaggcgaggaagggtgcggccctcagcaggagccccaaccagacctgctacctctctaggttctacaaacacctggaccggggctacaactcgtgtgcacggacagacctgtacttcatgcctctggctggatccaaactagccaagaagagggaggaggccattgagaaggccaagcgggaggctgaacagaaagcccgagaggaacgggagcgggagaaagagaaggaaaaagagcgagaacgggagagagagcgggaacgggaggcagagcgcgctgctgtgagtcctgaaggggcctgacaagcaggaaagcagtgtccccagccaggcgtggcgactggcatggatcccaggctgttagtgttctctaggctgtaagctatttattgcccggcagtcaagactctgactggtcctttgcttgcagcttatagagttgtctcctccttaatcctgaggtgtcagagagacaggaggggtgatttaacaggggagtggggatacacaggggcatcctgttttgaagcccacttgtgggctgggtatctggtacctgcttgaccaggaagtatgagggatgccaaatctggaagtggcagcatttgaaatttcatcacagtagatttcatagcctgcttggctctctggtgcatagatacacagctgtaactgttagcacaagtgcacacatgcactcatcctcactataaggggaactgcaggcaggcacagatcagagtgtggtagtggagtctgggctgtcctgatgcctgacctgacaaagatcccttgtcactgtgttggggtgaagggactaaattggcctacctctgtagtgagcgcccgacttagacccccctttttacttcagcagaaggcatccagctctgcacatgaaggccgtcttagtgaccctcagctcagtggcccgggtcacatgcgaccctccttcgagccaccaccgaccacaatcgctgctgtgcccccatatattgggcctgacacacctgccctccggacactgagcgaatatgctcggcctcatgtcatgtctcccaccaaccgcaaccaccccttctacatgccccttaatcccaccgaccccctgctggcctaccacatgcctggcttgtacaatgttgatcccaccatccgcgagcgggagctccgagagcgcgagatcagagagcgcgagatccgggagcgggaattgcgggagaggatgaagccaggctttgaggtgaagcccccagagctggaccccctgcacccagccaccaaccccatggagcattttgcccggcacagcgccctcaccatccctcctgcagctggcccccacccctttgcctctttccacccgggcctcaaccctttggagcgggagagactggcactagcaggtcctcagctgcggcctgagatgagttacccagacagactggcagccgagcgcatccatgctgagcgtatggcatcactcaccagcgaccccctggcacgactgcagatgtttaatgtcactccacaccatcaccagcattcacacatccactcccacctccacctccaccagcaggatcctctccaccaaggtgtgtacccaattcagaagcaaggctggaggcagcttctgtccaagaatcacacttctttctgtgctctacacctgggcttccttcggcagagaggcctctagagaagcctagtcctgtgctgtgggtaggagacaacagatcagggctctcatggccttcagagccaggtctggatataggcactgggctacctaaagaaaatgcctcttttcccacagtggggtggggagggggtgcggcggagggcaggacttccactagctttgaatcagtggccaggcaaagcacagctctgtcctttgggaactgagttcctgaaggtccattctctaggcagctgcgggaagactggtctgaggcagaggcagacacagcaggtaccactcactcccttcaaagcttcatggaattggttatgagggaggctggctatgagtccaaaaagtggggcagcattgagatcagagggctactgcaatgggtgagagtaagccagggtgagcagccagaagggcccacagaaggcctgaggttgagtgctcctcaccggggacccaggacaggactgaccagggtgaatacactgcatagattatgaagaagaaatggcattagctgtgagctgaggagctagagctgcgtccacctatgctgggttctcaaagacgcacaatgctcagctgttttaggcgtggtggcaagaaatggctggtcagggctgagctctgtactgctctccgccttactactgtactccccaaaaggaggtcaggactctgcagccaggtgatacttcccatcctcatgagccagagccatcttgggtgaaagggaagtcacagtgggactcaaaggaaggagagccagagccatacacctgctacatctggacctgagtctgtctgtctgtttgtttgttttaggttcagcaggcccagttcaccccctggttgaccccttgactgctggccctcacttagctcgcttcccctatcccccgggcaccctccctaaccctctacttggacagccccctcacgagcacgagatgctgcgccacccagtttttggtaagaaatcactggaggacaacgtggggttccaaatggaagttgggattgagtcagatcagcagctcactttaccaactgcacatagggaccaggcaggtagactgctgggcagggtttgaagtacagaggccataaatgcacagcaaaatagcctggcaggaaccaggcctgcctgggctgcaggcacctgacaggttgaggtctggggaggaggagaagagggcaggcaaggtctgggcatgaggtctaggagtcgctggtataagctcctggcttcagggcctctgctgagcagccctgcccctggggaagctctgtagagcctgggaagggctggctcggctttccttgctggggagtgagcactctgctgagccctctcccctccttcctggtctgtcttggttgctctggtcatggctgctcccttgacttgtttttgtagcagagcctgttttgcgcttggcaggcaccccctatccccgagacctgcctggggctattccaccccccatgtcagcagcccaccagcttcaggccatgcatgcccagtcagccgagctacagagactagccatggagcagcagtggctgcacggacatccacacatgcatggtggccatctgccaagtcaggaggattattacaggtgaggtgaggggggcacaggcttctcaccccaaccttatccccatgaagcaagcaccagggccacccccttttttctgagagaaagggatggatgcatgcgagcatgacttggctacgagagactgctgggtggggtggaacctagaagcagacagattggccagtctttgcctgtagctgcagggtcgcctcctgcatcacctagcatgtcctgatgtccattcttctgttttctcgtttctcaccagtcgactgaagaaagaaggtgacaagcagttataagttatttatttgttaatgctggctgtggaaaccccagttctagggggcagaaacaggacatttacatctagtaggggctgcaagagcaaagaggaatatcgtctaaagatttctctatatatttaaaacccacaactaaaacacatctgcataatagtgtttgtttgttgagaggatttcctgagactggtttgggtctccctgcatgacagtcccccagaaacttggtgtgtcctgggctggactgacacccagaaagcttacctgcgagcttggggtttggcttgagttctcttttccttgatttctcagtaggtgctagagtccgttcacacccttcactgtgcgcgcagacactgaggcacgtgggctctggaacccgcagggtttgcagagaggcggcatatgagtttgaaatccaagagctataatttttaaaaaatcttttattttaatacattgtaggaaatcttcataatttgagacagttctgcagcatggctttttacatctgtaaataaataattttagaagtctttttttctttccacagacgactattctgatctattttttccagccatgtcacaaagtgtgaattcctaccagctattgacagagtacagagttgattttttaataaaaagttatatataattatccctttaattaaagggaacagatgggcgtttctagttttaagcaggcaggagcttgggactaggtttggtcacagcagcgagcatccaagggttggcagggacagtgttacaggctctttattttgctgctttgattttgcttctgtctgcccctcacatgtgcagtggcaggcgtgtttgagcgagcctccttccttattcatagggattcagtgttgactgttccctggtgtccccgctgtcctgtgtcgtctggtatagaaagcgcatgtttctgtatcggtgtctgatgataagtttccttggagttttatgcacatgtttgattgttctagataaattgtcataaacattctaggaagttcaagaaaatgatgcagtacccagcacatgaaagacctacaacatgtgcttgccaaaggaatgttagaatctgctcatgtgtgtgtcaccatgccaagccatgccagccacagactgaggcttccgggtgaggaacaccctggggctactatgtttgtaggtctcatgtgctcagggctatgaagtaggctgtgcaggtgacagcaccctgctaggaagctgtgtgtgtcctgcctttcctcctggaatatgtacggatggaagtcttggttgaagcaggttcccctgggaagtgctctcagcaggccttgcggagcagagcagagctgggcagagctgactcctgccccgctgtccctgatggaaccttccttccagagctgtggaagagatgtttgtgacccctcccttggactcttgggggccaatcccactcttgagtgcaatggttgcatttagaatcagctagctagccaggggccatcctgtgggtcagtagatgaggtgtgtcctggccctgcggagagaagaggcctgtggttcagctggcacgctctgctccaggctctgactcaggggtggctgagcctcatgctcccagaaccatgcatggggcagctaggatccatttgtctgttggaaatgtttgtagcttttttgttttgttttttaactttctttttctcattccatttctgccttaactttggttcttcataggaggcaagctcaaattaaccttttgccatcaaaccttgtagccgtcttggcatgaaggcatgttttccttctggggggtggtgacatgccctccagacggcctgccatccagccctctggcctgaggaagacccccataggctccggacaggcaggtcctttctatcccatgccaccacttccttccccctttaactgagtctgctgttcagttaagcctttatttcctctccagtacccatttccaaagagaaagagtgaagtactttgaagtctgtacttgaaatctgtctggaagtgtttccttgttagttttgggtttctcccctgtcccaaggctcagagtcttcatctcctacgtgactgactacagttggtttggaggccctggacctctgtggcgtctttgaagcctggcctcttggcttccttttggactttgcttgctttcatttgaagtttgggtttgctttctgtgttctgtgcgtatcttgttcagtgtcgtcaaggttgggcttcacgtctcactgcagtggagcgagcggacattctgatcgctgcatttctttagatctcggagctaagtgtatatatgagtagtttgccatgagataacacagtgtaaacagtagacacccagaaaatcgtgacttctgtgttctctccatttgagtattttgtaatttttttgaaatatttgtggacataaataaaaccaagctacacta

SEQ ID NO: 1557 - DNA, 7027 bp, Mus musculus
atgacagctgacaaagataaagacaaagacaaagagaaggaccgggaccgggatcgggaccgagaaagagataaaagagacaaagcaagagagagcgagaatgccaggcctcgcaggagctgtaccttggagggaggagccaaaaactatgctgagagcgatcacagcgaggacgaagacaacgacaacaacagcgccaccacggaggagtccaacaagaagagcagaaagaaacctccgaaaaaaaagtcccgctacgagaggacagacactggtgagataacttcttacatcaccgaggacgacgttgtctacagaccgggagactgtgtgtatatcgagagtcggcggccaaacacaccgtatttcatctgcagcatccaagacttcaaactgagtaagagggaccatctactcatgaacgtcaaatggtactaccgtcagtctgaagtcccagattctgtctatcagcatttggttcaggatcggcataatgaaaacgactctggaagagagcttgtcatcacagatccagtcatcaagaatcgggaactcttcatttctgattatgttgacacctaccatgctgctgccctaagagggaagtgtaacatctcccatttttctgacatatttgctgctcgagagtttaaagcccgagtggactcatttttctacatattaggatacaaccctgagacaaggcggctgaatagtacccaaggggaaattcgagttggccctagccaccaggccaaacttccagatctgcaaccatttccttctccagatggtgatactgtgactcagcatgaggaacttgtctggatgcctggagtcagtgactgtgacctcctcatgtacttgagggcagcaaggagcatggcagcatttgcagggatgtgtgatggaggctccacagaggatggctgtgttgcagcatctcgggatgacaccactctcaatgcactgaacacactacatgaaagcagttatgatgccggcaaagccctgcagcgcctggtgaagaagcctgtgcccaagctgatcgagaagtgctggacagaggatgaagtgaaacgcttcgttaaggggctccgacaatacggcaagaacttcttcagaatcagaaaggagctgcttcccagtaaggaaaccggggaactgattaccttctattactactggaagaaaacaccagaggcggccagctcccgtgcccaccgccgccaccgcaggcaggcagtgttcagaagaattaagactcgcacagcgtccacccctgtcaacacgccctccagaccaccttccagtgaattcttggacctgagttcagctagtgaggatgactttgacagtgaggacagcgaacaggagctgaaggggtacgcctgccgtcactgcttcaccaccacctccaaagactggcaccacgggggccgggaaaacatcctactgtgcacggactgtcgcatccacttcaagaagtacggtgagctgccacccatcgagaagcccgtggaccccccgcccttcatgttcaagcctgtcaaggaggaggacgatgggctcagtgggaagcatagcatgaggacgcggcggagccggggctcgatgtctacactacgcagtggtcggaagaagcagcccaccagtcctgatggtcgtgcctcacccatcaatgaagacatccgatccagtggccggaactcccccagtgctgctagcacttccagcaatgacagtaaagcagagacagtgaagaagtcagccaagaaggtgaaggaagaggctgcatcccctctgaagagcaccaagcgccagcgggagaaggtggcctctgacacagaagacactgataggatcacctccaaaaagacaaagacccaggagattagccgtcccaactctccctctgaaggagagggggagagttcggacagtcgcagtgtcaacgatgagggcagcagtgacccgaaagacattgaccaggataatcgcagcacgtctcccagtatccccagccctcaggataatgagagtgactcggactcatcagcacagcagcagatgttgcaggcccagcccccagccttgcaagctcccagtggtgctgcctcggctccctccacagcccctccaggaacaccccagcttcccacccaaggacccacaccctctgccactgcagtccctccacagggctcccctgcaacctcacagccccctaaccagactcagtctacagttgcacctgcagcccacacccacatccaacaggcacccaccctgcacccccctcggctgccctcacctcatcctccactgcagcctatgactgcaccgcctagccagagctctgcacaacctcacccccagccctccttgcacggtcagggcccgcctggccctcacagcctacagactggacccctgttacagcacccaggacctcctcagccctttggacttccttcccagccctcccaaggtcagggccctctgggcccctccccggcagcagctcatcctcatagcaccatacagcttccagcgtcgcagtcagcgctgcagccccaacagcccccaagggaacagcccttgcctcctgcccctttagctatgcctcacatcaaacccccacccaccacaccaattccccagcttccagcaccacaagcccacaaacatccgcctcacctctcaggcccctcccccttctctctgaatgccaatctgccacccccgccagccctgaaacccctgagctcactgtgcacacaccaccctccctcagcccaccctccacccttacaactcatgcctcagagccagcccttgccctcttcacctgcccagccacctgggctgacccagagccagagcctaccacctcctgctgcctcccatcctaccactggcctccaccaggtgccctcccaatccccatttccccagcaccctttcgtacctggaggcccccctcccatcaccccgccctcctgcccccccacttccacccctcctgccgggcccagctcctcatcacagccaccctgctctgctgctgtgtcttctggaggcagtgttcctggggcgccatcttgcccactccctgctgtgcaaatcaaggaggaggctctggatgaagctgaggagccagagagccctcctccaccccccaggagcccatcccctgagcccactgtagtggacacccccagccatgccagccagtctgccaggttctacaaacacctggaccggggctacaactcgtgtgcacggacagacctgtacttcatgcctctggctggatccaaactagccaagaagagggaggaggccattgagaaggccaagcgggaggctgaacagaaagcccgagaggaacgggagcgggagaaagagaaggaaaaagagcgagaacgggagagagagcgggaacgggaggcagagcgcgctgctcagaaggcatccagctctgcacatgaaggccgtcttagtgaccctcagctcagtggcccgggtcacatgcgaccctccttcgagccaccaccgaccacaatcgctgctgtgcccccatatattgggcctgacacacctgccctccggacactgagcgaatatgctcggcctcatgtcatgtctcccaccaaccgcaaccaccccttctacatgccccttaatcccaccgaccccctgctggcctaccacatgcctggcttgtacaatgttgatcccaccatccgcgagcgggagctccgagagcgcgagatcagagagcgcgagatccgggagcgggaattgcgggagaggatgaagccaggctttgaggtgaagcccccagagctggaccccctgcacccagccaccaaccccatggagcattttgcccggcacagcgccctcaccatccctcctgcagctggcccccacccctttgcctctttccacccgggcctcaaccctttggagcgggagagactggcactagcaggtcctcagctgcggcctgagatgagttacccagacagactggcagccgagcgcatccatgctgagcgtatggcatcactcaccagcgaccccctggcacgactgcagatgtttaatgtcactccacaccatcaccagcattcacacatccactcccacctccacctccaccagcaggatcctctccaccaaggttcagcaggcccagttcaccccctggttgaccccttgactgctggccctcacttagctcgcttcccctatcccccgggcaccctccctaaccctctacttggacagccccctcacgagcacgagatgctgcgccacccagtttttggcaccccctatccccgagacctgcctggggctattccaccccccatgtcagcagcccaccagcttcaggccatgcatgcccagtcagccgagctacagagactagccatggagcagcagtggctgcacggacatccacacatgcatggtggccatctgccaagtcaggaggattattacagtcgactgaagaaagaaggtgacaagcagttataagttatttatttgttaatgctggctgtggaaaccccagttctagggggcagaaacaggacatttacatctagtaggggctgcaagagcaaagaggaatatcgtctaaagatttctctatatatttaaaacccacaactaaaacacatctgcataatagtgtttgtttgttgagaggatttcctgagactggtttgggtctccctgcatgacagtcccccagaaacttggtgtgtcctgggctggactgacacccagaaagcttacctgcgagcttggggtttggcttgagttctcttttccttgatttctcagtaggtgctagagtccgttcacacccttcactgtgcgcgcagacactgaggcacgtgggctctggaacccgcagggtttgcagagaggcggcatatgagtttgaaatccaagagctataatttttaaaaaatcttttattttaatacattgtaggaaatcttcataatttgagacagttctgcagcatggctttttacatctgtaaataaataattttagaagtctttttttctttccacagacgactattctgatctattttttccagccatgtcacaaagtgtgaattcctaccagctattgacagagtacagagttgattttttaataaaaagttatatataattatccctttaattaaagggaacagatgggcgtttctagttttaagcaggcaggagcttgggactaggtttggtcacagcagcgagcatccaagggttggcagggacagtgttacaggctctttattttgctgctttgattttgcttctgtctgcccctcacatgtgcagtggcaggcgtgtttgagcgagcctccttccttattcatagggattcagtgttgactgttccctggtgtccccgctgtcctgtgtcgtctggtatagaaagcgcatgtttctgtatcggtgtctgatgataagtttccttggagttttatgcacatgtttgattgttctagataaattgtcataaacattctaggaagttcaagaaaatgatgcagtacccagcacatgaaagacctacaacatgtgcttgccaaaggaatgttagaatctgctcatgtgtgtgtcaccatgccaagccatgccagccacagactgaggcttccgggtgaggaacaccctggggctactatgtttgtaggtctcatgtgctcagggctatgaagtaggctgtgcaggtgacagcaccctgctaggaagctgtgtgtgtcctgcctttcctcctggaatatgtacggatggaagtcttggttgaagcaggttcccctgggaagtgctctcagcaggccttgcggagcagagcagagctgggcagagctgactcctgccccgctgtccctgatggaaccttccttccagagctgtggaagagatgtttgtgacccctcccttggactcttgggggccaatcccactcttgagtgcaatggttgcatttagaatcagctagctagccaggggccatcctgtgggtcagtagatgaggtgtgtcctggccctgcggagagaagaggcctgtggttcagctggcacgctctgctccaggctctgactcaggggtggctgagcctcatgctcccagaaccatgcatggggcagctaggatccatttgtctgttggaaatgtttgtagcttttttgttttgttttttaactttctttttctcattccatttctgccttaactttggttcttcataggaggcaagctcaaattaaccttttgccatcaaaccttgtagccgtcttggcatgaaggcatgttttccttctggggggtggtgacatgccctccagacggcctgccatccagccctctggcctgaggaagacccccataggctccggacaggcaggtcctttctatcccatgccaccacttccttccccctttaactgagtctgctgttcagttaagcctttatttcctctccagtacccatttccaaagagaaagagtgaagtactttgaagtctgtacttgaaatctgtctggaagtgtttccttgttagttttgggtttctcccctgtcccaaggctcagagtcttcatctcctacgtgactgactacagttggtttggaggccctggacctctgtggcgtctttgaagcctggcctcttggcttccttttggactttgcttgctttcatttgaagtttgggtttgctttctgtgttctgtgcgtatcttgttcagtgtcgtcaaggttgggcttcacgtctcactgcagtggagcgagcggacattctgatcgctgcatttctttagatctcggagctaagtgtatatatgagtagtttgccatgagataacacagtgtaaacagtagacacccagaaaatcgtgacttctgtgttctctccatttgagtattttgtaatttttttgaaatatttgtggacataaataaaaccaagctacacta

SEQ ID NO: 1558 - protein, 1505 aa, Mus musculus
MTADKDKDKDKEKDRDRDRDRERDKRDKARESENARPRRSCTLEGGAKNYAESDHSEDEDNDNNSATTEESNKKSRKKPPKKKSRYERTDTGEITSYITEDDVVYRPGDCVYIESRRPNTPYFICSIQDFKLSKRDHLLMNVKWYYRQSEVPDSVYQHLVQDRHNENDSGRELVITDPVIKNRELFISDYVDTYHAAALRGKCNISHFSDIFAAREFKARVDSFFYILGYNPETRRLNSTQGEIRVGPSHQAKLPDLQPFPSPDGDTVTQHEELVWMPGVSDCDLLMYLRAARSMAAFAGMCDGGSTEDGCVAASRDDTTLNALNTLHESSYDAGKALQRLVKKPVPKLIEKCWTEDEVKRFVKGLRQYGKNFFRIRKELLPSKETGELITFYYYWKKTPEAASSRAHRRHRRQAVFRRIKTRTASTPVNTPSRPPSSEFLDLSSASEDDFDSEDSEQELKGYACRHCFTTTSKDWHHGGRENILLCTDCRIHFKKYGELPPIEKPVDPPPFMFKPVKEEDDGLSGKHSMRTRRSRGSMSTLRSGRKKQPTSPDGRDINEDIRSSGRNSPSAASTSSNDSKAETVKKSAKKVKEEADLKSTKRQREKVASDTEDTDRITSKKTKTQEISRPNSPSEGEGESSDSRSVNDEGSSDPKDIDQDNRSTSPSIPSPQDNESDSDSSAQQQMLQAQPPALQAPSGAASAPSTAPPGTPQLPTQGPTPSATAVPPQGSPATSQPPNQTQSTVAPAAHTHIQQAPTLHPPRLPSPHPPLQPMTAPPSQSSAQPHPQPSLHGQGPPGPHSLQTGPLLQHPGPPQPFGLPSQPSQGQGPLGPSPAAAHPHSTIQLPASQSALQPQQPPREQPLPPAPLAMPHIKPPPTTPIPQLPAPQAHKHPPHLSGPSPFSLNANLPPPPALKPLSSLCTHHPPSAHPPPLQLMPQSQPLPSSPAQPPGLTQSQSLPPPAASHPTTGLHQVPSQSPFPQHPFVPGGPPPITPPSCPPTSTPPAGPSSSSQPPCSAAVSSGGSVPGAPSCPLPAVQIKEEALDEAEEPESPPPPPRSPSPEPTVVDTPSHASQSARFYKHLDRGYNSCARTDLYFMPLAGSKLAKKREEAIEKAKREAEQKAREEREREKEKEKEREREREREREAERAAQKASSSAHEGRLSDPQLSGPGHMRPSFEPPPTTIAAVPPYIGPDTPALRTLSEYARPHVMSPTNRNHPFYMPLNPTDPLLAYHMPGNVDPTIRERELREREIREREIRERELRERMKPGFEVKPPELDPLHPATNPMEHFARHSALTIPPAAGPHPFASFHPQPLERERLAGPQLRPEMSYPDRLAAERIHAERMASLTSDPLARLQMFNVTPHHHQHSHIHSHLHLHQQDPLHQGSAGPVHPLVDPLTAGPHLARFPYPPGTLPNPLLGQPFHEMLRHPVFGTPYPRDLPGAIPPPMSAAHQLQAMHAQSAELQRLAMEQQWLHGHPHMHGGHLPSQEDYYSRLKKEGDKQL

SEQ ID NO: 1559 - DNA, 485861 bp, Homo sapiens
  misc_feature (1)...(485861): n = A, C, G or T/U
ttggctcactgcagactccgcctcccaggttccagtgattcgcctgcctcagcctcccaggtggctgggattacagtacaggtatgcaccaccacgcccggctaatttttgtatttttagtagagacagggtttcgcatgttggccaggctggactcaaacccctgacctcaggtgatctgcccgtctcggcctcccaaagtacagggataacaagcatcagccactgtgcctggccaatttttgtatttttgtagatatgggatctccctgtgttgctcaggctggtctcgaacttctgggctcaagtgattctcctgcatcagcctcccaaaatgctgggattacaggcattagaagtgtgagccacggttcttggcccatgtaacttttattgcactgtattgttttttgttttgagacagagtcttactctgttgcccaagcaggagtggagtggtgtgatcagtgctcactgcagcctcaacctctggagctcaggtgattctcccacctcagcctcccaggtagctgggactacaggtgtgcgtccccacatctgggtaactttttgtattttttgtaaagacagagtctcactttgttgcccaggctggtctcgaactcctgggctcaaaggatccttgcactttggcctcccaaagtgctgggattacgggcgtgagccaccacgccccagtcctcttgttaatcttttactgtgcttaattttttaaaaatttttttcattttcctttttttttttttttgagattgagtgtcactctgtcgcccaggctggagtgtagtggcacgatctcggctcattgcaacctccacctcctgggttcaagcgattctcttgcctcagcctcctgagtagctgggattacaggcacgcaccaccatgcccagctaatttttgtatttttagtacagacggggtttcaccatgttggtcaggctggtctcgaactcctgacttcatgatccactcccccactcctcggcctcccagagtgttgcgattacaggcgtgagccactgtgctcggcctactgtgcttaatttataaattaaactttatcttaggtgtgaatgcctaggaaaaagcatagtagaaatggtttactgtccaaggtttcaggcatccgtgggggtctggaatgtatccccagctaaggtgatactctggtatttgtgtgacacatcaggagagctgtcacacccctgggcccatcttcagacaagctgtcctactgagcctttggggaagcagctccctgggacagcctggctgtgcactgaccgatggctgacagccttcagtggccaggccagggtggggcctgaaaggatgacctgggccaattaggtttcttcctcttaggaattttaactaggaaatactgaagtcatgaggagttggcagaagccgcccaagctgctcagtcataagctgcggaacaaccggagaggctgtgagaagccacatgcaagccgcaattacgagggaggtgcaaatagaagaaggctgtgaagtcaagaaaagccacgtggtgcagggtgaggaggccggggggtgggaagatgagaacaggggaccagtgacattaacgctgggaagagagctgcagtcccgaccttcccgtggcctcacttctgtctcttcccttcctgaggtcagattgctctgctttgcctggcttccacgttggaacctcctcatgctaaatctgtacttcagatgttgagtaagtctccattcttcaccataaaaaggacagaactcaaatgctcttgcttttttgattaatagactcttaattttcgagatggagttttgctcgtcttccccaggctggagtgcaatggtgtgatctcggctcactgcaacctccacctcccgggttcaagcaattctcctgcctcagcctcccgagtagctgggattacaggcgcccaccatcacgtccagctacttttttgtatttttagtagagatggggtttcaccatgttggccaggctggtcttgaactcctgacctcaggtgatccacctgcctcgctaggattacgggtgtgtaatccctaaggtgctgggattacaggcgtgagccaccacgccgggccaatagacttcattttttagagcggttttaggttcacagcaaaattgagcccaaaggacagagttcctgtatacccctcactccccactgctacccctgttattaacatctcctgtcagtgtggtctctttgttatgactgatgagtcaatgttgatacagtcttattcactaaagtccatcgtttattttatttatttatttattttatttttttgagacggagtctcgctctgttgcccaggctggagtgcagtggcgcgatctcggctcactgcaacctccgcctctccaggtttaagcaattctctgcctcagcctctggagtagctgggattacaggcgcgtgccaccacgcccagctaattttttgtatttttagtagagacggggtttcatcatcttggccaggctggtcttgaactcctgacctcgggatccacccgcctcggctgcccaaagtgctgggattacaggcgtgagccaccgcgcccagcctatttatttttgagacagagtcttgctttgttgcccaggctggagtgtagtggtgcaatcttggctcactgcaacctctgcctcccaggctcaagcaattctcctgcctcagcctcccgggtagctggaattacaggcacgtgccaccgggctacttttttgtatttttagtagagatggggtttcaccatgttggcctgcctggtctagaactcctgacctcaagtgatctgcctgccttggcctcccaaagtgctgggattacaggtatgatccactgcactcagcctttttgtttttggagacagagtctccctctgtcgcccaggctggagtgcagtggcgcaatcacagctcactgcagccttgaactcctgggctcaaatgatcctcctgcctctgcctccctttacaaagtgctgggattataggcgtgagccacggcgcctggcccattctgtgggttttgacaaatgtatagtaacatatatccaccaataaagtatcatgcagaataatagtttcactgtcctaaaaatctcctgtgctccacctagttatccctccccctgtcaaagccctcgcaaccactaagccctttactgcctttcccagaatatgcctttcctagacatagttttgccttttccagaatgtcagatagttggattcatatggtatgtagccttttcacattggtttcttccacatggtaatatgcctttaatgttccttacaccttttctttattttttatttttatttttaaagatcattactatttttgtggagccggagtctcaccattttgctcaggctggtctctaactcctggcctcaagagatcctcctgcctttggctctcaaagtgctgggattataggagtgagccaccacacccagcacctccatgccttttcctggcttgatagcacgttcctttttagtgtggaataatactgcattgcatgaatgtatcacagtttatctgttcacctaatgaaggacatcttggttgcttccatgttaaaatgctgtttttattaataagattttaaaaaagcaaatgtagcagaatttattttatttattttttgagatggagtctcgctttgtggcccaggctggagtgcagtggcatgatctcagctcactgcaacctctgcttcccgggttcaagcgattctcctgccttaggctcctgagcagctgggattacaggtgcccaccaccatgcccggctaattttttgaatttttgtagagatggggtttcaccatgttggccaggctggtctcgaactcctgacctctggtgatccacccgccttggcctcccaaagtgctaggattacaggcgtgagccactgtgcccagccatagcagaatttattctggaaactggagtagtagaaggagatatttggcattgaaaggaatgggaatgtggatattttgaaattaaggtgcctggaaaagctgaacaaagaggagggaagcactaaaatgagtgtccaggcatgtgtcacatcgacaccggagcgtggatggcggaggtgaatttttctgtttttttttttttttttttttttttttccggggttacagagtttttcctctttattctgtttgtgtagatgccttggattgaagaagtgagttttggtggctaatagcacctgccacatcaatgttatacaattaaattctggaccccctaaagacaattttagaatctaaaatgtattttctttagtgaggagatttcttctgagggcccctttgtgatcaatgttagtcttgtttgtttggtgtttagacaaactagggtttgtggatagttctcaactccccattattatgcccttcttatccctagaaaataacacctttcctccaaggtaaacctaggtaatttacaagtagatgtggaggaaatgtttattttgaaatgcagcttcccctagggtggaatttgctggctctctggctcactcagttaacagtggacagctgtttataacaggaagtgtggaattgcatgtctcagtgaaatggcaggaagacagagggaggaggactcctaattatcaaacttggaattgggccaagacaatgaaaatcagcgtctcctccctttaattctttcacaagccctaggagacttttaataaccacaagtggtcagaagtcagatgttgggtttagatctcatccaaacggcatcctagtgccccagacaacatgctgtggctcaaagtgcgactcaaagggaagggcatccctcccataaatccgacgtggcccagtgaagcagggtttcttgagatctatctgtaagtgtgttggtaatcaggcccacttctaccttggtggaaataaaattcattagggtctagagttgaattggaaatcttttttttttttgagatggagttttgctcttgttgcccaacctggggtgcaatggcgccatcgcggctcactgcaacctccaccttctgggtttaagtgattctcctggctcagccttccgagtagctgggattacaggcatgcaccaccatgcccggctaattttgtatttttagtagagatggggtttcaccatgttggtcaggctggtctcagactcctgacctcaggtgatctgcccacctcggcctcccaaagtgctgggattacaggcatgagccactgtgcccggccagaattggaaatcttaattgctaatccacaataaatcacagccaaacaaaggaaaagggtttctgatatttgatcctttgttttgaaaagctgtttcacctctctctgtatttgctcacacatgtgctctgaaacatcaaccatttctccgttccaattcagtgcagggactttcaaaggctaccaggggttacttacctggcccaaggggaaaaaactggagagggagaaatttcgatttacaataaattataaagtgaaaacccgctgtgggtaaatgcaaggtgagctcggagaactggcagtggggaagaaagaagtgctgctggaggctcaacctgaaaaagtgcaacgggagatatagctgaggctcgttattggcttatatttgcactacataaacttggaagccaatttcatagaaaatgcctagaaacaagcttcagtctgctacaaggcctgctaaagcaccctagttctgcttaaggcattttaggggaaaataatttacatgttctaaagcttgagtactgctggtgaattatgaagactagttaccagctgtatgttcaaagaacttgaatggttttttttaattataagaattatccatgcttgatatgaaaagaaaaaagtccttgtctctaaaaaaaattaaaataaatgattaaaaaagtgaaaccactaaaccacaatttcttaggttgagtttactggtgtttattttattattatccccctcaacctatgtacacataatgtatattcttttgtctatgccaaatttttatgattttaaaaaatgaaatcaaaagtattagaagaacactaaaactttttcaaatcatggattgaagaagctctttctaacatggcaggaaatccagacgccataaaggaaaaaacaccaataaattttactgcataaatatttcacatccctataaggcataaaaacaccatagcaatgcaagaaacaggcagactggggagaaacattttcaacacgtataagcaagggctaacttcctttttttttttcctttgagacagggtctcactcttgtcaccaggttggaatgcagtggcatgatcacagctcactgcagcctcaacctcccaggctgaagccatcctcccacctcagcttcccaaatagcctggactacaggcatgtgccatcacactcagctaatttttaaaatttttttgtagagatgggggtctcattatgttgctcagagtagtctcaaattcctgggctccaaaaaaaaaaaatttcaattaaaaaaataaagaaatccacctgtgattttgggggtggggtgtgttaggagtaatatgaatctagtgggtgtgtgttgttgttttttgtttccccatatagctatcttgttgtcccaatatcatttattaaataatccccattttccatcttcctttaatacagctctgatgtgatctctgtatatttaaaaaaaaatcacttcttacctgtagtaagatacataaaataactaaaaaaagtccttgatattttcagattcaataactactttatttacttaattcccacttaaaaatattgctgaaaagagaataaggaaacttttaaaaatttaatatgggaaaaaaatccaagtcggtattttacgtctttaatcttcagctagttctttaacttccgtaagccccagttccttgacttttaaaatggagataataagccgggagcagtggctcacgcctgtaatcccagcattttgggaggctgaggcgggcggatcatctgaggttgggagttcgagaccagcctgaccaacatggaaaaaccctgtctctactaaaaatacaaaattagctgggcatggtggcacatgcctgtaatcccagctgctcaggaggctgaggcaggaaaatcgcttaaacccgggggtcagaggttgcggtgatctgagatcgcgccattgcactccagcctgggcaacaagatcgaaactgtctcaaaaaaaaaaaaaaaaaaaaaaagagataataataatacacttcatggggagaaaaagtgggctaaagaatgtaacatgtttcttagggcactgggaacataagctttcaatcaatagtttaatagttgttcttaacgatgaagattattttactgcattatcagcttctcagatccttggaaggaggtccagtactctccggctttatggctggaccacaattctttcgtgggactgttacagttaaatgggtttagtttgctaattttgtggtctgataccatatattatgctttgtaactatgtggcatttctggacttctaaatttacatttttatggataaatgaaagtgacggccaatccctaataccatagtaaatgttatttcctaacgtggagagcctctctcctccctgctggatggcagtgcattgtccatttgtctaccacagagctgaatctttattagaaataatgctcctgtaagtttcgagaccagcctgggcaacatagtgaacctccatctctactaaaattacaaaagttagttgggtgtggcggcacacacctgtaatttcagctactcaggaggctgaggcaggagaatcgcttcaaccgaggaggtggaggttgcagtgagctgagatcgtgccactgcactccagcctgggcaacagagcgagactctgtctcaaaaaaaaaaaaaagaaaaaaaagaaagaatgctcctgtagatagagattttgatggaaagtgaagccatctaactgatatactttatccctcatcatttccaaacaggaagtcagatagtcctatccatatctagaatgttggaagcagtttattgaatttattaggttttaaaattcagttctcacattatcagatatataaagagatattaactagtttccccatttcataactccagcaaagaggatttttcttgctgaaagttactcagaaatgtgatggcaaggatctatggcttttttttttttttttaagatctcttgggtcatggtccaatagtatctgttagtccaaattattctttaaagaataattgaatgtgggccgggtgcggtggctcacgcctgtaattccagcactttgggaggctgaggcgggcggatcacctgaggtcaggagttcgagaccagcctgaccaacatggagaaaccccatctctactaaaaatacaaaattagctgggtgtggtggcgcatgcctgtaatctcagctactcgggaagctgaggcaggagaatcgcttgaactgaggaggcggaggtggcggtgagccgagatcgcgccattgcactccagcctgggcaacaagagtgaaactccctctcagaaaaaaaaaaaaaaatgaataattcaatgtggaaattataatctgaatagattttccaaggagaaaattatcacttcttttgaaacagatgagtgaattattttgtgctacgttttctaccccttattttatacggaccttaactccttcgggaagagtgtatggtataaggacaccaataagcatttacagaatattaacaaaccaacaataggttgatgattcaccctggattcgtgccaggctctgtgaaagaactcaataaacatgatgtgcatttcaaaaactgctaatcataattgaaatttccaaacccctcaatcccataaattatatgaactagaatatgatcatttggcctgcccctactccctttacagcatgatagaccctgtgattatcaggctttcgggaagtgggacacaatacttcattcttcaaagaaaaagaggtgatgtttggtcttttcctctttttagattttttttcacacgtaccttatagagttgtacactgctctttctaaaatcccttctgtacctgtacagtctctcctttatgccttcatgacactttttattcttttcaaataagcagtgcgacttatcacttttatttttctttctgtaattcatcttttgtcatgtacactatttgaaaaatattacaagccgctcatcagaatttcgaaagagtccatatgagaatggtttacacccactctgtagcccgcagcaacatggatccgcgtcctaatgactgaaaaggccaattaagacccgggtaacagcaagatcaaccggacttccccccaccccacccgggacctgcccgcgccgccagcccggcccagcccggggggcgcggggggcggtactggagcgcggcgggcggcggaggagggccggcctcgcactctcacaaagacgcgcccgcggcgggagcccagcccaccgcctctggccgccgcctgcagcgcgagccctcgagccccgggccgcggcgttgtcaaggctcggcctctctccgccttcttctctgctcattttattaaaaagattaaaaaaaaaaaaaaaaaaaaaaaaaaaaggaaaaagagatcccgcctcctccgcctcccattggccgggcccccggccgcgtcacaccgcgctgtaccaatggaggggcgcgatactgcgaggtgggccgggcccgagcggggagtgggcggcgggtcggtgcagcagctccgccgcggctccgccaccatcgcggaggtgccgctgttcccacagacgctcgcgagcaaccctccgcgctccggagcctcctcagcctcccgcacaccccgagacgctcgccccgctgggcctcggtccccgcctcctcccccgtccttttcccctctctcgctccccacattgtctctgcctcattttctctcctagttgaggattaaaaaaaaaaaaaaatcaccatcatcctcagggagccccctcgccctcggaaaacaaaaccagacatgatcctgggctcctgcttctgaaagatctgcccgaccgaggaggagggagcctaggttcaagtcgcaggaaaggtcacggcagggaagccccctcagcccctccgcgtcgcctccccgcgggccgcccctctcggccctgcgccccgcggccccgcagcctccgcgcggcctcccgccccatccccgccactttccccggagctgggccgcgaacacctcactattgatggtgtagcgctttaggggaaggtaagtgtccaacttgcccgcgccgggtcgtgtgctttcttttttggcccctcgtcctggtggtcagagagggtcggccgtgaaagcagtcactcgcccggggggaggcaggaagaaaaggctggggtcgaagccgaagtcgaggggagtcgggcgagggcagggcacttctttggtcctgtccgggccaggtgaccgttcctgcgtgccttctgacccctgctctctcttggcctcttattcatgctcttgttctacttgtttgaggttaaactatttcatgtgactacattattggctgaaactggaagggaaggaagtcaaggactgaaactgtaaatttcttgaatgtttgtggatttcggggtgctggggggaggactttattattaaagtatcattttctcattgggggaagatttcctctttgtgctcccaatctctagttctcagctgtatgtgattagaaaattatgaaacccaaagtcacttgcagcagaatagaattcttactatcctgttttagttctgctctctgaaggagggtggcttctatttattactaatttttaagatgatggaaagattcgtagttttacatacacgtgtgtatgtgtgtctgctaggaggggggaaaagtgttgcaggcttcctttgaaactggttgcttgagaagttgttgaaaggaaaacagaatgattcattgttgaattgtcattttcctctgtctcttttccaaggtttgcttacaatttttctggattacagacttcaaacattgatttaagtaaaatgggtccttgagaaactgggtgctttaaatgtttcagtatctgttgcttttttaaggtacatttagaaagtagttttgtatgaatcgtgaaatagccttcttcacagcgaatttttaaacgcaaaaaaagataactagtaagagggtgaacttggtgaattacaaaatagacattttaatatagcaggaattgatgcatctaagatttgaaacagttttcataattgctttccatttaaagagagacctttttgtctagtgtacactggtctttttagtctcagtctgttgggggaggggagagaagctggatctgtacaataataaaatcatctttgggttgatattttgttccatggatttgcttgctgagttaatactactgtaaattatcaaccagttttgattttgatggcctgggatgggtggaaagctggcttccagctctccctgttgttgttgaggtcgaagggaaaagaggcagaggcagacagacacacatatacacacacacacacacacatacacacacacacaataccaagctgagggctcattgttcttccatacacacattcattctctctctcccatatttgggactaggtttgcacagacaaacacagctctttttgggagagaagagagaagatgggggaagggagggtgcttttctgttacagctttcttccacccatctcatgcctggccgtttttgcaaccttgtgaggcagaagagtgcattggaaactaaaggacactcaaaaacatgttcagagacttctcttctctctgcctccctttattccttttgcagccgtggtttctgctgctctttcttttttgtatatgtaaagataaaatccctctttatatgttgtggccttacgttcagctctcattgcttttgtatttctcattgaccctgattttgttggggacagtgatttgttcacttgagtcttagtagtgaatgtgagcagagtctttctagatagaaatagattttattgattaatattataaaggttgtattgaggttaatatttagcaagatgatgtttgcatgtttttagtggtgtgatggtttgatggtcaggtttgctggcaattgagctgtcaatgttgtttttgtaaataagggttataagaaaagatctggttttctgtttagggggctcctttgaatactggacagggaataggctagtccacctgggataaacccagctgtggcccaaggatggaggttggtgtgaatacatgtgggttgcagaatagcaccttctactggttaattgtttggaaagatccagacgaagaggatgggggaggggattaatggctgaggcttaatgattttcttttaagcgcagttgttgtgcctttctgcaaatgccacttccccgagctgctaatacagatgtcctttgacaggcacggttgcattgaggcattattatgttactggttgtgcttcgacattaatttgttctgttaccagaagtatttacactttgtgacttcccaggactcctttgaatgataccttctcatcttttatgagataatttctcttgaaatattaaaccagagggtttatttctgttcccagtattggaaactatatacaccagcagtcttttaaaaaagtttttagtatcattaataaaaaatcaaataaacctactctatggaaagtaaaattgtagcactggacagaggtttttcttgggatttaaaccaggtagaggggtagaggaggagttgaaggagggaaatctcactaaaatcggcaattttgcaaatgtagtggccttgcattgcagtagtgttgttttcagtagtcttataaagtctgatagggtgacttattgtatggattagataaagaatttaaaattggaagccagagaaaatgtgaaatgagtgtgtacacaaattatcatagaagagggtcaaattgttgcccaaaggcttgtaaactaaggtgcagtttcagagataatctgcttaataaatgtctcaaaggatttttattttcacaaatcctggcccatctcagttgttctaatgtaatgaactattagagaggtttgcagtggtaaaggggactgggtgtgtaggataaacatctgttccagactgactgcttctaggaatgtgacttctgattcactttactttcaaaacttcaagagtaatctctaaagttgtgtatcttttacaatgaaatgtgaacagttcaaatgtattattttctcagtgggaatggattcaggggatttcagttcaatatattctccatcagtgttttgtcacaaggaaactagaactgagaaccaattcacaacaaaaaggtaatccaaatcaagaaataaaatgtaccagttaccttttcaactttgatttactggtcagtcgaaaaagcttttaaaaaataggacagtaaggcctagtgcggtggctcacgcctgtaatcccagcactttgggaggccaaggcgagtggaccacttgaggtcaggagttcgagaccagcctggccaacatggtgaaacctcgtctctactaaaaatacaaaaattagcctggcactttggcgcgtggctgtaatcccagctacttggggggctgaggcacgataattgcttgaactcagaggcagaggttgcagggagctgagattggcaccactgcactccatcctgggtgacacagcgagactctgtctaaaaaaaaaaaaaaaaaaaggaaaaaataggatagtaaacactgtcaggtcctgcaataattatgtgtaatactgaacagatactgaacagaaatgttccaggtgctgtaaaaacacacatataagaatataatctgtgcccttctaaaaacctgtatatgctgaatattatcatggatttagtaagcattcattacttaaaaattagtttcaaatatcagtgatcaaaaaaaatttaagtagtaaaataagttggacataccaagttcttttgagagtagtatgctttcctactaagctacttttggcagctacttttgcagtcgatttaaaggttaagatagcagaaaattcaaatgtttaagtgagtcattagtgtaacctagctgtgaacttcgttacacacacatacacacatcctgaaagaaaagctattgttttacataatcagtttctgataatgctgtgctctagttaattacgggatttctttttttactaccaggaattcctcttgaatgatatttaagtgattgttgaatcatatttgtgtgattggtatcctgataattattctgaagttgaagctctccttgtcctatttaagtgtgattttgccgagccttttggcttatgtttggtttcttgtctaacagagttatagtttgtgtgtgtgtgtgttttttttttaaataatggaggagaaatgagcattttaaatatgtgttagaacattgttaagattgcataggccaatttaatgaacatttgaacacaactcaagttcaaatactaaatatatttactagcttcaagtttgggttggaattgtgatttgtatagctaacttgttggtgtgccaagtaatataagatgtactgtgtgtctgtacattaggtaactaggtcagagagtacagttaatataagatgctttttttggtaaagtggtctgtgccagtgtaaaattattattattattatttttcgagatggagtcttgctctgtcacccaggctggagtgcgatggcacgatctcggctcactgcaactttgcttcccaggttcaagcgattttcctgcctcagtctcccgagtagctgggattacagacatgtgccaccacacctggctaatttttgtatttttagaagagacagggttttaccatgttggccaggctggtcttgaactcctaacctcaagtgatccacctgccttggcttcctaaagggccgggattacaggcgtgagccactgcacacggcatatttttaactggtaaaatttgccagtatgtcagcaagtgtgagcaatatatttaactgtgaaaattttccttatatggttagttataaaatgatgtggcctctaattcataaaccactcggtatttgaggaatcctcataccctatttgtcttgggtatttgcatcagaagtcgaagccatgggttttatcttaattttaaagtagttatatacatgacttttaaggactttggttaggctgtttttcattgcaaggaacagaaagtcttccgagtcatctcaagttggggaaaagtagaacagaaatttaagccgtacgagccaggcctcacctaagaacaaaaaccccaggtctgcagtgcctcatacatactggaatactgtcagggatatgggtcccacccagctttagcgaccagataccttgttgcctcctcagcaggaggagtttgtggcgccttaccctagtgccatggccctgtatatgaatgtccaggctgtgtgttgcaataaatataccaccccaaaggggacaatattaatgtggttggcctggactaaccttaaaagagagcttgtgaggaagcatggctgtgcagcatcttcagacagtcctgcagcagcagggcagagctcctcctacaaaaacccattctagctcacgcagccatgcacacacttagcagagcatgcacggacacattcattggcacctgtatatgttccctaggctcccagaagtctgattcttttttgagagagggtctcgctctgttgttcaggctggagtgcagtggcatgagcatagctcactgcagccttgaactcctgggctcaagttatcctccctccttggcctcccgagtagctgggactgggactagaggtgtgtaccactacacctggctaatttttttttgtagaaatcaagtcttgccatgttgcccaggttggtcttgaagtcctaggctcaagtgatcctcctaccttggccacccaaagtcctaggattacaggtgtgagccaccatgcccagccaaaggtctgattcttgaccttcttcctgcttctggggtgggaagcaagggagtacagtgatgaaggcactcagtgtgtgtggggtgaatacagttcagggggagtgtgagcagatgagcatgtgggcatatgtctgtctgtgtgaactgcctggggaggcactggaaatgttctctggcaggacctggctatgctggggaagtatatccacacaagtggattctaggcgtgagccactgcgcctggcggctattgttgattttgatagcttattctaacaccttattttccttcaagagacttcatagtcataactcgtagtcagttatgatcctttttttaggtggtatcactttattacatttgtcttattctccttttattttctgtgactctgcccgcctactgactacctgtctacctacctgcctacccaagtcagtgtttcccgaactgtatttatggcttcctaatatgctgcaagtattttaagtgtggggtgaaataagtttataatgcacatgagctctttaaagcctcagaaacattttatactatagagggtttttgtttttcattttcctcccttaccccaaagaatacctgtttctttctcatgagatactcatgggatagatactactattctagtttaatagaacacagtttgagatgcacctgtaaaattaattttttttaatttaaatttaaattttttgaggaaaggtcttgctctgtcatccaggttggagtgcagtggcgcaatctctgctcactgcagccttgaccccctcgggctcaaatgatcctcctgcctcagccacctgagtagctgggaccataggcatgcaccatcacacctagctaatttttgtattttttatagagacagagttttgccatgttgcccaggctggtcttgaacttctcagctgaagtgatctacccaccttggtatcccaaagtgttgggattacaggcatgagccactatgtctggatttattttatttaaaaataactttaggccaggcgcggtggctcatgcctgtaatcccagcactttgggaggccaaggcggatgggtgacctgaggtcaggaattcaagaccagcctggcaaacatggtgaaactttgtctctacaaaaatacatttgctgggcacgatggcgggtacctgtaatcccagtactcggaaggctgaggtggaagaatcgcttgaacccgggaggcggaggttgcagtgagctgagatcgctccactgcactccagcctgggcgacagagcaagactctgtctcaaacaacaacaacaacaacaacaacaacaacaacaaaaacaaaaacaacaaactgtgctcaggacacagtgcctgaagtttttttggtttggccacttttatttcctaccacttaaataccttttcttcagttcttgttataaccttctcactcatttgatcacttcatgtcttgtattaatgtttattacttccatttatattttagagataattatgttctctttattagattatacatctcttgaaggcagaaagttttcctgtgactacagcagtatgtgtgttcacacttaaaattagatgtattctgaaaaacattttattgactccaagatgccatcatttgtaaaatgaattattattttgtatactgctaagaatgaaaaaaatgccagttaacctctgtgagacctttcctaattccagtggcatactatacaaatgtaaaacaaacattatgagtcttagagtcattgaaatatggtccatctatttaggctgactttcgtttcacaactgtctgttccctggaaagcatgtctgaagaaagattttaaagcagattattgtctcttgtagtaacattattataggttgcattcctgcctaaggacttagcatgaaaaatcttagctacagccaacagagatgctaccataaacctatagtaattatagttaaattatgttctacttcctatggagtagggataatcattatgtattttggtttgtaatatatgttgtatatctataatatacacaaatactaccttactgtattatcattttgacctaaaatgtgctgagtttatgttaaatattgatgttcctcatgattctatccattaacctctccctcagtactttttttttttttttttttttttaagacaaagtctcgctctgtcgcccaggctggagtgcagtggtgtgatctcagttcactgcaagctctgcctcccgggttcacaccattttcctgcctcagcctcctgagtagctgggactacaggcgcctgccaccatgcctgactaattttttgtattttttagtggagacagggtttcaccatgttagccaggatggtctcaatctcctgacttcgtgatccgcctgccttggcctcccaaagtgctgggattacaggcgtgagtcactgcacccagccctccctcaatactttgtttaaacaccaatttggtccagcctcaaattttgaaaatctctctctggagatgcagatctgtgttgtcttttgcctccttgaatatctttttggccctaagtttcagaacttaccaagctgtagtatttgtctaccgttaactaactattatgctattgcagaaaagttgttaagagctctagactcaatctgcagcccactgcttattaactctgtgacttcgggcaggttatttacctttctgggtctcagtttcctcatctgtaaaattgagataataataatactcgtgggtttgttgtgaggaccaaagtaattaattcatataaagtatttaaaaaggtccctggcacatagtaaatggtcaataaatatcagcctctttttattattactgttattgtcatctagagatctagctttccagtatgttctctttgttgtttataataatcaggagatctgcaggagacaatgggtgaactctagatggtttgaatagattctctttgaggtaccaattctaaaatgtttgctattccttgaatataggaaatgctaaaaacaatatgtgattaaataccaagtgaatagagtaatagtacagtttgaagtttggggtgttaataaatgatcagaatatcatggcttagcttcctgaaggaggtttttttttttttttttttttttgagacaaggtcttgctctgttgcccaggttctagagtgcagtggtgcatgatcacggctcattgcagcctcgatcttgagggtccaagtgattctcccacctcggcctcccaaagtgctgttactacaggtatgacccaccacgcctggcctctgaaggagatttatataagtagaacaatggcaagtaggaaattagaagtattactttattattaatttgggcttttggccaaaataccaatgtaaatttgtgtagtaaacagggtgacatcatattacttaagctccaggactagtcaagggctctctcatcctcctaaatttcactgtcttactactctttggttgatggctttgcagaagaccccaacaattagtcttttagagtgtgtaagagtgaaatgaccaagaacaagaacacaaactcttacatgtatgtgacttttttttctatcttgcacttgaatcaagatttgtgtaacttttaatcttcattgatcttcatagttgtacacagggttcaatcagtactgtggactcttgacccaatccgattagtgttccatcctcttagagagattcaagaagaaaggcaattgagggaaagagcaagacctcttgttggtctggcttcaaatctctaatgaggttgatgtaatggcctgtgaggagtaactaaaaatatttggctatctgcctaagcagccctacattctgacatttttcagtatagtccctgggactgggtggggggcggcggaactgcaaagtatttttcaaatttaaggataaagctggatgtggtggctcacaactgtaatcctagtgctttgggaggtcgaggcaggaggctcccttgagaccaggagtttgagaccagcctgggcaacgtaacaagacccccgtctctgcaaaaaaaattaaaaattagccaggcgtggtagcacgtgcctgtagcccaagctactcagaaggctgaggcgggaggattgtttgagcctaggaggtcaaggctgcagtgagccaatattgtgccattgctttccagcctgggagacagagtgagaccctgtctcaacaacaacaaaatgtaaggataagagaaccccataaggtacagttagggaaagatatcttgtgataaataagatttgccatgtggaaaactgacccaccatcagtgataactgctatggcattttggtaagatgctgatgctaattttggtaacaggagtgtcatctttgaggaatatgattatgtgtgattatattagcagagcaaagctgaagtctagtcacattgtactctcatattgtagcctgaagcaagaatatgatgacagcaggggagtgatgaacttggaggctagagaagagggaagcagaggcttctactgcctcggctgcattgatactggcttgcaaactcccggaggaagaggcccatcatctgctttggtcacttcagtgcaccttgcttgcgaagagtacagtaggcattcatttgttaaatgaatgaataatattaacgtatggtattattgaggtagagataagggagatttggcttaatcgcttgaccccaaggcatacttaggaagttattattattattattattttttgagatggagtctccctctgtcaccaagctggacgatctcagctcactgcaacctccgcctcctgggctgaagcaattctgctgtctcagcctcccaaggagctggggttacaggcgatcaccaccacacctggctaaattttgtatttttagtagagatgggttttgccatgttgtccaggcaggtcttgaactcctgacctccggtgatctgcccacctctgcctcccaaagtgctgggggattataggtgtgagccaccgtgcctggccaaaaaattattgataataacaattttatacctcaaatatagtgtagaaaaaacattttagagcttagttatttgaataatcaaaaataagtttgttggccgggtgcagtggctcatgcctgtaatcccagcactttgggaggccaacacgggcggattgcctgaggtcagaagtttgagaccagcctggccaacatggtgaaaccccatttctactaaaagtacaaaaattagctgggcatggtggcgaatgcctgtaatctcagctacttgggaggctgagacaggagaatctcttgaacccgggaggcagaggttgcagtgagctgaaatcgcgccattgcactccagcctggaaaacaagtgtgaaattccgtctcaaaaaaaaaaaaaaaaaaaaaaaagaaggttgttttgttttgtgatggagtctcgctcctgttgcccaagctggagtgcaaccgcgcgatcttggctcactgcaacttttgcctcccagattcgagcaattctcctgcctcagccttctgagtagctgggactacaggcacacaccaccatgcctgactaatttttgtttttgttttttttttttttttgagacggattctcactcttatcgcccagggtagagcgcagtggtgcaatctctgctcactgcaacctccgcctccgggattcaagtgattctcctgcctcagcctctcaagtagctgggactacaggcgcctgccaccatgcctggctaatttttgtatttttagtagaggtgaggtttcaccatgttgaccaggctggtctggaactcctcacctcaagtgatccacctgcctcagcctcccaaagtgctgggattataggcgagagccactgcacctggcttaatttttgtatttttagtagagatggggtttcaccatattggctaggttgttctggaactcttgacctcagacaatccgcccacctcggattcctaaagtgctgggattagagatgtgagctgttgcgcctggccccccaaaatgagtttattttaatcctagtaagtttaaactatgtattcaaaattatttaatagctgggtatggtggcgggcatctgtaatcctagctactcgggatccgggacaatcgcttgaacctgggaggccgaggttgcggtgagccgaaatcacgccactgcactccagcctgggtgacagagcaagactctgtctcaaaaaaaaaaaaaaaaaaaaccaaaaacaaaacaaaacaaaaaaaatcatttgaaaaagtaaagtttaataaatatagtactctttctctataattttgccgtgtgttagataggattagattcagcagtgagtggtagaaaccaaaaataacaatggcttaaacaagatagaagtttcctttctttcatgtatctcatagacagtcctgaaccagtatgctaccttcatgctcattaggggacccagccttcaacatgtaactctttcctttttgtcagaggtggcttctccactttctcacatcagttctgcattctcaccagcaggaaggaggaaaaggcaaaagctgggcacactcccttcttgtgaagatactttccagaaattgtacatatcgcttctgctatgtcccttcgattataacggaatcacaaggtcacacataactgcaagagaagctagaaagtatattctgtgctggaaattactatgtgcctagtcaaaaatcaggggttctcttactctggaggaagggaagaatcagtattgcactacatctggcagtttgtgccataaataccagtagaatggctaatgtagtattaacacatttgataatttgacagtattattgtaatccttcagtattatttgtaagaataaccccccacctccagttcagtatccagtatagaattttcactgaaatttgtcttgatctaacgatggcttcagatttttattgctgggtaaattttctaacaagatgaactgccttctgatttgaacattctgatcttggtagcataatctgccatgtgtacatatatatattttatgtgattcattattgtaggaataattactgaaatttcctaagttgttatacacttaggattatacacatatgattaaagaccttgttgagacttaatttttaacatctataaactggaaaaatgtgcagacatcttgtttctattaatatattgagaaaagttttcattaatattaatatttcttaggaaatctagctttataaaacatctacatgtttctttcatattttggttggaatggtttagcacctttgtttgcatagcttagtgagaatttagtctttgtggaatccttaaacacttttgacgctacagaaactttagttggctgggcacagtggcacatgcctgtaatcccagcactttgtggggctgaggcaggcagatcacttgagcccaagagtttgagaccagcctggacaacatggcaaaacccagtctctaaaaaaaaaaaacaaaaaaccaggcatggtggtgtgcacctgtagtctcagctactcgcgatgctgaggggggagaattgatttagcttgggaggtcaaggctgcattgcacttcagtctgggcaacagagtgagactctgtctcaaaaaaacagaaaaccagaccaaccttccccttcaaaactttagtaacttgggattatatgtagccttggaatatttattctgtgatggtcgataatgaacagtgacttctttttttttatttttatttttgagacagagtctcactctgtccccaggctggagtgcagtggcacaatcttggctcactgcaaccttcacctcccgggttcaagcgattctcctgcctcagcctcccgagtagctgggaccttacaggcatgtgccaccatgcccagctgatttttgtatttttagtagagatggggttccaccatgttggccaggatggtcttgatctcgtgatcctcccgcctcggcctctcagagtgctgggattacaggcgttaagtcattgcacctggccgaacagtgacttcttttcacagctcagatagttttatacagtttatcttcccatgtattgaacgtcatattttgcctcagcatgtaaactgtgcaattgtgtaattgtcataaataaatttattttaaaatataacttataaattctttttgtcaacttagttccaatgtcctgaatgtgttaagaagttgcagtgtccaaggacttcttagaacccatagttattgccttttcaggaggcataccagggccctgggcagctggatggagagggaaggatcttacctttcgtacttttcttacatagcgtttgttgcaggtaaacaagacctaattcaaatgaatgcatactaaaagcctgtttttttttaacttttagattcttgcccctttctttttattatatgctttagtgaaatacaagtttaattaatgtagcaaaatagggcatacaaaatgaccaagacagagattgtgcccatgatgattttctcattaatgggaaagatgagacatgtacacaactgagtactaggtagaagaaagtgcctcaaaaggtgttgatactgtggtttaagaaagagaatcagctctggatgggggcattagggaagatttggtgtaggagttggtgtgtcacctgtgttttgaaggattggcaggatttggacatgtgataagtagctaagaggatttgaggcaggaaattgcatgaagcaaaggcacagagcctggaaaacttgggaaatggtgagtacttttgctgcttctatgatggggattattaaattgtgtttcaattttctttttaaaaaagatctcttttaaaatgttttatagcagatgcaggcaggcatagttttttcaactcaggtaatttgtatttgaagctgtagcgggtagctgttcagaccacatagtaagagcattttggagagggagtccttgggactggtttctcaaagaaggaacagactggtttggccagaaccatagagcactggaaagataggttgggatcatagcataggctgatttaacaccagggttaaatgactttatttgatagcttcatgtgttcaaatgaaatacaaattataattataaaattaatatatactcattgtaatcactttcacacaattcagtattcctccagacattttctctgcatatataagcatactatagatagtatcttgaatttaaaaaaattccaaacatatttttcaattcaatacttataactcaggtttgtttttgaaaacaactgcataatcggacgctgtatggatgtaaacttcacttttcccattgatggacagttaaattgtctcagactctttggttcgcatcctcatatctgtactgttgtactattgtacaagtatgtgtataggataagctcttaagtagagttgctgaatcagtgggttatgtttactttttattttgaaagctgtaaataaattgcccccaaagatatgcctgtgtatgcacagaatattttagggttttcatttccttctcaccatccctggatattatgaaattttataatctttgttaatctgataggtggaaatgtgtacaatgatatcttttcattaagaacattttttttttggccaggcgcggtggctcacacctgtaatcccagcactttgggaggccaaggtgggcagatcacctgaggttgggagttcaagaccagcctgaccaacatggagaaaccccatctctactaaaattacaaaattagcctgacgtggtggcacatgcctgtaatcctagctactcaggaggctgaggcaggagaatcacttgaatctgggaggtggaggttccggtgatccgagactgtgccattgcattccagcctgggcaacaagagcaaaactccgtctcaaaaaaaaaaaagaacaattttttttgagacagggtcttgttttgccgtccaggttggagtgcagtggcgcgatcagggccgactgcagcctcaacctcctgggctcaagcgatcttcccatctcaaccccctccagtagctgaggctacaggaatgcactaccacacctggctaatttgtgtattttttgtagaaacggggttttaccatgttgctcaggctggtctcgaactcctggactcaagcactccacctacctcagcctcccaaagtgctaggattacaggcgtgagccaccatgcctggccttacaatttttttgagactgagtcttgctgtatcacccaggtggagtgcagtggcgcaatctcggctcactgcaacctgcggctcccaaattcaagtggttctcctgcctcagcctctcgaatagctgggactacaggcgtgtgccaccacacccagctaatttttgtatttttagtagagatggggtttcactgtgttggccaagctggtctcaaactcctgacctcaagtgatcacacgcctcggcctcccaaagtgctgggattacaggtctgagccaccacttctggcccttacaaagtttttttagagacggaatctctctttctcaggctggagtgtggtggcgcaatcatagctcactgcagcctcttaactcttgggctcaagtgatcctcctgagtagctgggactacaggtgtgtaccacagtgcctggctcctacagtatcatttgaatttgcatttctttgaccatgaatgaagttgatgatcttttcatatatcagaattttaagatatactttcgtggtctctcagtcatagagacaggtggtttatgttatatggaatacttcgttctgagtgtcatttatttttaaaacacatttaaataataaaagcttcattgagattggtcacatgctataaaatttactctttaaagactgcaatttctggattttagtcatttaatttatgtattttttttttttttttgacgtagagtctcactctgtagcccatgctggagtgcagtggtgtgatcatggctcactgcaggggtgtccaatcttttggcttccctgggccacattgggagaagaagaaatatcttgggccacacataaaatacaccaacactggccaggtgcggtggctcacgcctgtaatctcagcactttgggaggccgaggcaggcagatcacctgaggtcaggagttcgagaccagtctggccaacatggtgaaacctcatctttactaaaaatacaaaaattagctggacgtggtggtgggttcctgtaatcccaactacttgggaggctgaggcagggagaaattgcttgaacttgggagatggaggttgtggtgagcggaaattgcgccactgcactccagcctgggtgacagagcgagactccatcttaaaaaaaagcaaaaaaaccaaaaccaaaacaaaacattaacactaatgatagctgatgagctaaaaataaaaaaaaaaaatcacaaaaaaactcataatgttttaagaaagtttacgaatttgttttgggcctcattcaaacctgtcctgggctgcggattggacaagcctggcttactgcatcctcaaattcctgggctcaagcgatcctcctgtttaagcctcctcctgagtagctgcgattacaggggcatgtcaccatgcctggctaattttgattttaatttaattaattaaaaaatttaataacctaaatgaaacatctaaaaccacagcttctggaagaaccacttgttcttgactgtcttgtacctctctttgaacttgaccctggcctctcagtaaccttgcatttaagagcagcctctctgaagacatccttgttgatgagagttttctccaaggggatatccacggagcaccttatgggcatgaggtgatagtagttataaactttcacaaaagacttgatctttggcggggcgcggtggtccatgcctgtaatcccagcactttgggaggccgaggcgggtggaccacctgaggtcaggagtttgagaccagtctggccaacatggtgaaacctcatctttactaaaaatacaagaattagctggacgtggtggcgggttcctgtaatcctaactactcaggaggctgaggcaggagaatagcttgaacccgggaggcagaggttgcagtgagccgaggtctgccattggactccagcctgggtaatgggttaaactccgtctcaaaacaaaaacaaaaacaaaaaggccgggcacagtggctcacgcctgtaatcttagcactgtgggaggctgaggcgggtggatcacctgaggttgggagttcgagaccagcctggccaagatggtgaaaccccatgtctactaaaaatacaaaaattagctgggtgtggtgatgcacgtctgtaatcccagttacttgggaggctgaggcaggaggatcgcttgaacccgggaggtggaggttgcagtgagccgagattgcgccactgccctccagcctgggtgacagagcgagactccacctcaaaaaaaaaaagaaaaaaaagacttgatctttgactcttcttcatcttcttcttgcccacaacagctgtcagtttgtggggatagtggtcaaatccagccaccagagcatggctgtaagggcgatctgaggtgccatcatcagtgttcttcatgatgatatctttgcttcctgagtagcatctggcatagcgtctggccagaacagcaccactttccaggtttcatgaacttgcccgtttttatagcagccacccaggcctacagcagaaagcctgggtaattttttatttttatttttatttttttttgagacggagtcttgctctgtcactcaggctgttgtgcaggggcgggatcttggctcactgcaacctctgttccccagccaggttcaagcaattctcttgcctcagcctcccaggtagctgggattacaggcgctcgccaccatgcctggctaatttttttctatttttagtagagaccgggtttcgccttgttggccaggcttgtctctaactcctgatctcaggtgatccacctgtctcggcctcccaaagtgctaggattacaggcgtgagccactgcatccggcctaagttttaaattttttatagaaatggggtcttgctatgtttcccaggttggtttcaaactcctggcctcaatcgatcctcccaccttggccttccaaagtgttgggattacaggaatgagccactgcgcctggcctagtcatttattttaaaattgagtgccaaccattgtcatattatttgtagtaaatgcctattaggctgaacttgaagttctctctttcttcattcagcatagtaggccccaaatttgaaatgagaaagtacaacttttcctgttacttttccagttagaggcttctcttactagagactgcagtcaggtacttggattctgaaatggagttaatgtgacaactgctttggaatctcagtgctttggtactggatttaaagtaacttacagttgaaactgatttccaactgcaagaggtgacacaaaccctgacttttttggaaaatgttttaaatataaaacctgaagtgaaaaaggcttctaaggtaaaaaagattttaaaatatggtaagtgctttaaattagtaagtcggttttttaggtgggtgattcaactgctttctagttagtctggtcattttttattccagagatttcttaatatgtctactaaagcatatgtgtgtttacgctaagatgactaaattgcttcaccttaagaacaataatgatctggcgtgtatctttcttttgtgattcatgctgattttttttttttttaggcggagtcttactctgtcacctaggctggtgtgcagtggtgtgatcttagctcactgcagcctccgcctcctgggttcaagtaattcttctgtcacacagttatttttaaagcataccagtaatttgtttgactgatttgttttcaattaaaacaacttttaatttttttctagggtctccctgtgttgcccaggctggtcttgaactcctggcctcaagtgatcctcctgcctcaggctcccaaagtgctgggatgacagcatgagccacaccgttcctggctttgactgatttttttttttgaggaaactagttctgtcttctagcactggcttccgtctgttgggtcctctgacagcccttgtctgttgcccatggatgattacagagtagtaggtcctatcactggctaagtctgtgaccctcatctgtattgtttcacttgggagaagttgtcaacggaggctcatagtagatggttttctgttgattttgatggaactaaatgtattgtttccttccttttgcttttatatatacttaaacattcagtttcctgttcttcatagtaaaatattcctaaaattgtggttctctgtattttaacccttcgtatttcattatttttctatagttttatgcctcttctgtttggaaagtcatatttttcattggcttgcttttagtcatttaaattacagtatcaggctgaagttagtgatttaatcttaattgatggttacagatcaaactccttattctactctttccctcttctcactgctgtatttgactattctaaaaaaaaaatcgcagtatctcctctttttccctcttgacatccctttttgtaattcctaattttttcatgtcttaagtttttttcctaccttaaagttcctttgccttttagttgcagttttgattaaagtggattttttcttgggcttttaattagattttcttttccttcagcttttcatagggagattgaagatgatgctgactgacacttgggtcagtggcctgattacttagaataagactgtgaacattgagtggcttgaatatagcatttaacttagcctgtggatgtttccacttctacttgaaggctatttcctggcttagaggcactgtcctgaaaaataacaaaatgaatataaattaaacaccccatgtattcttgtgtagtgcccatttgaatcaagatgagatctgagatctgggtggcctatggcagaatactatttataactctagaaacaatattttactaagggatatgttgattacattggagagaactactaggttatatgatagtagtttaaaacataatttatatatgctacataattcctgttttgtttttttttttttttttttttgagacggagtttcgttcttgttgcccaggctggagtgtaatggtgcaatcgcggctcaccacaacctctgtctcctaggttcaagcgattctcctgcctcagcctcctgagtagttgggattacaggcatgtgccaccacgcccagctaattttgtatttttggtagagacggagtttctccatgttggtcaggctggtctcgaactcctgacctcagatgatctgccggccttggcctcccaaagtgctgggattacaggcgtgagccactgtgcccggccatgtaattcctgtttcttctggcttcactaaaatgtcctgaactgtgatagcctctgtgcataagaaaaataagccatgactcctggttggcatgagaagacctagagtccatttccacctgaactatgggcttgaagtatgattatgtgccctacttccttagctgtcaaatagggacagtagtacataaactgaaatgaacaaatagatatggaaataccttgaaaatataaaaatgcatgctggatatgtggcatgtctatagttccagctacttggaaggcagaggctggaggattgctttggcccaggaatttgaggccagcctgggcaacgtagaaaactttgtctcctaaaaagaaaaaaaaaagtggggggccgggggcggtggcttacacctgtaatcccagcactttgggaggccgaggcgggcaggtcacaaagtcaggagttcgagaccagcctggccaacatgatgaaaccccatctctactaaaaatacaaaaattaccctggcatggtggcaggcacctgtaatcccagctacttgggaggctgagacaagaatcgcctaaacccgggaggcagaggttacagtgagccaagattgcaccactgcactccagcctgagcgacagagcaagactccgtcttgcggggaataaaagacagtctgggtaacatagggagaccctgtctttacaaaaataataaaaaatattagctgggcgtgatggtgcattcttatggttctggctacttgggaggctgagatgggatgatcacctgagcctgggaagttgaggctgcagtgtgacatgatggcaccactgcactccaacctgggtgacagccatcctctcacctcagccacccctccctccccaccttctggcagtagctaggactacaagtgcatgtcaccacacctggccagttttttttttatttgttttgttttgttttgtaaagatggggttttgccgtgttgcccaggctggtttcgaatttttgggcttatgcaatccacccaccttggcctcccaaagtgcagggattacaggcatgagccatcttgctgggccacctttttcttctcttttaacaaattcagcaatttttcagtcccagaaatctgtaaatacattttttgtggaaaaatacaatgggaatggcatcaaaagatggtttctattaggaatgggaacaggtaacagttttccctgccacctcaacaatcacaggtccaggaccctttaatataaagatgtagagagagccagagttagcttttagttcctgaaatgatttcagaggcttttttttttttttttttttttttgagacggagtctcgctctgttgcccaggctggagtgcagtggcacgatctcggctcactacaagctctgccattctcctgcctcagcctccggagtagctgggactttacttttgtatttttagtagagacggagtttcaccatgtgttagccaggatgttctccatctcctgacctcatgatctgcccacctcggcctcccaaagtgctgggattacaggcatgagccaccgcgcccagccttcagaggccatttttttctctctcaaaaaaaaaaaatttttttttttttgagacagtcttgctttgtcacccaggctggagtgcagtggtacgatcttggctcactgcaacctccaccccctgggttcaagcgattctcgtgcctcagcctctcctgagtaggtgggactacaggcatgagccaccacatttggctaatttttttgtatttttagtagagatgaggttttgccatgttggccaggctggtctggactcctggcctcaagtgatccacctgtcttggcctcccaaagtgctgggatgacaggtgttatagtacctgccctcaaattgtttattccagtctaatcatcaaggaaataagatctgaagagtcaaagagtaacttgtaattagaacagttaatatgggtcctttctttccgccctctgaacggtcctgactcagagttatctggttaagtgcctcttctcatgagaagttaatataatttaggttttctcacttttggtttggttatttggcatagtttcttcctgtaggaagcggccatatttttaccacttcttaggagaatacaggtgctgacaaattccttgcatccccaagtccattttgcttgggtcttaacctctttgcagttttctgggatgctgattgccagccttgttgttgtgggactggctttgaaatccaagacatcttttgaggatatcaaagtactgtaaaggatggaaatgttaaggttgcaaaatgcttggagagtatcacatgctgttgataggcttattgtagtgatttctgagccttagaaatttaggcctttgatacagctgtcatgaaggtgagcctcagccccatctgtgaatttctccagaatcattcagtttaggctcccagtatcaaaatagagccttctttctttctttctttcttttttttttttttttttttggagatggagtctcattctgtctcccaggctggagtgcagtggcgcgatctcagctcactgcaacctctgcctcctgggttctagcaattctcctgcctcggcctccaaagtagctgagattacaggcgcccgccaccatgcccagctaatttttgtatttgtagtagaaacggggtttcaccgtgttggccaggctggtctcgaactcctgacctcaagtgatccgcccacctcggcctcccaaagtgctgggattacaagcgtgagccactgcacccggccttcctgcttctttatgttccgctatccgatcctcacagcttctttaaaccttcctaatattgagaaacatacccgatgtaagacactgttaaaaagaatccagcatctgggggaggtgttagggaattgaatgttgctaaagcaccaaagagagaggagtttgactattttgagcttgtctgtgacacctgttttgtttggaaaatgctaatgaaactagttggcagagctgcatttttgaagttgtttcatttagtcacagtgatagtcatctgtcttcttttaggaggtgattgtctaggagtaactgtatgtgcgctcagcaccgggtcacaaccaccgtgggatccacttacagagaagatttgtggagagcttcagcctgtttatggtgttactgagaaaggaattgtggccatttgatataattctggatggaagacctcttatttgtattacattgaattagaggtcagtatttgaaattttctccttgagtggctattataagaggatcccgtaagaattgattactgtgaaattagccaactacatagtgtatttcaaagataaggtaaactgttggacttgtgattacctggtttctggtatgaattactgaacttatgtttgtttttatgtgcatagataaagctatatgcttgatactctttcaattataaacttaatgggttataagaatttataacttgggcttcattaagtgaagaaggcgctcttatactttgtctttttgttttgttttctttttttttttccttcttttgagacagggtcttgctttgttgcccaggctggagtggtgcaattatagttcactgcagccttgacctcctgggctcaagcgatcctcccaccttggccttccaaagtattaggattacaggtgtgaactatcatgcccggcctaatttatctttgttaagcttcacctgttctgttgatgataaattctgggagatgatggtgtcctttgtctttaaatggtttctgacaagttttcttttcttagtattttctacttttgtttgactcttaaagagttataggtttgaaactaatgtctactgcctctccctcttctcgtatgattcctgtgggtgtccaggagctatgtgtttagtttgaaaagaagagatttcagaataatcatgcttcccgtatacttacactgatcatgaaaagtaaaatttattctgaaaagatagaccagttgcttagtaagtgaaatgtaacttgttgtagaaatgatctgtaatttcaggccatattttctaggaaggtgctgtcatctaagtctcccttcccctgggcatttggctgttaataagggattatctgagtgatattttgggcttgcccattcatttggcagaattttatttttttagtgtctcttgcaagatataatgctaggcattggggatataaagatgagtaagatgtgtccctaccctcctggaggtcatgatgaaaagtggggaacagatatgaaaaaaaccccactaaaatacagactgaaagaactgtagtaatagtagaaacatgatgctccaacaatgtagagagtcattaagtgtgcatatactatcttgggcatttgcatagcacttagggagttaacaagttggtgtttatcttggcagaccaccttcaggcagctacctttattgtgggtgtgtgacctcatgtaacttgagtgggattttccatgtcattagtagttcctagggagtagagagtaaatctctttttggaagaggttgtattctcctgaatccaaaatacctttctgtatgttttgttgtcttttaagaatatttctcagacgttatataagtaatttcattttttctgagtcccttctttggaaaaggagttcttgccaaatgaaagggacacagtgtttggtttttcagttcattatgaaacccctaccaccctgtctccctaaagaagtaaagcctgggccgggtgcggtggctcatgcctgtaatcccagcattttgggaggctgaggtgggtggatcacttgaggtcagtaatttgagaccagcctggccaacatggccaaaacccatctctactaaaaatacaaaaaaattatttgggcatggtggcgcatgcctataatcccagctactcgggaggccgaggtacgagaattgcttgaacctgggaggtggagattgcagtgatctgatatcgtgctactacactgcagcctggataacaagagcaagactctgtaagtaaagcctgaccttttttcttcctagaaaatggcttagtttatttctatatgaaggatttgaaaaactgtaaaaataattcattagcatcttataaattgatacagggattaccttggagctttattaaactctaggctgttggttatacctattaccttcatatttctcttagtggtattaaatctattcatttatcaaatagattagatttattatttatttgtattattagctacatagtatagaaggtactggggagacttgtaatatggtggggtttgcccacattaggaacacatgtttttcctcatgtttaattttttttgggggggtgtcctttaactatctcgcgtttcagtacatatgccatttcctgtcccaaaggagcacataagtctagtcctaatcttggtgcttgaacccgcagttccagagaaaagcaactggcactgaatgctctctggctcatctttccatccaggatctgtcagctagccaacaggtgtgggaggtgtgttttccaagtttaatgttgctgttagtgggatacaaaagaaataaaagttactatctttggcctcagaatttaggagggaagccttgcaagaatacaacatttagagatttctagaacaaaagcggaatttaaccaagtacttactgtttagcataacaaatttagttcagtttcaggttagagattggtgtggattaaataagttgaccaaagatccattgaaaagctgagtgggccatcgaagaatgggtgctgtttgaatagcagactgggagagcaggttaggacagtccaggcaggggtcggcctgaggcaggaatgcatatggtatgcgcagcgttcagtaaagagaacctggttgaagtacagaatttgtggggaggaatagtgccagataagttaggtagaccaaagaagacaggcttggaatgctaggcacggagtgtctgttggcacctgaagggaattggggcgaggtaataaggtagcacgtcagccagagactggagagtacatctctgtctgagtaattttggccccaaatttgtaatgtggggatgggaagtgtattggtcagtcctgataaagagttatgtgtgcatctgtgtgacgtgttaaaattgcttcctgccactgctcgtgtttggtcagatagtaggttaggctgaaggaaagagaggtagtagccacaggacagataagctttgagaagccagagtggttggtaaagtatttggctttcatttagtatctctcatatatatatatatatatatatatatttttttttttttttttggtagagaggaggtcttgctgtgttgcccaggctggtttcgaactcctgggatcaagcaaccctcccccatcggcttccccaaatgctgggattacaggtgtgagccactgtgcccagcctagtatcatattttatacaagataaattttaccaaaaattctaccatcaaatatagaagttactttagttttttaaaaaataatagttcacatattctgtttcatgtcttctcttgcctctcaccctgagcacccactgattcatacctgtttatctccccctcctttgcttcttagctcctgtttattcttcaggtctgagttttgggatcatttcatttggaaagcctcagggctgtgcccagggtgctctgcctggcccctgtactcccccgagccatctcttatgcctcactgtaatcccacctgtacttgtcagtggctttgctaccctgtgtgctctgaaagcacagggacgagtcttgtttgctcctgaatcctcatctgtcagggctggtcaggcacatagatgctacatggttagtaaatatttgtgcaatataaaggttggacttctttgttactatcattacagcttcttaaaaaaaaaaaaaaaacactggctgggcgcagtggctcacgcctgtaatcccagcactttgggaggccgaggcaggtagataatgaggtcaggagttcgagaccagcctggccaacatggtgaaatcccatctctactaaaaatacagaaattagctgggtgtggtggcacacatctgtaatcccagctgctgaggaggctaaggcaggagaatcgcttgaacttgggaggaggtggttgcagtgagccgagatcgcgccactgcgctccagcctgggcaacaagaggaagactccgtctcaaaaaaaaaaaaaaaaaaactccttgataaacacctttgtgcttctatgtagtcattattaacatatattaaaaattactatattattataacgttatgatgttattataacacattaacataacatggttgtattatgtttttttcacatgtatattccttaagtattttcctattattgggcacttggcttatttccatttttcttttttgtactctatctagtactacaaccataaacttcttgtacatacagcacttctttttaatgcttttatttttttgagacagggtcttactctgtcacccaggctggagtgcagtggcaccatcatggctaactgcagccttgacctcccgggctcaagccgtcctcccaccccagcttccgaagtagctgggactacaggtgtgcgccactatgcctggctaatttttgtattttttgtagagatggggttttgccatgttgcccaggctggtaatacttttaaattaagaacgataaaggaaaaccatacaccaaagcacatttttttttttttttttttgaggcagagtcttcctctgttgccctggctgaagtgcagggtcatgatctcggctcactgcaacctctgctaccagtattcaagccattctcctgcctcagcctcccaagtagctgggattacaggcacccaccacgacgcctggctaatttttgtaattttagtagagacgaggtttcaccatgttggccagggtggtctggaactcctgacctcaggtgatccgcctgccttggcctcccccaaagtgctgggattacaggtgtgagccactgtgcctggccaaagcactgttttttttaaaggtgtgtatgtttgtttatatattgtgtttaacttcaaaatgagtggtctataaaatagcatttgttctgcccagatttcattttatagggaaataaatgcttcagttctgactcagattaaacaaattataaaatgaggcaaccatgatactcagacaaagagagagacactgacagggtgtacggatggtaccattttaagtaagttatttagggatggcttctctgaagaggtgacatttggacaaggccttgaacaggctagggagccatgcggaggtataggaatagagccttccaggcagagggaacatcaggtgcaaaaatcccgaggtggaagcctgctggtttggtcaaggaacagtggaaaaactctgggagaacagtaggaggtgataccaggaaagaggggcaggagccaggccataaagttccctgtggaccatgctaagacctctggctttcattccaagtataatgccactggaaggttttcatcaggtgtgtgtgacagaatctgatctctgtcttataaagatcactttggctgctgtgtgaaagttagactgcgatctttaccagctggaaccatggagggtgttgaagagaagaagaaggttcctgttgtgccagaaacccttaagaaaaagcaaaggaatttcacagagctgaagatcaagctcctgagaaagaagtttgcccaaaacatgctttgaaaggcaaggagggagcttatttatgaaaaagcatagtgctatcacaaggaatataggcagatgtacagaactgaaattcgaatggcaaggatggcaagaaaagctggcaacttctgtgtacctgcagaacccaaattggcctttgtcatcaggaccagaggtgccaatggtgtgagcccagaggtctgaaaggtgttgcagcttcttcgcctttatcaaatcttcagtggaacctttgtgaagctcaacaaggcttcagttaacatgctgaggattgtagagccatatattacatgggggaacccaaatctgaagtcagtaaatgaactaatctacaagcgtggttatggcaagatgaataaacaaattgctttgacagataacgctttgattgctctatctcttggtaaatatggcatcatctgcatggaggatctgattcatgacatctatactgttggaaaacgctttaaagaagcaaataacttcctgtggcccttcaaattattttctccacaagatagaatgaagaaaaaccacccattttgtagaaggtggagatgctggcaacagggaggaccagatccacaggcttcttagaagaatgaaccgaggtgtttaccacaattatttttctagtctgatcagtttaaataaacagtagctgctctcaagttgaaaaaaaagaaagttagactgctgccagtcagagtggaagcaggcagactgatgaggagtgtggccagactctgcaggggatgtgctgtgggcctgggttagtgtggtagtcgtggaggtgatgaagagcggttgggtttggaatttgataaaatgatgtgttctgagatgtgaaagtcttaccagtatttaaaaaaacagctcaaggcaggccgagcgcgatggctcatacctgtaatcccagcactttgggaggccgaggtgggcagatcacttgaggtcaggaattcgagaccagcttggctaacatggtgaaaccccattgctactaaaaatacaaaaattagctgggcgtggtggttggcacctgtaatctcagctactcaggaggctgaggcaggagaattgcttgaacccgggaggcggaggttgcagtgagccaagactgcgccatcacactccagcctggggacaagagtgagacttcgtctcaaaaaaaagcagctcaaggcaaattatgagttaattagagtttaaaatgcctttgtcttcaaagtatgtcatagattctgtatccttgaaattcctctgttggagaatggaaccaggaaaggtaaggactaggacttggttgcattgtgaatccacttgctgatggaacaagaaagatggaacagcagatgtgcatattttcctctgtaatggtcattgatttaatataaaagatatgtctgaagaatgtatgcttggataagtaatatgctgaattctggtgtttggtgtgattgtattagcctagacctgtttagtagtaactttgaaatatgttgcagcaataataaggaatgtagtgggtgcctttctgctgttatcaaaatccattaacaggttttcctatgcttgactgcctttcattgttacgctttatggttcatactgagggggcatgtaaatgacatctcttctatggtttctcaaggtctttaaaacagtgttgtattttgagtaaatatctgtttattccatagtaaggatagatgctagacaggttatgatttgctttggttctactcccctactttggataggattttacctaggtggagcattggatcatgttcttgagctgtgtggaactttgatttgcttatgtgaatgcttcacactgctggccaccctttgttgcttaagcagtagagacataagctcatcctgggtacaccttttagtgtgcaaggttctgtgaaaagtgggtgaaggtgcttctcaagccattaaattgtagtggactgtctttttttctttagcaaaatttggttttgggagtatgaaatttaaacttgtgtctgccatttgtaagatacgaagtcatagtatgagtgtttttggggttttgtttgctttttttagagttggggtcttttaggatagaattcccttttccttaaccacttaaagcttgagaacaaagatttggaaaccttttttgggtagcagatcacttcattaatctgataaaaactgtgaattctgtttccagaaaaagacatatacatatacacgttcgttcaacagatttattcagcgtgtatttattgaacagctactatctgccaggcatagtttatagatgtttagaatacaccagtgaacaaaagagaaaaaaaaccccaagcaaacctaaaaaccctgcctctgtggagcttatattctatggaatccaatgggtaataaacaagaatgttatgtagtatattagagtatgataaatgctgtggaaaaaaatagatactgtaagggagtttgaaagaagtggaaagatggtggtggttgcaatttaaataggggagtcaggataggcctcatggagaggatgatgtttgagcaaaaggctaaaatgtgtgggagtttgccatgtgaagttctgcagcgtgagcttcccagacagaggagaatagtcagtggaaaggtcctgaagtgggcacaaggaagacagcgtggtgggagcagaatgagcagggggtagagtggtgtgtcagtttcctggggctgccattacaagcacatgcttggtggcttaacacaacagacatttattgtgccacagttgtggaggccagaagtctgaaatcaaggtgtcggttggcagggttagttccttctgggggctcttagggacagcccattccatacttcctccttgcttctggtggctgctggcaatctttggtggcagtccccaggaactggggattaggacttggacatatctttctggggaccacccattcagtctacgatgtctgttgtgacttctgaggtagatgttcaccggtaaggggctgggggaatgtaaaggtgcttcttggggccttttcaggactttggcttaaattgaaatggggaaggcactggatggttttgagcaaagaagtgacatgatgtgatttgcattttctcttctttttttaaaaaatttaatttctgtttagtagagacagctctccttaggttgcccatgctggtctcaaactcctgagttcaaacagtcctcccacttcggcctcccatagtgcattatttgcattttaaaaggacagaagactcctttgtggacagcagactgggacaacaggctagaaataatgagataggtgggaggctatcatgataataattcatgtgagaaatggtggtgcttcatccatttgctagtagacttgtgaaaagtatatgacttctggatgtattttgaagatagagcgacagtattttctgatgagtttttaaatttttttagtcagaatctcactctgttgcccaggctgcagtgcagtggtgtgaacacggctcactgcagccttgacctccctggctcaggtgatccttctacctcagcctcccaagtagatgggaatataggcatgtgccaccatgctcagctaattttaaaaactttctgtagaaatggggtctcactatgttgcccaggctggtcttgaactcctgggctcacatgatcctcttgtctcgccctccccaagtgttggaattataggcatgaaccaccatgcctggtctctgatgaatttcactgtagggtaggggttgaaagaaaggagtcaaggatgattccaaggtttgggactgtgcagctcaaaggatggggttgtcaggagctgacatgggaaggctgtgtttagagcagattatttgtttgttttttaagatggagtctcactgtgtctcccaggctggagtgtagtggcgcagtcttggctcacttcaccctccacctcccgggttcaagtgattctcctgcctcggcctcctgagtagctgagactacaggtgcctgctaccacatccagctaatttttgtgtttttagtagagacaggatttcaccattttggccaggctggtctcgaattcctgacctcaagtgatctgcccacctcggcctcccaaagtgctgggattacaggtgtgagccaccgcgcctggcctcttgagcttactttggacacaccaaggttaaagtagtattagatactcaagtggagatgccaagtagacagttttaagatggtgtaagagtctggaattcatgtgagaaacctgggttggagatacctagttgtgagtgtgtggcaagtgtaagtaaagctgggaaaccagaagagattaccagtggagtatagggaagagaagagaaaaagttcaaggacgaagtccagggacgttaaaaagtctgagacaacagtcagcaacaaaagctgataagagatcagcaaaaaaggaggaaaaccaagaaatcatagactatattatatggcatcctggaagccagatgagaaaaacgtattcaagcaggaggggtagatgaagtgtgtcaaaaatctgctaaaaatcagcttaggactgagaactgatcattggatttagcaatgtggacagatgatcttggcaagattagtttcagggcagggtttgtttcatcattcttattggagtgggtttaagagagaatgaaaggagaatttgagagagtgagtatagcacctttttgaggatatttgctgtaaaggagaatagagaaataggtttggagctagtggaaattcagtgaagacatttacagaagtagcacgctgcctcaaaatcaggtataatttcaggggattaatgggtcccccaaatccctctgtgaacctgcaatttaaaaactgcttgtcagtaaaaccatgaggcagtaacttcatttccttccttgagatttcttttatattaagatgttgcatggtttggtaatttagatcactacaaggaatgagaattcctatgtgtcttcagttttctttgtaaggaataggcctcggtagaaattggccttacatttttggaaatctattttatgctaagtatttacccaggcattctagatgaatttaatctttatcacaatcctgtgtaacaggtattatccccgttttataattgtgagaaaatggaggcacggagagattcaataactttcccaaagtaactcagctaggaagtggcagagcagagttttattttattttgttttttatttatttgttttaagacagggtctcaccctgttgcccaggctggaatgcagtgggacagtcatagctcactgcagccttgacttcccaggcttaagcaaccctcctaccacagcctctgggacacaggcgtgtgccaccacacccagctaatttaaaaaaaagttgtttttttttttttgagacggagtcttgctctgtcaccaggctctggagtacagcggcatgatcttggctcactgcaacctccatctccagggttcaagtgattttcctacctcagcctcctgagtagctgggacaacaggtgtgtgccaccatgcccagctaatttttgtatttttagtagagacggggtttcaccatgttggccagaatggtcttgatctcttgagcttgtgatccgcctgccttgggctctgaaagtgctgggattgcatgtgtgagccaccgtgcctggccgagaattttttttttttgtacagacaaggtctccctatgttgcccaggctggtctcaaccctctgggctcaagtgattcttctaccttggcctcccagagtgctgcgattacagacatgagctaccgcgcctggcctcatggttctttaattgtggatgctaataaagtttgtgagtgtggggcagagaagtgaggtgtaggtaggtgttgaagggcaagtggtgcttgggaattctttgagattttcagttggaagattctctgaaagaggaagcattgtcctcatggattgctctcagatgacataaaatagatatagtaagattacaatagtttttattctaaggacttgagaatagcttcttttcctccagcagagaggtaagcatcctgttccattgtgtgatagttgttggctgacacacagatctactttttctatttccagcgggtgaaatcacttcctctccacctgtactttattttctggtccttttgacagtagggcttgatattttggtataccctggatggcattgttctcttgactcagatgacctaaattacttgctgtttattgtaaagtggttcaaggatgctttgaggtcctagagttaaaaatggatgattctgagtcagtgtggcttgaagagcatgtcactgaggatctcctagtccactgggatgcagcatttgatctgctccaggttgcatcccctttttctctgctgtttgtgttagtctttgctttctgaggtaactcaggcatgtactcgctgtaatgtctacccaaagccagtctcattaagaccagccaaggccaggaaatggggaggaaataatacatacgagggtgctggagcccaaataggttgtcctttaccccaaggtacaggtcaaattagtgacagagttggcattagaacccagtcttcttaatgcctaagttagtgacttagtcattttttttgagacagaatcttgccacctgagtagctgggattacaggtgcacaacaccatgcctgactaatttttgtatttttttgtggagatggggtttcaccaagttggccgtgctggtcttgaactcctggcctcaagtgatctgcccgcctcgacctcccaaagcgctgggattacaggcataagctgctcccggccactaagttaatgttttttaaataaatgagtgtaagcacttttatgtaatcataaattttcatcatcattgtaatgaatgcataatgtatcataagtgttttctgttttttactgctgtaacactatggatctttttatttccattcagtaaataagtgattgtcattgttctaggcactgaggatatgataatgaataaatagaaaaaaatctctgctctcatggagcttacattctttcttttttttttggagacagtcttgctttgtcgcccggactggagtgcagtggcgtgatctcggctcattgcaacctccgcctcccaggttcaagcaattctcctgtctcagcctcccgagtagctaggactacaggcacctgccaccatgcccggctaatttttgtatttttagtagaaatggggtttcaccttgttgttaaggctggtctcgacctcctggacctcaggtgatccacccaccttgcctcccaaagtgctgggattacaggtgtgagccaccgtgcccagcctaatttttgtatttttagtagagaatggggtttcaccatgttggccaggctggtctcgaactcctgacctcgtgatctgcccacctcggcctcccaaactgctgggattacaggtgtgagccactgcgcccggatggaatttatattctagcagataaatgtcatctcatatttacaattatttccttaggatagagtctaagtgatgttacacataaaactgtttagtaactggagtgggcgtggtggctcatgcctgtaatcccagcattttgggaggctgaggcaggcagattacttgaggtcaggagttcgagaccagcctggccaacatggcaaaaccccgtctctactaaaaatacaaaaattagccaggcatggtggtacatgcctgtaatcccagccacttgggagctgagtcaggagaattgcttgaacccaagagatggaggttgcagtgagccaagactgtaccactgcaatctagcctgggtgacagaggaagactgtctcaaaacaaaaacaaaactgtttagtaactgtattttctttttcttttttttttttgggagacaaggtcacagtggcatgatcttgactcactgcaatgtccacctcgtggactcaagtgatcctccctcctcagcctcccgagtagctgggactacaggcacatgccaccacaactgagtagcttttgtatttttgcagagatggggttttgccatgttgcccaggctggtcttgaactcctgggctcaagtgatccttctgcctcggcttcccgaagagctggaattacagttatgagccaccactcccgagccactgtatttctgaacatcagaatgagctttcctttaaactctgtaaaaaatgaagtcttctatagtatttttctttgcttaaaatgtatagtgtttgctgtctcacatacaagtgctatcacaaattaaactgagtagagacctctggaaggaagtttaagtatcatcagttcttgataagtaaagaacgttttcactagattgctaaaatatataaatagatcttgtgatttttggcatgcctgagaaaattttcaggtaatttattgtaaatttaactgcgcatcaagaaacatcttcttagagctgaatacagcagaaagactttaagacaacagtctatgtggggtcatcacaatgagaattatttgatactttaactcactgtctaatagataaattttatgtaatggcttgaggtgagtcagttcttgctgtttgcttagtgtggtgactgtaagaaatggttggagaaaaggaatgattgagctgctgtattcttattacttctaataacccattcttcagggtagatggtattactaatttccagatgaggaaatggagattcagagaattaatttgtgcagggtatcactattagtaatacaacatttggccttcaaattgaggtctgggtagttgaagtttttttttttttttaaccatatacttttatttttataccatatacttttattaaaagtatgacactttggggccgggcacggtggctcatgcctgtaatcccagcactttgggaggccgaggcaggtggatcacgaggtcaggagatcgagaccatcctggctaatgcggtgaaaccacgtctctactaaaaaaatacaaaaagtagccgggtgtggtggcgggcacctgtagtcccagctactcaggaggctgaggcaggagaatggtgtgaacccaggaggtggaacttgtagtgagccgagattgtgccactgcactccagcctgggcaacagagcgagactgcatctcaaaaaaaaaaaaaaaaaaagtatgacactttgttttcagagtgacctgtctcaaactactgtcttcttttaatttcatgtagaaaatataatgttcattctcttctgttttcctattttcttgatatttttcttcaaaaagttataaaaattaaacctaggcttgggtattctctttgttctttctcccttcacagtcacctccattattaaattttaattggtataaaacataagaaaaatatttgatgacacttgatagtatgtgttttctagaagggcaaagagaaaatctggacttcttagataagacaatgctttccagaagtggaagcacccatataactttttaagtaggttgccgtgtaaatgttagcagataaaatattgataactttctttcgtgttctacttagagctccttcaaaggtgaagtgcttattggcttcactcagaataagtggttctaatttttgactttgatactgttttaacattcagcaaaagaaagtatttaggtctggtgtggtggctcatgcctgtaatccttgcattttggcactttgggaggtggagacaggcggatagcttgagcccaggagttcgagaccagcctgggcaatatggtgaaaccccacctatacaaaaattaccaaaaaaaaaaaaattagttggccatggtggcgcatgcctacactctcagctattccggaggctgaggtgggaggatcacctgatcccggggaggtcgaggctgcagtgagccgtgatggtgccactgcactccagcctgggtgacagtgacaccctgcctcaaaaaaaagataataaaataaaaaagaatttaaggggaagttgaaacattgatggtttttagaagaaggaaagaggaaaacttagttacaaaatttggtaagttgtatattacatgcttaatagaatgaaacaatattttggggctaggtgccgtggctcatacctgtagtcctgcactttgggaggccaagccgggcagatcacatgaagccaggagttcaagaccagcctggccaacatggcgaaagcctgtctctactcaaaatacaacaattagtgggtcatgatggcgtgcacctgtagtcccagctacttggaaggctgaggcactagagtcgcttgaacccgggaagcagaggttgcaacgagccagtatcacaccaccatactccagcctgggctacagagggagcccctgtcttaaaaaagaaaagaatgagacagtgaagaaagtaacccggtaacttcaggtggatgaaaaaattagaaagttactgagctatttaaagtgaaaggaaatgtaaagtttaggaaatttatataagaaatggtttgtgaaaataggaagaatgattactgtgttatgaatgataaacagatgaagaatttagagattattacaattggtatggaagcgatgtactaatttggtgtttacttgaatataatgaaactaattattaaccatgttttcagtggaaagatttctcagttaagcaaaagtttagcctgggtttgagaggcagtgtggcatgattgctaagagcacagatgcagaatccaagaccgcctgggtttaaatctgagctctactgcatagaggctttatattaatgaggaagttacttaacctccctgggcctcagcttcctcgatacaaaatggagatagtagtaatacctacctcataaaattgttaaaagagttaaatgagttaatatatgcaaagcttaagtgatgaaagaggtaaaatattccattgtttatcaaacacacaccatgtgtattttatttattttttgtttttatgttagttacttgtttcctagaaaacatgaaataaccaccatgtgtatttaatattaggtgctagaaaataccgttaagggaaaaaattgttttttaaaaaagttgatttatttgtttagtttttaaaggcaagatcttactgtgttgcccaggctgcagtgcagtggtgtgattgtagctcactgcagcctctaccttctgggcccaagagatcctctcatttcagcctcctgagtagctgggactacaggtgcgtgccaccacatctggctaatttttatttttttattttttgctgagacagggtcagggtcttactttcttgcccaggctggtcttgaatgcctagcttcaagaagtcttcctgcttcggcctcccaaagtgttgggattataggtgtgagccactgttcccggcccagaaaaaatttatgaagaaagaagaaatgtggctgggtgtggtgactcatgcctgtaatcccagcactttgggaggctgaggcaggtggatcacaaggtcaagagatcgagaccatcctggccaacatggtgaaaccccgtctctactaaaaatacaaaaattagccgggcgtggtggcgtgcgcctgtaatcccagctacttgggaggctgaggcaggagaatcgcttgaacccgggaagtggaggttgcagtgagttgagatcgcaccactgcactccagcctggtgacagagtgagactgtttcaaaaaaaaaaaaaaaaaaaaaaaaaaaaagaaagaaagaagaaatgctactatgaaaggctgatatggggcttttcacatgatttaattctcctcagctggaataatgaaataattttaaggaaaagcagatgagggttggactattgaggagttaaaatacccaccaatgaatgagcacgttcatgtttgttatgtttatgtccttgagaagattagataaacatggttttattctgtataatagactattaattcttgtttgattcttttaggtcattgaaataagttagatttcttataggttttaatagtttgccaaaatgatggccgggtgtggtgactcatgcctgtagtcccagcagtttgggaggccgaggcgggtcgatcagctgaggttgggagttcaagaccagcctgacacaacatggagaaaccctgcctctactaaaaatacaaaattagccgggcgtggtggcacatgcctgtaatcccagctactagggaggctgaggcaggagaatcgcttgaacccaggaggcggaggttggggtgagccgagatcgcgccattgcactccagcctgggcaacaagagcgaaactctgtagcaaaaaaaaaaaaaaaaaaaaaaatagtttgccaaaatgaaggagataatattaaattcctacaagcagtgagtataaaccagagaaagtagaagtgaaatctgaaagatgctgaaatgaagaaaactgaggaccaaagaaagacaggtacagttgaggctggagaacaaatgcatctcgaatattcaggattgctagtgattatggctagagaatgggatgcctcgaatgaatggctttagaggtagagcaagtttggctgcgtgtgtggattcgtggagagaggacacctaggaacaaggtacctggttagatgagtacatttttgttgccatcaccctggattatgataggatcctgttgagaaggaaggctatgagctgatgtcaaagacttgagtaaatgagtgggaaagatcattagagatcattctgttaaaattctatggcagttcttttgtgacatttccccttctcattgtctttgactgtcattgatgtcaaatgtatgtacagcattgtaacttactttagatgtaacttttttctgagatggagtctcgctctgtcgcccaggctggagtgcagtggcgcgatctcagctccctgcagtctctgcctcccaggttcaagcgattctcctgcctcagcctcccaagtagctggtattatagatgcgcaccaccacgcccggctaatttttgtgtttttagtagagacagggtttcaccgtgttggtcaggctggtctcgaactcctcaccttgtgattcgcccaccctggcctcccaaagtgctgggattacaggcgtgagctaccgtgcccagctaatttttgtatttttttacatggggttttgccatgttgtgcaggctggtcttgaacttcagagctcaagtgattggcgcaccttggcctcccaaagcactgggatttcaggtgtgagccaccgtacccggccagcaaccttctttcagcatctgctttctttggttgagagttgttatgaagacatatcatctggttatgatttaatataatttcatattattgctatagcatttcaaagcatgaaatatttcttgaacatctctatttagacagatgttttgacttttagatctttaagttaagatgacaaataatagtaacatttttggaccttaaaattctcaaaaactttctttggtaattcaatcaacaaaattctttttcttttaagtttagttgatattgtattaaaggtacagaccagatattcacttatttttttatttttattttttaaagaagtaaatttcttagttgcccaggctggaatacaatggcatgatctctgttcactgcaaccttcacctcctgggttcaagcgattcttgcgcctcagcttcccaagtagctgggattacatgcatgtgccaccaagcctggctaatttttgtacttttagtagatggggtttcactatgttggccaggctggccttgaactcctggcctcaagtgatccacctgcctcagccttccaaagtgctgggattacaggcatgagccactgtgcccagcccataaatttctttttcttttctttttttgagaccgagtcttgctctgttgcccaggctggagtgcagtggccaatctcagcttactgcaacctctaccttccgggttcaagtgattcttctgcctcagcctcctgagtagctgctgggactacaggtgcccgccaccatgcccaactaattattttgtatttttagttgagatggggtttcaccatgttggctaggctagtcttgaactcctgatctcaggtgatccacctgccgtggcctttcaaagtgctgggattacaggtgtgaaccaccaagtcctgccgaatttcttcttcttggaaacactgattttccttgttgagttcctcaaagccgttgtaaagttcttatcagagcaaggtacagtatgtaatctaattttttttccttgctggatttgtaagtttactttgtaagattttacttagaatgatgcttcaagaggataaagtaaaacagagtttatatatcaggaacaaatatctcaagtagcagtaagtttcagtccagtgtagtgacaggttatatctcgtaattaaaaaaaataagcatatgtttgtaattgagtatatatttcaatataaaacagttgaagctcctgccttcatggagtttatagagataacagctgtctgtattttggtgtcttttcttccagtctctttttctagttatatgtattacaaaattgggattattttacaaaattgggtatatagatattacatatgtacatgtacatgtgacagtacatacatacaaaattttatatgttttcctaaacagcgtttgcagcagagttctcacaagtctctaaaaacctattttatctttcttttttctttcttttttttttttttttttttgagacagagtctcactctgtcacccaggctggagtgcagtggcgtgatctccggtcactgcaagctccgcctcccgggttcatgccattctcctgcctctgcctcccgagtagctgggactacaggcacccgccaccgcgcctggctaattttttgtatttttagtagagacggggcttcaccttgttagccaggatggcctctatctcctgacctcgtgatctgcctgccttggcctcccacagtgctgggattacaggcgtgagccaccatgcccggcccatcttttttctgattgtaaaattagtatatgctaattataaactttacataatgcaaaaaaatatttagcaaatagaagttcctaatagtttttttttttttttgaaacaagtttctctctgtcacccaggctggagtgtagtggcgcaatctcagctcactgcaacctctgcctcctgggttcaagcgattctcctgcctcagcctccggagtatctgggacctcaggtgtgcgccatcacgtctggctaatttttttgtatttttagtagagatggggttttgtcatgttggccaggctggactcgaactcctgacctcaagtgatccacccgcctcggcctcccaaaattctgagattaggtgtgagccaccacgcccggcccagtttctaatagttctaatctccaaaatgatagctgttagaggagttccatgttttttctctaaaaaacatttatgctatatgcattttctttttcattacattttccccccccagcaggtgggttgttgcatctccttagtggattctgactgctgtagttattttctgtctttttttaattaatagaaataagattttattctacatactgtactgagacccactttttaatcttaaccacaaatcatgaacatttccccaaataggtgcacacatagtttattttttaataattacaggtattccataagaaaacatgttagtgttataatttggcctgttttcaactgatagatgtttagactgcctccggttatttgctattatgaacgatgctgcagttaacatccttgtcaatatcttttcataaacctgtgaatatttttacaggatgaattcctaaaaatagagttactgattcaaaagttaggcatattttagattttagtagaaattgccaagttaccctctaaaaaagattgtaccaattttgggcagtacattagccataggtttttaaaatacagcattttgttgagtgcttacagtttgccacagtgttgttctacgtcactgtacccttcccttgttcttcatggattgttaagtatagttatttcgcagatgaggaaactgaggacagagctagtacgtagtagggctataagtagactgaggcagtctgcttctcgagactgtgctctcaatcagtaggtgacattttctctaaatctagttttggacaaaacattcagtgatgctacaatattgaaaatgtagttttgcattattgagaaggtaaggccctaattatccataatccatggggaatgaccccttacagtcatccttttaaaaaaaaatttttttttaaataagtacccattctgtgtcaggtactgtacctcatgataataccttaactatttcaataatattctgaaatgagaatgtttactccgttacaggtgaaaacactgtgttcagtggtattgactctttgtgttacagaacttttggtgatagttgtttcaagctttgttttagaaaatttccaatatattagtgtacttaaaaattaatggtgttggccgggcgcggtggctcacgcctgttatctcagcactttgggaggctgaagcgggtggattacctgaggtcgggagttcaagaccaatctggccaacatggtgaaaccccatctcaactaaaaacacaaagaattagccaggtgcagtggtgtgcgcccggaatcccagctactcgggaggctgaggcaggagaattgcttggacctgggagatggaggttgtggtgagctgagattgtgccactgcactccagcctgggcaacagagcgagacttcatctcaaaaaataaaaaataaaaaaaaatcgtgtggcctgggtgtggtgactcatgtctgtaatcccagcatttcgggaggctgaggcaggagtatcgcttgagtccaggagttcgagaccagcctgggcagagaccccatctctacaaaaataaaataataaagttagctgggcatgatagcatgagcctgtagtcccaggtacttgggaggctgacatgggaggatcgcttgagccttggaggttgaagctggagtgagccatgactgtgccactgcacctcaccctgggtgagcgattgagaccctgtctccaaacaaaccaaaatgatgtgttttacatcctttatagtggtttggagttttacaactttaaaaatggttcggaattcagtgtcttaaggttgtcattctgaattaggcatctgcctatcactttgtacttggacagtcatttattgggtcagtgattttttgatggaatactgtggattgggattggaagtgcagtattttaaatcttctatatatgattgtttttgttttttgttttttccttgaaattgcttttttcctaataataaaatacagcagcagtttacccctcaaaacaaagtcttttactccttttactcaaatcattgggtaaaaaacatttactcaaatcaatgatttactatgtgaggtagtaaacattttaggctgcgtgggccagatggtcacaactactcacctctacccttatagccccaaagcatggatacatgcttttacagcaaatgagtatgtctgtgttcctataaaatttatttgtaaaaacaggttgcagtccagatgtggcctgtgggccaccgtttgccgacctctggcctctagaagttgtctgatgaacatttttcccctaaggatgatgaactccttctctaagtacacggtttctcttggaacttggggtgtgaaatggatttcctttgtcctcctagtccacacccacatttttgagactttagagctcttgtattatgagaatagaaccaaaggctcttcagggacaagcgtcggtgttgttacatgtattcataagtgagtgaattcacatcttttgtgttgtaaacaggactcttggacacctaactggcctgtaaatttcttcattttctttaacagaaaagtttactgtgctgttctttatggtaggcactaccctcatatgactatttaaattaacttaaataaaatttaaagttaagttcttcagtcacactagctgcatttcaagtgttcagtggctacatgtgaccagtgggtgctgtgttggccagcacagatacagtatatttccatcattcccaacagttctgttggacaatactcgtctagaattctgacttaaggattagagaaaaaggacatagaaatgatattaaagtataatgaatgaatgatactttcattatcttctgaaatggatattgtggtttatacaactttcctggaaagaatgtttttccatggttagatttagagtgcagagtattcctgtgtaagtacatacatcaaatttcctcttagttatttctatctttaaggtatagctgaaaatcaagactccagaaacacgttctttttacattatttggaagaaagtcattatgctactaagtaattttaaagaaaaagacatcattcagctaatggatgcctcatgaagtcatggcctttttactccaaatggcctgtgactatttcaagtggtccttctgtatctgtccaccacgtagctcgtcttttctccatcacttttatttattcatttttattttattttattattatattatatttggagacaaagtttcgctctgtcacccaggctggagtacagtggtgtgatctctgctccctgcaacctccgcctcctaggttcaagtgattctcctgcctcagcctcccaagtagctgggactacaggcgtgcaccaccatgcctggctaattttgtttttatttttagtagagatgaggtttcaccatgttggccaggctggtgttgaactcctgaccttcaagtgatccgcctgccttggcctcccaaagtgctgggattacaggctatttttaattttttttaataaagaaagctttttatttagaaatcccatcctttttgataagcagcattttttttctttctctttttttttttttgagacaaggcctcactctgcagcccaggttggagtgcagtggtgcaatcttggtttactgcagcctccacctactggttcaagtgatcctcctgccttggcctcccaagtagctgggattaatacagatgtgcaccacatcacccagctaattttgacttgctttttgtagagatgagatttcaccatgttgcccaggctggtctcaaattctggctcaagcaattgtcctgccccagactcctaaagtattgggattacaggcatgagccactgtgcctggcctccattgcttttatttcaattatgtatcaaaccttggattcctggtctactttctcataccacccatccttccgttccatttcctgaattgatgacctcatttccagagaaaatagaagccatcaaattagaacttctcggttttcaaccagtaatgctacatgccagtgatacccaactacttacagtttctggtgtagaaaatgaatagtcaatttattgttaaaaagtttaaagtccaattttccttgagccttgagttcagtttataaatcatattagtctattcattaattcagtacattttatataaaggtaaaagaaaaataatgcagtttttgatacatgttgattaattcaagttgaattctgtttaaatatccagttctacttataaacataactaacattaaattgcattttaaaattagataaatgcccaagaaagcttccaacaaaaccttaaaacaaaaccttcttaaaaccttctctaagtccttatataacttttgtaaatataattaaatttcacaatattgtgaattttcctgctcccaaacatgtctttctgtgttttcctgttttgataaatgctactcaattttctaagtaagtaaccctgggctgtgttgattccttctcttctccccactatatagaatcaagtattgtttctttttcctgtatctcttatctcttcctaatccattacgctagttcaggccactgtctctctctctctcttttttttcttttctttttttttttttttttgcaatggagtcttgctctgttgcctaggctggagggcagtggtgtaatcttggctcttggctgactgcaacctccacctcctgggttcaagtgattctcccacgtcagcctcctgagtagctgggattataggtgcgtgccactacatccagctaattttttgatttttagtagagatggggtttcaccatgttggccaggctggtcttgaactcccgacctcaagtggtctgccagccttggcctcccaagtgcggggattataggcgtgagccactgcacctggccactgtctcttgcttgaattactttatagattccaaaccagttggcatgttcaaatcctctaatttctaacaaaattagaaattttgttcttcactgctgtagtccttttgatcttttgtttgttttttctttttgttgttgttgttttgagatgcagtttcattgttgcccaggctggagtgcagtgttgcaatctcagctcactgcaacctctgcctcccaggttcaagtgattctcctgcctcagcctcccaagtagctaggattacaggcatgcaccagcacactcggctaatttttttttttttgagacggagtctcgctctgtcgccaggctggagtgcagtggtgcgatcttgactcactgcaacctccgactccctggttcaagcgattctcttgcctcagcctcccgggtagccgggattgcaggcacgtgccaccatgtcctactaatttttgtatttttagtagagacggggtttcaccatgttggccaggatggtctcgatctcctgaccttgtgatccgcctgcctcggtctcccaaagtgctgagattacaggtatgagctacctcgcctggcataattttgtatttttagtagagatggggtttcaccaggttgacctggctggttttgaactcctgacctcgggtgatccatccacctcagcctcccaaagtgctggtattacagacatgagccaccgcatccggccttttgtttggttttataacagctttattgagatacaattcacatatcatataatttacctacttaaattgtacaattcaattgttttttgtgttcacagagttgtgcaatcatcactgcaatttcagaacatttaattatgcccagaagaaatcctgtatccatgagcagttactcctcatttcctcctctactcatcccccagccctaagcagcccttaatcttctttctgtctttatggatttgcctattctggacatttcacgttaattgaatcatgtagtcttttgtaactggctgctttgacttagtataatgttttcaaggttcacccatgtggtagcataacatctgtacttcattcccaataaatgccaaatcatagtccattgtgtggctatgccacattttatttattcactagttgatggacactttgaatggttctactttttggctgttaaaaaaatgctgttgtgaacgttcatgtacaaacttctgtgaggatgtgtatttgcatttctcttggggtgacttccaaagcctaagagtgaaatttttggggggtatggaacctctgtttaacattttgagaaactgacaaactgttttccaaagtggctacaccatgttacaattttactagcaatgcatgaaccttgcagtttttccacattagcactaatacttactatctgggttttggattgtagccattctgatgggtgtgaagtggtatcttacagttttgatttgcatttccctaatgaggttgagcctctgtcttgtgcttactggccctttgcttttttggagcctttgatcttttaaaaatagaaatctgggtgaattacgtccctgagtaatggctgtgtggtgaacattcttttcttcttagcctggtcacctcttgcttgcttcagtttacaggtaattttcttcagggagccttccttgaaccccggctgtttgcattcagcccactctgttgttgtgattgtttatctagacttcctttctgaccacactaagcatagttaacagagattatacttggcatgggattgactggatgactgaatacatagatgactgtagcttttttttgtttttaaacatttaacttaagaaaaaaattctgtcttggagttagtacccgaagcagtatttcatgatttttgtgtgttccttgtttcctctcattttcccgatggcactaaggcacctggctgggatcctatagagagcgacacattgcagttgctctctgcatagtaagcttcccccaagagtcatagatgaggcaaaacccatgtgtactctgaggccagggctgagtgcataaggagcagctgcaacttgccctggggatattctttgacctggaggaggcagtgatgagggaaagggaagacagcgtgggaaccatcttgataagaagcatggggttctgagaaatagcctcctaggattggtacactgcagctggtggcagaggtcttcttgaccttgagttagctttttgagtgagaataaataacagtcaactagcaccttcacttcctgaattataggagggactttttttttttttttttagacggagtcttgatctgttgccaggctggagtgcagtggcgtgatctcggcttactgcaacctctgctttctgggttcaagtgattctcctgcctcggcctcccgagtagttgggactacaggtgcgcatgccaccacacccggctaatttttgtacttttagtagagatggggcttcaccatgttggccaggatggtctctatctcctgacctcgtgatccgcctgcctcggcctcccaaagtgctgggattacaggcatgagccaccgtgcccggtcttgttttttgtttgtttgttttttgagacggagtctagctctgtcgcccaggttggagtgcagtggttcgatcttgcctcactgcaacctctgcctcccagggtcaagtgattcccctgccttagcctcctgagtggctgggattacaggcgtgcgcctccacatctggctgatttttttgtgtttttagttgagacggggtttcattatgttggtcaggctggtctcaaactcctgatttcaaatgatccatgcgcctcagtctcccgaagtgctgggattacaggtgtgagccactgcgcccagctggacatcatttttaatactgcatggaaactcttgattatgggagtagattttttttcttttagttttcaagaagtacctcttacttatttttttaaggacgtcttatttctgaactgagaagtgaattacaccctatgattttttgcagagttgtacaaaaacaaatagaatctggatttgttcctatggttgtaactttactgaggtaaatattatctttctccatcaagctgtctagaaataatcttctgttttcattttcgtcctctaaacctgctatatattgcagataggaaatttctgagtcactgttttcttttttaagcttactggaccctaacttcttttagtcttccatgcctagatttttgctgattgagggactgtgataatttttttttcctcctttgctcaagagtgtgactttactgtagaaggcaaaatactaattttccatggtcccaggtcattctggaattttgagctcctagtcttcatttatgtggtgtagtttctccataagccttgccataaggggaagaaaaagaggagctgaccttatggtggaaacatcaatgtttggagaagaagtattggagaaataaggaggctgttttaaacagggtggtcattaaggtcatcttgaatcgtttagtccattatcagaggaaagtccccctgaggcttcatccagaaggaccaaagctgaggccctaggaaatgttcctggcctcagtgaatagtagagttagatggtgcctgacctagctaactgatgctactttttttgtcttcaaataaaataagcacctttctcgggtattctaggaaccaaaaagggctggtttcatggaaattatgattagtcttcacaatttgtatgttttaaaaaaattaagtaaatgggcacaagttcttgtgctgaaaagcttgtgttataaccgagaaagctgatttgtaattttttcattcatttgtcaaatatttaagtacctactgtgtgcaagtatattttcaccagaatttgtgggagactcacagttcaattagacattgaaccttctcctaaggcgcttgtcttccagtagggtgacgatgcttgtatgtcagtacaggtacttgtgataggaggctgaaattggtaagggtcaagtgaggtactgctgaagttcagaggaggaagcaatgacctctccttaggggaaggagattacacaaggttgcttggagaaggaggcatttggtctgaatcttgaagggttgattggtggggaatggagcctttttgaaggtgttctgataaaggagtgacatgatagagttgtgttttaggatagctatttctagtatgtcatgaaaggaagagagtgaagactgggtggaaagtaatgagaatctaacctttcttttttcttttccttttttttgagacagagtttcactcttgttgcccagtctggagtgcaatggcgtgatcttggctcactgcaacctccgcctcttgggtttaagtgagtctcctgcctcagccttccgagtagctgggattacaggcatgcaccaccacgcccgactatttttttgtatttttagtagagacgggggagtttctccatgttggtcaggctggtcttgaactcctgaccttaggtgatctgcctgcctcgacctcccaaaatgctgggattacaggcatgagccaccatgcccggccgagaatctaacctttctaactgtaggggaaatgaagaggtatgacagatgggagacgttgtagaggtagaattagttggatttggcaactgttagaacaaggcatatagtcttacatgtgggggaggtgtgaagcataggtaatttgcattacacctgtgccattaaaaaattgggaacacaggaggacaaactgatttgaggaagaagatgctaataaatacagctttttattgagatgagtgatttttgtcattaggcagatggaaatatttaatatcttgagaagtcatcaaggttaagatggagatactgagaatggggtagttgaagccccgaggtggaataaaattgccaaaggatttagtgtcagatgtatcttttccaagtttgtcacattgcaaaacctgaaaatcctccagttttaggacaggattgctctggtgttgtttaaagaactcagattcttcctttgagtttttatttctctttgaggttctttcattttgattctcattttggtaagacggtaaagcataatggttccgagtctgagcttgagaacagaaggattgggtttgaatccttgttctgccacctctctgtcctgtaatcctgttagagttatggaacgtctttgtgcctccatttccttgtctatataatggagctgataatagctaaatgatagggttgtttatacattagtgggataatgtatgaaaataatttagcctggcacatggaacataagaagtgctccataaatggtagctaatgttgccctgagagtcttgctggctccactgcttctaatcctagagtgtagagcttctctttttaaatataaaattgtacaaagtgttttgttttcatttagcataactgacactggctggattttcaaagaatttaacttagtattaatattagtattccaagggaataattatagtaaatatattaagaaaccatcctgggtgacagagcgagaccctatcttcaaaacacaacaaaaatccatggaaatgggcttaaaatatcaaaagcctgtccaaattcagttacctgttcttgggcttcctgctaccctccctgtgacctctcacccttcacaccaaggaactgtgtctctcacacctctaccaggtccctgcagatacttgcaacaaagctgtactactgacccaggactctttcttttaattcatctccgatttttggcatcttatctaaggctgacttttgtggactgtggtgattgatataaatgatgtataaatgattgtcttaactattacaggcctaggggctgggcgcagtggcttacgcctctaatccctgcactttgggaggccgaggcgggcggatcacctgaggtcaggagttcaagaccagtctggccaacatgatgaaaccccgtctctactgaaaatacaaaaaattagctgggcgcggtggcgggcacctgtaatcccagctactcaggaggctgaggcaggagaattgcttgaacccgggaggcagaggttgcagtgagctgagattacgccactgcactccagcctgggcaacaagagtgaaactccatctcaaaaaaacaaaacaaaactaaactaaactaatgataggcctaggtctatttacttggggagaatttattttgaattatttctcagataaatcttccttttcccatataggaaactgaccttaattagatttatacagtgtaatagctctgatcatcaagacatattgtgtgtgtgtgtgtgtgtgtgtgtgtgtgtgtgtgtgtatagagagagtaagaatttagagttatacgtatattggcaggaaaagtgtccctcacatttgaattttgtagtgtttttcttcatgtctgttgaacttgtgtagtgttctaagttctttatggctgttttgcaattgagcgtagtgggtgtacagtttcacacaacctgcagttagcagagccacttagttattgggatgggaatggcacccatatctcttgagattttgattttttaaaaactgtgctaaaccgtattctccaaaggagagaagaaagaattttgcagttttcgttctgttttttcttttgggaagcgtctactttggagaatttaacccttttctaaagtaactgcagttgtcttttattcccctttttgaaatacctgtgacctatagtttgattggaccaacaaaggcctcaggtgcactggcttgtttcacttgtgtgcttctggcctttttctttctaattcttcatccttgccttttgaaaggatgatgctcttttccaagtgacctctagcagattctgagatgtagtgtccgatttagtaattttctcatataaaaggattctacagttaatgtgtcagaagaggtaatagttgacagtaaagtaggaatttttcatttttctaaaggaaaaatataacctttcagtgacttaatacctctttcctttctttgacaatcacagtatctttttatttttatttattttttcaagatggagtctcactgtgttgcccaggctggtctccaactcctgggcttaagcaatcctccggcttcagcatctgagtagttgggaaatatctttttagttagtacctcaatgttgaggtgagagaataatcccattttttaaattgacaaaaattgtacacatttattgtgtataccatgatggtttgaaatatatatacattgtggaatggctaaaatgagtatatgtattacttcacattttttttttttgtggtgaggacacttaaattcttctttgcaattttcagtaatataatacattattattaattatagtcactatattataaagctgatctcttgaacttattcctcctcactgaaattttatgtcctttgactcacatttccccagtcctcctctcagcctttggtaaccaccattctactctttgcttctacttcagcttcaaaaaaaaggttgatgaggcaggaggaccccttgatcctaggaattcgagaccagcttggcgagacctcgtcactacaaaaaataaaaataaaaagttagccaggtgtggtggcgcacacctgtagtcccagctacttaggaggctgaggcaggaggattgcttgcacccaggaatttgaggttacagtgagttatgattgtgccgctgcactccagcttgggcaacagagtgaaaccccgtttctttaaaaaaaaaaaaaaaaaaagattgagggccaggcacggtggctcacacgtgtgttcccagcactttgggtggctgggtgggtggatcaggaggtcaggagatcgagaccagcctggccaacatggtgaaacacctctactaaaaaatactaaaatttgccgggcatggtggcgcaggcctgtaatcccagctactcgagagactcaggcaggagaattgcttgaacctgggaggtggaggttgcagtgagctgggatcatgccactgcactccagcctgggtgacagagcgagattctttctaaaaaaaaaaaaattgaacttgacgttttaggattctgcatatacgtgggatcatacagtatctgtctttctatgtctgacttatttcacttaacatagtatcctccaggttcatccatattgttgcaagtaacagaattttcttagaacacatagtatcctattgcatatatatgtgtgtgtgtatgtgtgtgtgtgtgtgtgtgtgtatgtatgtgtgtgtgtgtgtatacatatgtatgtgactttatccattcatctgttgatggacacttaggttgattctgtgtattggctgttaggaataccattttgcatccttatatggatagtaaataaacatctttatgatgagtgtttttggtgaacagactttgaatgtttggctttttggttgaatttaatactttagagtgaaaaaaggctgactagaatgaaaaaaggctgatgttcaaatacataattttagtgaagtagtttctaccagctctcttaactacaatgttctatcagctgtgggaggagttgagaaagacaggaatacacaaaccagcaacaacagtgagcttatcttgattttcttcccattgtcttacatttgttcctctgataagtttatgggaaattatgtaaattctaggtctcttttgatggagcatcctatttagtattacattagtgatgcagtagagaatttgattttggtagcccatgtggttcattcatttagtcatgactagagaatgaggatttccagggtatttcttttgtgttaactttagaaaaaattgattatttagtgaaagaaatggggcagtaatttgctagggaaagttcatacaggacagtgattattaggaatgaattttatttaacagaaataggaaaatgtttactttgtgacatttgccagctgttaacactttctttgtgtgttttgtgttgaatgacaagtagcttcattatcttccatctttatgagtgccatcagaagcagtaactggtttgctttttttttttttttttttttgagatggagttttgctcttgttgcccaggttggagtgcaatggcacaatctcggctcaatgccacctccacctcctgggttcaagtgattctcctgcctcacctcccaagtagctgggattacaggcatgcactaccatgcctgactaattttttgtatttagtagagacagggtttcaccatgttggtcaggctggtgtcaaactcctgacgtcaggtgatccacctacctcagcctcccaaagtgctgggattacaggtgtgagccaccatgtctggccaacatgtggctttctaatgaataaatcattttcaaagtttcaaacccactgaaactaacaagattcagtgccaaattaatataattgcatgttttcattctaaagttaaagtgatcctgatcttcaaagaaaactttcaaaaagatatagtagtacagcaaagcagactaatattttagaaagaatattaccagtaataaaaaggacagaattatagtttgatgcattaattttaataactttttttttatggctcttgagccaagatgcataaagttaaacagaaatatggttctcattttgattgtactgaatttattatatggcatgctctcctcccttcagatgcagagtcgaggcttttaggtcctttttgtttaaaagagtgtgggtgatgctaatattatatagcactagaattaataattatcttcactgaatatccttcaaagcaatgtaataaaaatgcaataatttgaatattgcagttcaggcagtagtcactttagttataagtggtgctctgactttttaaaaataacaaatggttagccatgatctaattgttttgtgaattagttgcttgtaagaattatacttgtttcttgacctatagttattataaaattgacaatttgattattttttactttatttttaaatttttaaaaatgtttagtggagatggggtctcgctatgttgcccaagctggtcttgaacttctaggctcaaacaatccctctgcattggcctctcaaagtgctgggattacagctatagccaccacacttgactgataatttggttctttaattgacttttttcctttataatagcccttttgttgtggtagtatgctgtagatttggggttttaaaatttcaatttaatttaatttttattttttgtggagacggagtctcactatattgcccgggctggtctcaaactcctgggctcaagtgattctcttgccttggcctcccaaagtgctggatttataggtgtgagccactgcacctggcccaatttggggttttgcattttagaaatatatgttaaaaacagattctgacaatacagtttgtttttgccgatttgcttgcctagaaagtcttgtttgctcttctgtagcttgtcagttaaattgtctgctttaaaaatttttgtattctttgtcccagttccatgtgctacttggcatactatttagtttttacactgcctttcaacctccccagaggtggattgtccatgaagcttaaaccaaagagaccctcacttgagtggccctcttgacattttgtatacaaattttcgtggtctttttcttaaagaaggccccccaacttgtataaacaacagatctacaaaacgttccttttctaaaatacaggactgctaagaggaaatgaaaaacaaaagtaaatgtggatttttagttttgtggtttaggtaaaagggatataaacagaatattgaatggatttgtgtgtgatgccagatttaatttatcatgataaccatcagtggtgcaccagatgttttgactgtatttagcttcatattaaattaagcatagccagtggcctacaaagtccatctgtactgctgccaaaggtagcactgaagacagtcagccgccttttatgtctgttaccactgctagctgctgtttccctcttgccatggtatttaagctttggaattgctcatgcaaaggtgagcctttgtattgaattggaatttgtattctgtaaatcgactgtactgaatgacaaggcttgcctttcagtagatagtctattcttatttttgcttacctataaaccagtggaaataaatacataagattagttaggggtttattgaggcttgaattctagaaagaggggaattactatattatacacaagtgccagttaaacatgtaccaatctgaagaagatctttctatacctgctactaatcatggaaaacaattaacttactggtttttgttatataaatacatattaagatctgaaaatctcagcagttagttttatttataatcagaaagacagatgttaacagtcactgaaaatctttatgttttaaatgaacgcaccttcacttttacttgacttctacttcatcagcataattggagaaccatagattctttccccatgagtgagggcaaaacatacatctgcagtgttcttagcatgaggatcattaagatggcagaccttgtagatcaaacaatttcctcccatacaccctcattctttcctagaaaagcattgagacagctctgaaattagacctggaaagcatgtgctaaggcaagaacaaatatcttgaaaattttatcataatgttgctttttaaagtcctaaatgtcctctaaaatgaaattcttttgtattaaccttctttcatatgctggctttcaccagactgcagaattgcctgatttgactttctaatgtaactgtaatgaatcttctgggaagctgaaacgattgaacacacatactctgcaactccattgtaaaatattcagtcagtactgtcgatgctgctgattaaaaaaggagaaaaaaaaaaaaaggaattgggagtgggagagaaaaatgaaacactccctaacacatattagggcttaaaaccaaacatattctctcagggatttcaacctttacaagacatcatgatgtgcagtaataccttgattaaatatattcagtaactccttaataaaaacatcaagctgggtgaaggtagggtctgctttgtaaagccagaattaggggtatatgattatgttcagttttgacacatttgacacatctgaaaaagcatggaaaaaaactggcccatttgcacaaacagacaaattgccctgtgcattatgcatgaggacccagtagagttaaagatttgccagcctatgaatgtgggacctacatacagtggagcccaaatgtttaatgctgggtctttcaaatgtgtgtcctttacatactttgggtcttatttagcagccagagaatcaagaggtatgctttttcatggtataagtaatttatcccaggtatttataattgtagcagtatgtgtttggcttatttatctgaaagaaattgaacaccagaatttaataattaaggatttattagttaaaactgagtgttataatgagccagatgctgctgcattgaaacagccattttcattagcatttttaaatagaagagaattgaatttaaatttggagtgtcttgactttgatgagttgacattttaaaatcttttaaaatccgtcaaatagaaggcaaacttcttttaatttcaatgaaagacaagactcacactgaaatgtcaaaataggtaagtgattaaaaacctaccttaaaaatctgaatttctgattttgaatactgtaaaataacgttaacttaaaatgcttgagaaaagaaacgattgcaaaaatgcgtggaatataaaaaattaattttacctatgactgaaaaaggtatagatcactcaaatggaagagtcattggtgaatgggaatggggaagtgtgtttatattgtttattccctccttttatcgcagggaagcatttttaatagtagcttgagtggtttgatgaaacatccgaaggaaactcccaggagaggaagattatactggagagagatctctctgtgaatcatttatgctaacctcttgctgaagcacagcttgcatttttaatgaaggatgattgcatttcataaacagacctttaaaaattaaaataatattgatccttcctcatttaggcctattaaaataacatgctatacatttctttctaatagctcaggacagattattattattgttttaaaacaatacacaatttaataatgtctaatcaaaagtttctttaaatagaactttgattaaaatatttctggaaaatttttctttgtaatgtaatatctatgaaaacaaaatttaaaaattatgaaatggtttaaagtttggcacttcaaattatttccaacacaaactgtctctggtaagtttcctttaatttcttttgatcatatcagtttcctacaaaggcaatagcttcatttcttgaaacatctgctgtagcataggaaaagaaactcacaaggttttaagaaaccttgtttttatctacagccttacgatgagtacaagttacgttatctctcagtttgtcagtgttcttacttttaaaatatgtccctcaatgagataaagattaagatgaaacttaaacatgaacttttctgaattaccacttcactattgtttatcattttgatagtctcttctctgaacctgaatttctcttgtaaggattataggaataatgtagtttaatgccttccgtatctcttataactactagatgatactgggagtattttttttctttttttaaatgaaaatgttcctgagctatgctttagtacaagaatatgaaactgcaaaggaagtgtttcttttatgatgaaggattagaaataaaaagcaaagtcaaaattcatcatcgtatgatcgccttctgggtgatagtgaatttttttttttccatttgaagagtagcagcatgtggtgtataagaacacagacacgcaaggcaaatcctgtccctaccacttcactggcaagttacttagcctctgtgtctttttgctgtctgtaaaatggggataataatagtggcccttgaatggccgttatgaaggttaaatgggttattctagattagtgcctgccacataaagagctgtgttaagttttaactattattatattgaattgatctttttttttttttttgcaatcttaaaacagttatttggggacagttcccgtactacagtcaagtgctgaaaattctattatgacttcttagaatcaagtctttttccatatttactttgttgttgttgtttctttggtgccttgcatatataactagatgataatgtaagttcttttttttttttttttaaagtgaaagggattctgagctaaaggtttggtataattataaagaacataaaactgcaaaggaagggcttctctgaggacgtctgtatgaagttaacactgggtctctgtttagcctccgagttgctataggaataagcgcagtattttggacttttcagaataataagccatgcatgttctgcatgtgctttcacctgtcagtgcagagaggatcatcagagcaaaactaactgggtagcataagtttgacttcggtgtagtttagtcactctggaagaaatggaatttgctcccttccacccttctcttaaattcttccatcagagaggttttcccataggtgccaggtattaaaaacatgattcttataagaatattgcctttgttactatagattgctatttatttggagatattagactcatagagtgtagtaaggagcaaatgagagactagatgcaaagtgcttggcataatccctggcatgtcctaagtgttttttccagtagcagggctggcagaggtagggttggtggatgtttgtaaatgggggctgcttgaataagtatgtttcagagttattgagagattgtcatgatgggcaacagaacactacctgttttgggaagtgtgctcagatgtttcaagcactttggagcagcttatattgtagatagtcaaggttttcttcattccgcctcatggagaagataatttgaagggccacaggaagttatttgcttccttgaagcattttccaatagtttagatctcatgaatcagatcctccatgcagatgatgccatatttaccaagagatagagcaatcaaagcgttatctgtcaaagcaatttgcttattgattttgccataactatgcttgtagattagttcatttactgacttcagatttgggttcccccatgtaatatatggctctacaatcctcagcatgttaattgaagccttgttgagcttcacaaaggttccactgaagatttgataaaggcgaagaagctgcaacacctttcagacctctgggctcacaccattgatacctctggtcctgatgacaaaggccaatttgggttctgcaggtacacagaagttgccagcttttcttgccatccttgccattcgaatttcagttctgtacatctgcctatattccttgtgatagtgctttgctttttcataaataagcttcttccttgcctttcaaagcatgttttgggcagacttctttctcaggagcttgatcttcagctctgtgaaattcctttgctttttcttaagggtttctggcacagcaggaaccaccttcttctcttcaacaccctccatggttccagccggaaaaagaggctactggtttttaaaagactactgggtttgtgacactcacagatgttgaatgaggcagaatggtttctacatgtagcactttaccacccaagtcttagccctcatcttccgttaccttgatattgaagcattcatttattgaacacattgactactgactacgtgccaggcatggttctagaagtaacagtctcctaattcctctccagtcttccactttcatcactctataatccattcttttttttttttttttttttttgagacagaggcttgttctgtcacccaggctggagtacagtggcataatcttggctcactgtaacctcggcctctgcattcaagcgattctcatgtcttagcctcccgggtagctgagattacaggtgcccgccaccacgcctggttaatttttgtatttttagtagagatgaggtttcgctgtgtgggccagcttggtctcgaactcttggcctcaagttacccactcgccttggcctcccaaagtgctggaattactggtgtgagccactgcgcctggcctgtagttcattctttacacagagttggaggagtggaattgctttttcagaaacatagatcacctcgttctcttccttaaaaccctccagattctcattctgctgggagtaaaatacagattttttttcctccatggctgtgtgccagcatagttgatacttctgagtctctgatataactctgaccactctccacttgctcccttagcatcagtcacaatggcctcctgtcctttctgttgttttaggaactaacaaactaactcttacctaggtgtattgcattcatcataattgcctcagtgcggttccatcaggtttttttctttgcttcatcttataatttagatcgcatttcaatattattccttagggaggccctccctggcttccagtctaaagtagcgcattactctacatcaccttatccttttttttttttccagagcaaaattgtgttgttttcatttttacttatgtattttttggtgcctttcttgtgagttccataaaagcattatctacaattaaattcccagtggcaggaataattctcagaatataataaactcccaagaaatattttaagaatgaatgaataagctcacaatgatctccttcacatatctctattggagtctaccattatagtgaagttgttagcatgaggtggttaggagcgctggcacctcttactgattgggtgaccttggacatgttacttaactcctccagctcttcaattctttatccaaaaattgtgataataataataattatacccacttcatggagtagttctgatgattaaaggaacagataattaaatgcttgtaaagcaagtaaaacagtacctgacacacagcttaccgagatcttgataaatgttagccattattaccatcatcactgtcccccatgcctatgaaataccagaatagagacccacttatttaattagctcctctttttaaaatatgtatgttctgatacctcattatgaacacttaagacctatttgggccttctaggaatggcagttttgattggataagaaaagagtaatttaggaaggtgggactaggtctgatgaggtccttgaaatgcttaaagtccacacctttggggctgggaagaaagacaaaaggagaaattgagcaatcaccaggtttttcgtacttggcgatattaatgagaatcttgaagttgggatgctgccaaaaattgcttggtaagttgctggtgctggaattaatgcatgcatactgatgaagaaagctcttgacacttttggctctgtttccatgatctgtaggtttcctaaccatatacttgcgttggagcacaaagcttgtgtttggaactgaagagagtatctgataatagtatggagaatggatggaaggggagggttatgcaagatacagcaacgtaacctgtgagcctattgtggtaactgagtttagagatgggaagctctgaactaagatagtgatggtgtgagagtgaatgacagagggcatctggcgtggggctgagagaagagtctaagataattcccacgtttctgactgaagtgattgtggatgagttagaatcccacgtttgagtctcagctccactatttaccagcataataacttctggcaagttactgcatttttctgagcttagtttcgttatctgtaaaatggtagaggtaaataagggtgtttctctcccagaattgtcttgaactttagacgaaattatgtgtagttgtatacaactacttaagtaatatagaaagttatggccgggcgtggtggctcacgcttgtaatcccagcactttgggaggctgaggtgggcggatcacttgaggtcaggagttcgagaccaggctagccaacatggtgaaaccccatctctactaaaataaatacaaaaattagctgggtgtggtggcatgcacctgtaatcctagctactcgggaggctgaggcaggagaattacttgaacccgggaggcggagttctcggcagtgagctgagattgtgccattgtactccagcgcgggcgacagagcaaagctctgtctcaaatatacctactctcttattatctttagtaacaactaggctaggaaataatattaatgagataatgagattagagagtaaaggaggattaggttttgggggtaaaatgtgtatgggatatttagttagagaattccagttcaccgtttgcatatgggctttgagtttaggaagatagttctgtaactagataaggtaatatttagagtgtcttaaatatagtagatactcagtaaatcaagtatgaatatcatgtgttgatttatctgtctttccaaagttgtaattggtagcaaaaaaaattagggtgtttaaaaaaaaaaattggacaaaactttctttgagccttcatcacctctggcctggttaccctagcaggttcttaacaggtcttgttctccctgcccacctcccacttccatgcccacccccatgccatttgttttcacaacacagcaagcctaaggatccttttaaaagttaagtcagggctgggcgcggtggctcatgcctgtaatcccagcactttgggaggccgaggtggtcagatcacgaggtcaggagatcgagaccatccaggttaacatggtgaaaccctgtctctactaaaaatacaaaaaattagctgggtgtggtggtgggcccctgtagtcccagctactcgggaggctgaggcaggagaatggcgtggacccgggaggcggagcttgcagtgagccaagatcgctccagcctgggcgacagagcgagactccgtctcaaaaaacaaaaaagaaagttaagtcagatcctgtccctcttctgcttgggactttgcaatagcttgacctttcacaatgccatcttggggtgtctgtctgtctggctctgtctctctctccctctccctttctctctctctctctctctctcttttttgttcccccatctctcttctctctcccctccctcccctgcctgccctccttctctctcacttcccccccatacacgctcccacacttgcttgccccagccacacaggccttcttgctgtttctcttatctgccaggtgtcctcttataactgtttctttggccctgagtacaattaattgtaatgtaagtcagaccacgatcatgactcgtatgtcagtatagtctctgacttatgattctttgacttagaattttgtaagtttatgatggtgcaaaaatgatacacagtcaatagaaaccatactttgagtaccatataaccattttgtttttcactttctgtattcaataagttacatgagatattcaaatttattataaaataggctttgtattttttttcttcttctggtggttctagcagaagttatggggagggttctcagtggttcttactgagacatgggtccattcttgaacaagtcatggtggccaggaggatttagtatggtgagcaaccctggatccacccaaactacatgttattaggtccccatatgaagtggtagttccctagagtaaagtcagtaaggagggtgctttgttaaacagacaaaagctatcatcagactatgatttacgttaacatagatacaatctctttgaacagagatataaacagagtactttggcaataccctgaaggcaacaaataattctgattgtgaggatcaaagaaattttcacagaggttacatttaaactgggcctttcaaaagtaagaggaattttatttggttttgttttgagataggctcttgctcagcagcccaggctgcagtgcagtggcaggatcatggctcattgcagcctcaacttcctgggttcaagcaatcctgcttcagcctctcgagtagctgggaccacaggcatgtgctgccatgcttggctaatttttaatttttgtaaagataagatctgcctgtgttgcctaggctggtcttgaattcctgggctcaagcgattctcctaccacagcctcccaaagtgctagtattaccggtgtgagccaccgttcacgaccagtaagaaagatgttttaaaacagaaaagaaagggaatatatgttagggggtggaaaagtatgtatgccaagacatggaggttcaagcctggaagagaaggggctgaggacagaggtccaatccgtatattagagtattaaggagtttagacttcattcagtgaaccgtggaatcctgtagaagttttaagcaggagtataatgtcatcgcacctccttttgcagtttagccaggcgatcatgacagctgaacctaggccaacggtggtctggaatggaatgggacagatggaaaacatttgggagatagaaatgaaattataatagctggacatgccaagtgtcagtagttgagagaaacgtaaccatgtgtattagtctgtctttgcactgctataaagaaatacctgagcctgtttaatttataaagaaaagaggtttaattgactcccaattctatgtagctggagaggcctcaggaaacttacaatcatggcaaaaggcaaagcaggcaccttcacaaggtggcacgagcgagtgaggagcaaaggaggaagagccccttataaatccctcagatctcctgagcactcaccatctctagaacatcatgggggaaactgccctgtgatccaatcacctcctgccaggcctctccctagacacgtggggattatgaggattacaattcaagatgagatttgggtgaggatacagccaaaccaaatcaccatggaagtcactagaatgccctggggtgaagtggtagaggagtggtttatacctgagagtttctattcatggacccacttgactggaggtaggataaactgcatctacagcgccacgtatgtcatgggaaaatcaaattgtcctaatatgtgatttttgttttcttgggtctaggtgattttgaagttttccattttagactatgggcatttgtctccattatcctgtacatactatttattccatcttaatagatttaagaagtctttttgtatggggaacatatattttatttgtctcttaccacaaaatgcagtgtagaactttgtacgttttagcttactgacttctgttaactgattaacacctctatttctgtgttttcttattttatcgctaaagtttgaaggtcatctcttttagaccatattatgagctatttagatcagttctgtctttcctattgttttaatggccaaatggcacactggttggtatactttttctatcaaaattacctgattgagaatgtacccatcagttacattgctgtgtatgttttagatagtaggcgtgtttaagaatgcagctaatacagtgtttgtgaagagttgtattattagagggcatgtatgtggaaaaacaaaggtgaaacggaattctccctgtggttagtgtgaccctcataatgttataagtggtgtggtgtaaatcgttactacccacatatggaacttaagcagtttacattttctacatcagggttttccattgctttagcaggacatagaattccttgctttttgttaaaacgtacgtgagcacccaggggcagccttaatgatttttgggtgtagttggaataacaatttcattttgaaaagtcctttgggctttaagttaaatgaaagggaatcatctcttaaaagtatgtccactcccactttgagagcttttcatttcacagcatcagtattaagattaatttctgggactgtctattttctttcattcaaccactatttattgagcacctactgtgcttcaacacacagttctaagtgctgaggaagcagcagcaggtgaaacaaacccaaatattccttaattcatggagaaaatattctagtgggagaaaacagacagtaatatacaaataagtaaagatttgatggtgaaaagtgctctggagaaaagtcaagcaggcacaggggaaatggcaagctgagatttggctgagggagtaagtggtcatggtgggcctaaagaataactggggaaaggtgacattttagcaaataagtgagggactgagccctgtagaagtaaaggaaagatcagtcttggtagagagaatatccccaaggcccttgttaagtttcattttattgacaagattttcttgatcagactatgcatgtctatactgagacatgttatagaagatgaaatatatatcagttggaataaaaatagtttaaaaatggccaagtgtggctgggtgcggtggttcacgcctgtaatcccagcactttgggaggccgaggattccttggggccaggagtttgggaccagcctggccaacatggtgaaaccccgtctctactaaaaaaaaaaaaaaaaaaaaattagcctgtagtcccagctactcgggaggctgaggtgggaggattgcttgagcctgggaggcagtggtttcagtaagcccaaattctactactgcattccagcctggatgacagagtgagactttgtctcaaaaaaaagaagataggactacaggcacgcgcccctgtacctggctaatttttaaaatttttttgtagagatggggtcttgccttgttgcccaggttggtctcaaactcctggcctcaagcagtcttcccatgttagcctcccaaagtgctgggattataggtgtgagccactgtgcccagctcgaatagactgcatacttattatgtctttttttaaacaagtgtgtaataaactcacacacttttaaattctataatacagttgtccacaatatgtctcgaggattaaacaatgattgagttgctgaaataacgtctgtttgtatcctaagtttttcccccctttagactgtgagaatgatataaataagcaataacaacaaaaaagcttaaatcttcaagattatactttttttttttttttttttgagacaggatctcactctgtcacccaggctggaatgtagtggcatgatcacagctcagtgtagcctcaacctcccaggttcaggtgatcctcccacctcagcctcttgagtagctgggactacagggataccccatcacgcctggctaatttttaaccatcatgcctggctaattttagccttcatgcctggctaatttttgtaagttttgtagagacagggttttgccatgttgcctaggctggtcttgaactcctgggcttgagtgatctgcctgcctcggcctcccaaagcgctgggatcgcaggtgtgagccagcactgctggtggttgtactttgtgtattttagtgctttggcttgtgtgagttctagtcctgaatatatttcccttggccattgagtggatgagattgctactcactattacggatttggctaaatttcctcccagagtgtcagagtaactttatataccgattcagctctacaatctttgctccatatatccctgagcaaattcctggagttagccagagagatattccctttgggagtgtcagagaggacctagtttttatttcatatgggtcagagtgctttagaagactgtttgcattgcataatgactctagaactgtggttgggtaaacaagttactgaaaacaaataggatgtattgattttctaccatagaagcatggtgtgcaatggaatgtcatgttgtaatatttgattttcattattgggtgtaaataaacagaatcctttgatatatacatactacactgggatggcactgttcaccttgaaaactaacagtctttttcctcatctgcatacaatatactgaaatcatataaattcatattgccagctggttgaattagttctttttcttttgaggaatagactttatattttactgtatcttaattgttaggcatgagacaaaggcattgtctccttatccttagagttatatatgtgtaataattttattgcatgtacactgatcaacatatcagatataatctcaaagccaaaattttctccttttaagttgttatttgcttcataaaatgcttccccttatattagtctgttcttgctgctataaagaactgtctaagactgggtaatttataaaggaaataggtttaattgactcacagttccacaatgctggggaggccccaggaaacttacaatcatggtggaaggtgaagggaaagcaaggcatcttcttcacagggtggcaggacagagtgagtgctgagcgaagtggggaagagcttcttataaaaccatcagatcggatcttatgagaactcactgaccatcacgagaacagcatgggagaaaccggctccacgattcagttacctccacctggtctctctcttgacatgtggggattatgaggattatggggtttacaattcaagatgagatttgggtggggacacaatgcctaaccatgtcaccccccttcattcaacatccattaactgagctgatactgagtgtctgctttgttctagacatcttgctaactctttgggattcagtgatgaagaaatttttcttgccttcatagaggtaaaagtatgaatgatgagagttagttaataaggaattatggtcatgtgctgtgtaaagaaattctgggcaatggtggaccacaccaaatatatgacagtggttccatgagattataatggaggcgaaaatttcctgttgcttagttacattgtatgtggtataaggttgtagcccagtatattactcatgtgtgtggtgatgctggtgtaagcagacctaatatgctgccggttatatgaaatatagcacattcaatcgtggacagtacgtaatacttgatagtgattataaatgattgttttactggtttatgtatttactatagtgtactttttatcattattttagagtgtacgtcctctacttacatataaaataattcactgtaaaatagcctccagctattctggaagaggtattccagaagaaggcattgttattgtaggagatgacagctccatgtatgttattgaccctggagaccttccattggtccaacatgtggcggtgcaagagcagcagtgatgatcctcaccctgtgtatgcctaggctaatgtgtgtgtgttagttttcaacaaaaacattaaaaaagttaaaaaatttaaaaatagaataaagcttataaaataagattatacaaataaaatatctttgtagagctgcacaatgtattcgtgttgtgttttaagctgagttgttaagagtcaaaaagttttaaaaatggtttataaagtaaaaaagttacagtaaactaaggctgatttgttattgaagaaaaaataatatttaaaagaggaatttagtgtaacctaagcacacagtgtttataaagttcacagtggtgtatagtaatgtcctaggccttcacatttactcaccactgactcactgactcacccagagcaacttccagtgagctccattcatggggtaagtgccctagacagatgtaccattgtgttacagttgtttacagtattcagtgctgtaacatgctatacagttttgtagtctaggagcagtaggctatagggtatcatctaggcttgtgtaactacactctatcatgttcacacaaggatgaacatatatccattgttaagcaacatgtgattgtacaataatgtgtggtaagtgttcttagtggggaagaagaggattcttttgggtgtacttagcaggggcaagtaacttggagcaagagagttgagagctgaagaatgatgaagaatcagctaaccaaaaagtggatatggcaataggggaaagaaggaaggctgttctgggcagaggaaacccatgtgcagtggcccagaggcaaaacagaataaaaaaagcaagcaagtaaaactggacggggggattaacactattattaacaataatatattatttattatataatataattaattaatatatcagtattattaacttaatcataatggagtgaagtggatggagtgaagtagatggattcaataaatacttagaaggtaggacctgtgggacttgatgactggaggaaaaatcaaggatgcctctaggttttgggcttagacaactgatagatgattgtgtgcttgtgtcagttattgatttattgcttctcacctcgaagtatgtccttcattgcttgctctgtgaaaatgaatctgggccttttgcttttcctccgccagctggcacgatgtttagttttgtcagtagagggtgctggagagacattgaggaggaaagagatttacttgctggttccaagagaggccagtgtggcacatggtgtttcttcagtgctcaggcatttgcagctcttagtgaccagcagctctcctgctgcccaggtagcagagtacgtccactgagacactctcccacaaacaactttccttggcattctagaggactgatttctggcaaatttcacagagtggattgcctgaagttctgtcaggtatgagccccctccagcaaggtctggatctcagccctagagttgggggaactctttcttgggtgctctgtctcagccttaagggtggtggcaattatatgttgtgttacataatattatatttgctactatattttatgtcagctattgctgtgttctttcaaggtcttatttgccaacttctcattaatcttttgttatagttaatgattttttatcttcccttgttcaaattaccatgtagtttctttctcctgattggacttaggctatgactggacatagagtgttctgttagaatcataaagagagagcatatttggggagagagatggacagagtttgggacatgaccaattttaagtgcagaacactcagatatccaagtgcctgtcctatatgggtttggaatgagctccaaagacctggattggagattgcccaggaagagtgtgaggaacaagatgacagtatggtcaggatagagtcctgtaggttacagcctgttcacatgaaaaggaacctcctaaggaggctggggaagactgattggagggatactatagtttattattatattattcatatggtttttgtgaaggtgaaatgagttgatattatataaagcactgagcatagtgtctggcacgtaagtccttagtaaatgggactactgactgtgctgttgtctgctgggcaatgtggtgggtgtcagggatagaggatgaccagggctgcaggctctgccttgaggggtggggaatgggaagaggcttgttaagtgtgttatagtgagtggtaggtgtcagaaaggcgtgaataggctgggtgtggtggctcatgcctgtaatcccagcactttgggaggctgaggcaggaggattgtttgaggtcaggagtttgagaccagcccaggagaatcacttgaaccagggaggcagaggttgcagtgagccaagttcacaccactgcactccagcctgagtgacagagcgagactccatctcaaaaaaataaaaaaaaagaacaacaacaaaagaaaggcacgaataaagctccaaaaacttctgccttggggattctgatcaggggccacagaggaggtaaaggctcagctggatcttggaggagaggtgtaggtttgccccgtgaagagagggcagggaaggtcttctgaacagaggcaacagcgttagcagaggagggagagtgcttgacagcccagtcccacagcggggtcatggtttgcctcttgacttaggggtgggacaaaaattggacacactttctgaatagctgtttattctgcatccttatattccacagtgtgctttgttctcataactagatttataatttatttagtgagttttaaaatttctgcaggacatttgctagttaacaatctaaaatgatttaaaactttgatttatgctaacattttgcttaagctttcattgagtgtgaaattggagtgtgtaggctgaaatctttaagaggggaaagttgaaatgtactgcgtgctgtgccacttcattgagttttactctctggatgaaaacatttttttccagccacgtgtggtggctcacacctgttatcttagcactttgggaggccaaggcaggaggatcacttgagcccaggagttggagaccagcctaggcaacatagggaaatcctgtctctacaaaaagagtttaaaaagttaaaaaaaaaaaaaattctgcttcctgaacattgatagagctcagaacagtttctgggtcatgtgagttctcttcaacttgcaattgtttttcaaaggttcgacaacggaagaaatggaaattcctaaaaattgtatgactcttctctcaataactcacatttttggagatttaggaaacaagtgtgataaacttttgattcttttggagggaaaacgtggcaattaagccttaaagccctctgtgatttattctttgtgactggaatgttattttcctttttctctgtctggcaaactctaagtggatgtatagctgacttattagtttctagtcttttctaaagcttctgaatttggtttaccaaagcactgccctaagataagtctgtggtaatactggcatgctttcattgaagaccttcaaattgtcagaaaaaaaaaggaaacagtccagcaagcattcattagaatgtgttatctttggaccctggtagaggaagtcccttggctgaaatggcacactctaatccagaaattctcctgaaaggtctgcttctgagtcttcagaggaaagaggaatacattttctaaagaaagataatcatttgtttttttcagaaagaagagttaaaccattctttattggctaggactcctgggaattatataagaaggaagctgagaaggaagatgtcaaacaatgactctccaaaggttttagttttttttttttttttttttttttcccccttgcttctcctagaggtaacagacacctataactctttgttcttggtgaagaccaagtgtttgcctaaaagagtgttgagagacccaagaaaataagacacttagggcagttttactttacttgactgtcccttgggtaaaatgatggaagttgaaatgtgactcttctgataattgcctcctctgttcttctatgatataagccaagggtaacaaacattccaagattattatatttttgaaatttggggattgttttgaagttgataaaatatttcatattagcaatttattgagaagttgaaagaaaaacatgatgctcactttaagaacaagtataggccgggcgcggtggctcacacctgtaatccaagcactttgggaggccgaggtgggtggatcacgaggtcaggagattgagaccatcctggttaagacggtgaaaccccgtctctactaaaaaatacaaaaaattagccaggcgtggtggcgggcgcctgtagtcccagctactcaagaggctgaggcaggagaatggcatgaacccaggaggcggaccttgcagtgagccaagattgtgccactgcactccagcctgggcaacagagcaagactctgtctccaaaaaacaaacaaacaaacaaacaaacaaacaaactgatggtttaaatgcagaacaattgcaggaattatgatagtgagagcacccctgcactcaccgtttagattctacagttgcattttactatatttgctatagcgtatacatttaccatatttactgtagaatcatcctctatccatttctttgtgtataaggattttgctttaggattttatattacaacaaaaggctacaaacaatataggagagtggttgaatatggtaaatataatagtctgttcttgcattgctataaatactgaagactgggcaatttataaaggaaagaggtttagttagctcacagtactgcaggctgtacaggaagcaaggctggggaggcctcagggagcttttactcacggtggaaggcagagctggagcaggcatcttcacatggctggagtaggaggaagagaggcggaaggtgctatacaatttaaacgaccagatctcatgggaacttcgcaccgaggggatggtgctaaaccattcatgagaaaccgccccgtgatccaatcacctcccaccgggccccacctccaacactggggattacaatttgacatgagatttgggtggggacacaagtccaaaccatattattatggaatatggtggaattctctgcagcagtgaaaaagaatgaggcactttgtatggactgacacggaacaatctcaaagatacaggaagtaaaaatgggctcagaaggctatatgaagtatactactatttgtgtaacaaagagatgtacatatatgtgtgtgcatgctgtatatgcatgaaatatctccagaaagtataagcaagaagctgatatgactgggggtgtggggtagcccacctacagtaccatgcatatatattataaatttttaaactgtgtgcacttatgctaactgctggaaggtttaattgcttccttgatattttcagcatgtcagaaatctccacctcctagtccttagattttagattgtaacaaattgcagccaaacagctaaggtttgaattcttattctttatttatatatgttatagattttactgtcaataaaactaggataattatgagttattaagaagtttaagttagatagtctaagtaaagtgcttaatataaaacagtggctggcacacagtacttgacacaataagtatcaagtattattatcaagcatacaattttgtgggagaggcaaataataaataatttaaatattctctgtaggtgtgtctatgagggatgcggtaagtaaaagggaaatcagagaaggctatataaggaagttgagaaggataattgagagagaagtgaaggaaggccattccagacagagaaagtcccttttctaaggtgcaaaagcataaaacagtgttggtgagtttgaaaattccagtagttcataatggcttgaaatagtctgggttatgagagatgcaatggcagatgatgatgatagctgacatttattgagcacttaggcaacgtcctcttttaagtgttttttatgttttaatgtattaattccctatagtaactatattggtagtataattaccttcattttactgttgagcagaccgaggcagggagattaagtaacttatccaaggtcttgcaaagtcagcccatgtttgtgtgcaccccttgtgctgcctcatgagcctgcttggtagatgtagtgcagacaatgagcagtgtctggattcacttccataagctttgggaaactataatattaaaggattttaagcaataaagtgaaactctcagatttctactctaggatgaccagcaatggcttagggaagatgatgaaaatctcgtttccacttccttcctttcccttctcctcccaccccaaatcctttatgtcctgaagaaatgatataattcattattaatataatactttgagaaatgtggaggagttctttaaattgatcttcaccttgtaatgaatttggacacattttcaggacttctccagctgtatcaaagtaaaggcaagaagggtcaacaataacagttatattatatgcattttattttattttattttaatttttgagacggagtctcacctttttgcctagactggagtgcagtggcacgatttcggctgactgcaacctccacctctgggttcaagcaattctcctgcatcagcctcccgagtagagtagctgggattacaggcacccaccaccatgcatggctaatttttgtgtcttttagtagagatggggtttcaccctgttggccaggctggtttggaactcctgacctcaggtgatccagcctgcctcagtgctgggattataggcgtgagccaccgtgcccagccacatacatattttagattaagctcctatatgatatatgtaacaaaatacctccaaactgctgcttaaaacaacattcagcatttgttatcccacacaccttttgtgggtcaggaatttaggagtggcttgaggtcccttctcaggttgcagtcaactgaaggcttgatagggcctggaggatccaattgcaacatagtgcattcacaaggttggcagagttcttgctggctgttggcagaagcttcagttccttgcacatggaacctcttcatagggctgcctgagtttcttcatgatactgcacctggctttccagaagaaaggattcatataagagcaaggtgaaagctgcaatgtcttttatgacgtagccttggaagacattattgtcaagagtttgaataccaggaggcagagctcactgggggccattttgtgggctggttaccacagttctcatgaaaatgttagtgaatagaataataaaatttagaactaaaaggagccgtagcccagtggtttcaagatgtggctcttgaaccagcagcagcacttgtgaatttggttaaaatgtaaattattgggcctgtcccaagacttactgaattaggatcgaggagtgactcccaacactcactctctctctctctctttttttttaaataaactttatactttagaacacttttagatttatagaaaaatcgggctgggcgtggtggctcacgcctgtaatcccagcactttgggaggcagaggtgggcggatcacgaggtcaggagattgagaccatcctggctaacacggtgaaaccccgtctctactaaaaatacaaaaaattagccgggcgtagtggcgggcgccggtagtcccagctactcgggaggctgaggcaggagaatggcgtgaacccgggaggcggagcttgcagtgagctgagatagcgccactgcactccagcctgggtgacagagcaagactccatctaaaccaaaaaaaaaaaaaaaaaaaaaaaaagaaaaattgaaaattgggcagatagtataagtagttcccacacacacacatatacagacacacacacagagttccccctattattaacatcttgcatgagtgtggcttatctgttacaactgatgaagcagtattaatatattattaactgaagtctacagtttaagattcactctttgtgttgtacattctgtggggtttgacagaaacgtaaatgtcatgtgcttatccacagttacagtatcctgcagaatagtttcaccaccattaaaacttctgtgctccatgtaatcatctctcccttctttgcccagcccctggcaaccactggtccttttactatctctatagttttgtcttttaaagaaagttgaagttccttttaaagaaagttctatggttggaatcatatagtgtgtatactttcagattggcttctttcacttaacaatatgtgtttaatgttcctctttcttgttctttagagctcatttctttttattgctcagtgaacaccacagttcgcatatctattcatgaagtacggttgaaggacaccttggttgccttctgtctctgattatgaataaaactactctaaaatttgtgcagatttttgtatggacataagtttttaagtcagttggacaaatgcttaggggcacgattgtgggattgtatggtaagattatgtttagctttttcaggctgggcgtggtggctcatgcctataatcccagcactttgggaggctgaggtgggcagatcacgaggtcaggagatcgagaccatcctggctaacacagtgaaaccccgtctctactaaaaatacaaaaaaattagccgggcgtggcagtgtgtgcctgtagtcccagctgctggggaggctgaggcaggagaatggcatgaaaccaggaggcagagcttgcagtgagtcgagatcgtgccattgcactccagcctgggtgacagcgcaagactcttctcaaaaaaacaaaacaaaacaaacaaacaaacaaacaaaaaaaacattatgtttagctttttcagaaaatgccatactgtgcttcatgtttgctgtgggttagatgcttccgtttcctgtagttttcttgtttttttccacccctggtttctttgggtttccctaagaactccttcttaaatagagtctgtcttgaagctctgtcagttgtaatgcatttttttttttatactggagctctgttgatgtggtggaaaggtgttggggaaggagtgcattctgtaatctaatattaaatctcagttttttagtgggcgtaagtctttaggctgtgatcttccgaagagtttattagctttcctcccctcaccccttctgtgagaaggcaagagggagttgagtaattgtcctttccccaggtctacaaagctcctgcgaagtagtttttcttagcaggtgggcctttgttatggagaatgctctgagcaattgcaaaatggttactttcccctctccctgcctaaaatacgaggggatttttttctttgatgttcttgtaagaacctgttcaggctcctggaggtaaaagctatataggtccctcttaagtctggacctccagaagttttaactctcaagctagtccacactcagtcttctgcagttcgtcaaaattaccgttcaggtattgattactgtattgcttactggttcatgtagcttttgcttctggtaatctgatcttttctgtgattctctgtattttcttgtgatttttttccttcaaattttgtggtagctgtttgctctgtgaccccagttctctaatggatctaagaaaggccattgatttcagtttgtttagctgttttcttgctgtgaggatgggaatgatgacttctgaactgaaaatgaagcctggcacccaacaccccttgctttaacaaatccctccaggtgattctgaggcatgtgaatggttgagaaccactcatgcagcgttagtccttcagttcacagataaagtacaaaggggaaactggctggtcactgtggctcacacctgtaatcttagccctttgggagcctgggaggtagatggtgcagtgagctgtgattgcaccactgtacaccagcctgggtgacagaacaagactctgtctcaaaaaacaaaaccagactgggcgtagtggctcatgcctgtaatcccaacactttgggaggctgaggcaggtggatcacctgaggtcaggagttcaagaccagcctgaccaacatggtgaaaccctgtctctactaaaaatacaaaaattagctgggtgtggggacgcatgcctgtaatcccagctacttgggaggctgaggtaggagaatggggtgaacccgggaggcggagctcgcggtgagccgagatcgcgccactgcactccagcctgggcaacagagcgagactctgtctcaaaaacaaaaacaaaaacaaaaaaaaccccaaaaacaaatgggggaaattacttttctaagttacagggagagtcaaaacccggactagaacctgggtctcttgactagatcatcttcaagctgtatttttgtatctacatatagtgaccttcaaagggattcattatatttcatcttgtgtattgtatgtttgacaagtatatttgttttgatggttcactgatttcagtccttggtatttacctcaagttcattctgggatctggttctattcatacacattatcatagctatttggaagcttacttgaaatcttctctttgaaagaaatatcagcctatctcaggtgtgagcttcagtgtaacattgatgtgagtgaaatagtatgttatatagaaaattttattttcccctgccatcccttacataagattttttaaatacctgaaagaaaaccttagagctcttcattcagtctttggaaaagcctgatgtgaaccatcatatgggaggaatcagctgcatctgtcattctttcttcccatgagttcccataatttcattttcttaatatgtagtatagggtggatagcagtcataatccccttttccatctcaagccagcccacactccttagcctcatgcacatgacattcctcttaagttgtgatctggagaaggctggagatgtttgctgttggcagtctttttctgtaaagggccagatatagtaaatatttagtcttttcaggttgtatggtctctgtttcaagtatggaactctgccattgtagtgggaagacaaacaaccatagaaaatacacataaaaaaataaggccaggtgcagtggctcatgcctgtaaccccagcactttgggaggccgaggcgggtggatcacaaggtcaagagttcgaaaccagcctggccaacgtggtgaaacccccgtctctactaaaaatacaaaaattagccaggcatggtggcacgtgcctgtagtcccagctacttgggaggctgaggcaggagaatcacttgaaaccagggaggcagaggttgtggtgagctgagattgtgccactgcactccagcctgggcaacagagcgagactccatctcaataaaaaaaaaaaaaaaaaaaaatcggtgtagctgacttctaataaaacttgattgattgattgattgattgagatggagtctcactcttgttgcccaggctggagtgcaatggtgtggcacgatctcagctcaccgcagcttccacctcccgggttcaaacgattctctgcctcagcctcctgagtagctaggattacaggcttgcgccaccatgcccagctaattttgtatttttagtagagacagggtttctccatgttggtcaggctggtcttgaactcccgacctcggatgatcacctgcctcggcctcccaaagtgctgggattacaggcatgagccactgcgcctggctataaaagtttattttcaaaaacaggtgcagtctcttggccctagttgctagctgctgtttcagagcctgtggaaatcttaccttcactttatgccccaaaggatgccatcgtttttatctactggatgggatccccaagattacttagattgttttcagaagtaataacagatatctgggtatggagcatagcatcttagttttagtttcttttttgagggatgctttttggtgttatggtataccacaggtgcctagagaaaattccgttttaggtgctgtcctttgaggaaatactgctgatctcaaataactgtgggtaattgaaatatcataccttttaatggtgactactaatcccctaaaaagaatatagactttttcgctctaaacatggtttcaatagggtttttttttttttgatggtctcttatgactctagattgaaacaaacaagaaaataaccctacttctatagttactataacagctgaggcaagctatactaccagtggtgcatggtaaagcctgccttttaataagttcttaaatataaagaatgatagaaagtttcaagttatggtgtgttataggtgcctatggagttattaggttagaggaatgattttaatttacttggattccttagcacattgcttattgcatgcgtgctcagtaaaagtggatactggtgtttgtgctttgcagctaccgcaggtcttggttgtcatggcttctcattagtgcattaagatccctttagagctctggttgcctggcaagagaaaaggcaggaactgccaggagctgaaaggacagatgcttagctgcagaagtagcctctggggagcgttggctgcgttggctgaggttcgtgtgcatgtggtcaaatgtgtgaacttgggttttgctagacaaaactctgggctacatggattaattaatatatgctacaagtggtctttgttttagaagtctttgcagtttgagctatttaaaactttttttaaataagcaaattagaagattctgtttggggtgcattcctgtcctttggggaagtactgctgacctttaagaatagtgggtaattggccgggctcagtggctcacacctgtaatcccagcactttgagaggccgaggctggcggatcacgaggttaagagatcaagaccatcctggccaacatggtgaaacaccgtctctaccaaaaatacaaaaatcagctggacgtggtggcgcgtgcctgtagtcccagttacttgggaggcggaggcaggagaatcgcttgaacccgggaggcagaggttgcagtaagctgagattgtgccactgcacaacagcctggcgacagagcgagacgctgtccaaaacaaacaaacaacaaaaaaataaaaaacagtgggtaattgaaatattgtatgttttaataatgactactagccagatgcggtggctcacatctgtaatcccagccctttaagaggctgaggcgggcggatcacctgaggtcggcagttcaagaccagcctgaccaacatggagaaattctgtctctatgaaaaatacaaaattagctgcgcatggtggcgcatgcctgtaatcccagctactcacgaggctgaggcaggagaatcgcttgaaccctggaggcggaggttgtagtgagccgagatcgcgccactgcactccagcctgggctacagagcgagactcctttccccccaccccgcgccctccaaaaaaaagactactaatccactgaaaaaaggtcagttggctgggcccagtggctcatgctgtaatcccagcactttgggagccaaaggcgggtggatcacctgaggtcaggagtttgagaccagcctggccaacatggtgaaaacccgtctctactaagagtacaaaaatgagctgggtgtggtggtgcatggctgtgatcccagctactctggaggctgaggtaggggaattgcttgaactcaggaggtggaggttgcagtgagctgaggtcgtgccactgcactccagcctaggcaatagagggagacttcttctcaataaataaataaataaacgtcagtttacaatattagaatactgaaagcttgagtaattagaagagtcttatgattagaattaattatttcaggctaaaaaatattagaaggagactctagagggcagtataagtcaacatgttcatgcttctcctggcaatggaaagttaaattttgctttggaaaaatataccaggtgttctgaactctttccccaccacacggtgtcccggtttggtagaaatgtgagttttggaaagaagtgctctgatttggcttacaaagattagctaatgtatcagaattatatggccctagggaatatctctgcttggtttacaatactgtcttagaaaaactggaattgcctggccgggcgcgttggctcacgcctgtaaccccagcactttgggaggccgaggcgggtggatcacgaggtcaggagttcgagaccagcctgaccaacatggtgatgaaaccccatctctactaaaaatataaaaattaaccgagcgtggtggcgtgtgcttgtaatcccagctactcaggaggctgaggcagaactgcttgaactcgggaggtggagcttgcagtgagccgaaattacgctgctgcactccagcctgggcgatagagcaagactccgtctcaaaaaaaaaaaaaaaaaaaaaaaagaaaagaaaaaaggaaaactggaattcccttattgactcaactaaattgagttgagtttgcttttcagacatttgtggagcattaagtgaaaggaatatatctttatagctaatatgtcttttgttttcaaatcttgttgggtaggaagtaaatgtaccctctattcaaacaaatgggaagagtttgacttattttgactttttttttaaacaactttttaaaacaaagttaaaattagatgcctcatttgtgaatgtctgtgttaatgttgaacctttcagaacgtttgcattaagcaaaacccagagcctattatgcctatcactttttcttctaatttttaaccttctatgcattttcagggaaatctaatccttatgttattgactcatcttacatataattcatcaaatatggtttggaaagaactgttttgaagcctaagaagctctagtttgtagagcttcttagggtcttaggctttacaaggcagaaagtggggattaccaagggcaaactaatgaatctcctataaatttagatttaatattttaaactattaattgcaatttttgttttttgagacaaaatttcactctgttgctcaggctggagtgcagtggcacgatgtcggcttactgcaacctctgcctcccgggttcaagcaattctcctgcctcagcctcctgagtagctgggactacaggcgcccaccaccatgcccggataatttttgtattttaagtagaaacggggctttaccatgttggtcaggttggtctcaaactcctgacctcaagagatccgcccaccttggcctcccaaagtgctgggattacaggcgtgagccaccgcatccggccaaaatagttattttgacgtagttacaactatttttcctttggaaataaatcaggagttttagaaaatactgagtttcccacatctttcagtaatgttaaaactaatgtgcactagtgagacaggaacgagtatcatgtattgcctttgattattgttattgagtattaggtttacttctgtcaccacttgtgcatctatgtttttttcattctaatcacagagtaatgtaaaataagcattcgtgttttcaaaatatacactactcattagaactttcacctgaaattgtgtgtttttaatttatacagaattggtgtgtaaactaaaggagttttcttaacgaaaaaagtagaaagttaattagaaagtttctaggaaagaaggttgagttgtttttttttttttttacaaagtatctagaaataaaaggtaaattttttttttcttttgttttgagatggagtctagctctgtcgcccaggctggagtgcagtggtgcaatctcagctcactgcagtgtccacctcccgggttcaagggattctcctgcctcagcctcctgagtagctgggattacaggtgctcgccaccacacccagctaatttttgtatttttagtagcgacggggtcgctggtcttgaactcctgagctcgtgatctgcccacctcagcctcccgaagtgctgggattacaagcgtgagccaccgcgcccggccagaaggtaaaattttaaagcagctgtgtaatatgtagagaaagtaactaaatctttgagtttacaaaggatttgggatatttgcttaattctcagacttgaaattaactaacttactaaatgttttctttattctggcaagtgacagaacattgatatagacagtattactcacgttttgttttatttgaatgtaaatcggcagagtctctctgtatcttgaaatatacaggagaaattttccttaacctaagattgaaatattatttaaatgtataacccatttttgccaacccctgagccagaaacccaaagaaggatacatatagaagtggtttcttattgacagctttaatttatgcaaatatccagggttgttttgttactaccaaaaataaaataaatgtatttcttaatatgttacatgatataaatgacatcattttaaatagtgactttctagggatagaatatctttggtaaagataaaagctggtttttgtcagatgttaaatgtagaaaattgagaagggctatggaacaaaatctttgatttacaagttgacaaaatgctggaacacacagagactatatagattcatttgatataagagcttcatttaagggaaggaattcaaggctctttcagcttgtgatttctattttggtgtattctgtccccacctaatgatttatacaatgtgatgatggtaattcagagctagaaagtaggttgtttctggtttcagtccttctttttatctgaaatactgaaagagccgaactgtattctgtacaggtagtggttacttttcttctgcttagacttaaaaacacagcctgtttgttagcttttgttggcaccaaatagtacttggacagtatatatttcacagcgacatattttttctacctaacattaagcacttgcttaatttgaagaactgttctgttgagcctgcctaagacaaaatttcagtgtacatagcacagtctgaattaatagaactcaaacttactaggccatgaaaatggcttaatcaacagtgaaccctttaaagaccttgtcaggtagtgttctaatagtgattttagaaaaaaaaacaatgattagtgtttaaagatactctttgttttagagtttgttttcttttttaaagccctcttgagtaacttctggggttgtgcctatgttctgtttagagggaaaaaaattgcatttctatactttatattgaaccacagccattcagtctaattactaatctcttcttggtagaagtcctttcagactgaattgtttattcttccttatctctaacctgagggtatattgttgctgagttgttagattttattcttctttgttgtcattctgcagtttcgattcctacctccccctcccattttggtgatggatggctgatctgatgtttgtgaggcattcaggatttgatagctgtgttaagagagactcagcattcctttctggacaccttctcttttctctgttgaaagttctgaatcgtttgtgctgtcagtagtttttgataggtagagggtcaaagacaactctgttgattaattgaatttccatgtcaaatagctttttattttgaggtatagagcctgagtttaaatgcaggttctgaaactaactacatagtcctctctcagtattcgtgggggattggttccaggaccatcggtgggtaccaaaatccacacacattcaagttctttaaataacatggtgtcgtatttgcatgtaacctatgcacatcctccaacatactttagaccatatcctcccttatactttacatcgtctccagattacttatagtattcagtgcaatgtaaaggccatgtaaatagttattatactgtattgtttatggaataaagacttaaaaaattctatacatgtttagtacagaagcaaccatcctttttttgttcctccaaatattttcagtccgtggttggttgaaaccacagatgtggaacccagggatatgaaggccaagtctgtggctttattgaacagatgttacttaacacctttgtctcttggtttgctcacttataaaagaggaggtaataatagtgcctatcctgtaggaatattgtcatatatgtataatacttacagcagtacctggtgtacagttagcactcaataaatattagtatcgctgtcattatagtttggatgaaaaagctaatgggagttttaagtagaaaagggatgttaccagaattgagtttcagaaacattggtttgatagccaaggggaaggtagatgggtgctaggttagcaaaggttgaggcaggaagacctgtgcgtggattgagttgtgtttctgtcagaagacacaattacaacaaatatcgtttaaagatttcagttggctttatttgtggttctagaattgggcaataccttatgaagtagaataaatgtaagcattccaatgagtgcagtagaggaggttggcttcatagacagaaaaagggctgaagaaagcagaaacaaagaacaaaaagcaccagtagacttccctgatgtagggttgccaaagccttcagtttgctaggtgagaaaaagtagtatctgcaaagcgcagcaaagcaaatgcaatgaaatgagatatgctggtagctgactgttcagctccgtgttactgctgtcaagacagagataagggtttatgttattaagatgatttagttttgagttttgaggttagctagcactgagggacccatcttacatatttaagcagtcagaaaggagaacatatttttgccagatagtaattaaaatttctaatagaggccagcaacccttccaacagagagaaagcaggtgtgagaccaagtcaccaaatcccattggtcctggtcaggtgcctcacttctcaccagaagaggttttaagaatctcttgccaggcacggtggctcacatctgtaatcccggcattttgggaggctgaggcaggcagatcccctgaggtcaggagtttgagaatggcctggccaacatggtgaaaccctctctctattaaaaatagaaaaaaattagctgggtgtggtagtgggcaccttcagtctcagctactcgggaggctgaggcaggagaactgcttgaacctaggagacggaggttacagtgagccgaggttgggccactgcactccagcctgggcaacagagcgagactccttctaaaaaaataataataaaaaagtcttgagtggaaaaatacaaaaactctttcggttcaactcttccatttcctgagatcttgtgttcaggcctgcagggaagtcccaggctgtcgttcaggggcttggggaagcagacctctgcagtgctcccagttgtctgaggaatgcagtgttaactgtccaagttttaccagcctagggcagtgtcttcaaggtgggctccttctaagatgacctatcgggtacctgagaaatactaaaacaacttttttttttgagatagagtctcgctctgtcacccaggctggtgtgtggtggtgatctcggctcactgcaacctccgcctcctgggttcaagcagttctcttgcctcagcctcctgagtaactgggattgcaggtgtgcatcaccatgtctggctaatttttgtaattttagtagagacggggttgcaccgtgttggtcaggctggtctcaaactcctgacctcaagtaatccgccctcttcagcctcccaaagtgttgggattacaggcgtgagccactgtgcccggctagatttttaattttaatggagcctggatgtttcatgtacaagtaacgtattttgggatgtgtgcttcttgtctactcttggggttatacaattataagaactcccctacagtggcctatgaggcctaccctgaccttggactcgactcgtccgttgccggcaccctccaccctcagttgtgttctagtcctgccggctcgcttgctctctcttgctcgttcttgttctctctctctctcttgctctctctctgactctgtctgtctgtctctcttctctctccagctggtacctaccctctgcatatgtttaatccttcttgctctacttttttttcttagcacttactgcctttgaatattgtgtgaaatttatagaatacaaaaaaatctgttggttattgtttgtttctccctgcagaatgtaaaccccttgaggtcaggagtgtctttctactttgttcatagatgtattctaagtgcttgtgctgttttttttttttttgagatggagtcttgctgccgccaggctggagtgctgtggcgcgatctcggctcattgcaacctctgcctcctgggttcaagcgattctcctgcctcagcctcctgagtagctggcactacaggcgtgcaccaccatgcccagctaaatttttttttttttgtatttttagtagaggcagggtttcaccatgttggccaggatggtctcgatctcttgaaatcatgatttgcccgcctcagccgccccaaagcatctggcacatattagggcttgtaagttccattaatgagtgagtaaattattcaggaagatttgggaatacaaaaatgaatcaaacgtgctccatgccctgagttgcttcatatagcagcaaagaccaatttatatgaaaataattttaagtctgtgagaaacgcagcagtagaattatatggagggtagagaggtgacagtaataaggaggtgattaattctctgggggtggtggtagacacataagcatttaaataatgtaaatgttttgaaaatgtgacagtttttaacccattaactgttgtggtaggcttactttcgcttgtccagagaaaatggaaatgaagattatttgaatacagtgtgcttgtgactctgtagaaacttgtctttgatagacatctatgtaagctgaattaagcagagggcaaatctctgtcatttgttcctctatgtttatgttgtataatttggtgtcatttcaatcatttcatgattcctgttttagtaaatttatagtagggtgcctgttggtagtatatcaatgttcctcaccccctcctttgtttctaatacaccctggatccttttggatatttaataattaccttaaggatgctaatttgggacaaaatgagtcatttaggggtggattactttatttcatcaaaatcattgaacagagtgcttggacaataatgttttgacattgcccagctgctgtgtggctccactgtgctctccctagtggtgactgatgaaggggagagaggaggcaggaaaggggcttgctcctgagacaggcactaccttttgtgatggatgctctgcttgcagaacccagctgagcatctgtccggacacactccttcccagttcacataaataatgtagcagtgatagtaacaaggatgaaaagcaaaatgctgattttgctgccccctgcctgtttcttttttttagtggggtgatgtacttcacagacaaataatgaattaccaccctcactgttggggtgatttaggccctcctttaattgttttaatcaggtttttacaataagtcgatgacagagtccaagatgacacggttaatggtgtctggcattcactgagcatttcctgtgtgctgtgcactccatccaaggccttgcttgaattatttcatttcatctccatgataaccttgtgcagtgggtactgttattaaccacattgtatagatgggcatatggagactttcccaaggttatgcagttagaaaatcttagattaggagaaccctggccatctgactccagagctagagacctttaccactaggctaaatttgctgaagactgggaagctcagtcagaactaaggatgaaatgttgctgcctgctcttagagtaccagatgaagagagtcacctaccatttaaaatcacccagcaaaataggtaggactaaacttcactattgatgaaattaaaccacagctttattctcagaactaaacaaaaaaattcagctgttcagtgcattgaggttggtgatccattggcttgcaccatttctcttttctcatgaaatagaaggcatttctgcctttgctgtgtaatttgcttgattttcttcattttgccgctctttggtgtagaaacgggcaccctgcttcagctggtggggactaaaaactaataggaggaaaggcaaaattcttatctgaccctgttttttaaagaaatcttgtcaagttctagaaatctaacggctttagaatttatgattttaggaacttatatgaaagtcctaatgttttctaaggtaaattgactgcttactttctttcatacattgtgcttgctcttgttcttactctcacattctgctttagtaaagaaatggaggacataacagggatactattggtaaaacagatgtttctgacttgaaattgcatgcacttatggtcttgtgtgttaaccactcttaacaactgtgtttactattgaaactggaaatacagactttgattatagtttttccagcttgcctggtactattctcctgtaactggattatttttagttgaaatttttgctccaagccctttccccctacttagttgactcttcaatcaccacttggagtgcacatgtcagcattcccatggacattaaatacacacagtatagacagcacaatggcatcttctatgtgaattattggactcttttgatcacttttaatgctgaaaatgggatctatcctggttaccttccagtcctctgatgaaatttagggaatgtatgtctatctcctttcgaagtttatcctgatagctattggtggtcattgtaaaattatctgtctgaaacttaacagattgcaaatgaaataggaatcttagtatttattttgctactgcctaatgatgcctctgtttgagtcattgaatactttcaaagcataacctttaaggtatgtttctacatcttaatttgccacttggtgcatttagttctaacaaaccagaactaaagcaaattttgtttcatgagaaactgcttgccaagctttaatttaggtcttcttagaggattattaatgaactcgtgaagtgtacataagcactttttattgacaaaacaatggcattaaaattcagtattctcaatcgatgacaaggcgttattgtgtttgagaaatactgaaaactaccactgttgacctaatgattaacttgcaatttagaacatgcttgattttcctttcccttatccatcttattcttactctctttttcaaaaaccattagctgactatggaacataattgtgaataaacaaatgggtaaaatgctaaaaatgattttaaaaattcattaagttttttgaagctggatgatctatttgtactttcacctactgcttcttttaaaagctgttactttagttagtgatgtatttctcatttatacatactaaaattatagtgattgagttgttatatcatttattttttaaaattgtgattgtgtctttttcctttctttttggtataagattattattatcgaggggccaaatttcaggagtcttactagcaggttgcaaaatgtagtacagcctgccctctgaagaaaaataaatttcagtccgatgcctacgtcttaaaaagattgattgcttctttggctaggtttttttttattccttttctttttttccattctgaaattttattactttcttcaccaggtgatcaaagcacatgggttagtgaattttttttaaaaaaaggtagcaaagatcttctgggaacatttgtgttaatttttaatttcatatgatttttttttctaggtaatatatgtgcacgtacttaatcaagtggtggtgtactgtttatttttttttgtttgtttattttagtagttcctcccatccttgagtttcacttctcagaggcaaactgtttgaacttttaaaaccatttattttgtcacttatctcaatattgctaaaggacatgcttatgttttatgttttatttttattttttgagacagagtcttgctctgttgcccaggctggagtgcagtggtgcagtcttgggtcactgcagccttgacctcccaggctcaagtgatccttcaggctctcaaatagctgggaccacaggtgtgtgccctaacacttggctaattttttaattttttttttttttttttgtagagatgagatcttgcagtgttgcctaggccggacttgaactcctgagctcaagtgatcctgccaccttggcctctcaaagtgttagaattataggcatgagccaccatgcctggcttctttatcttttctttttgtcttttttttttccctcgagatggggccttactttgttgcccaggaaggagtgcagtggcttgatcactgttcactgcagcttcgccctccatggctgaagggatcctcccgcctcagtctcccaagtagctgagaccacaggtgtgagccactgtgcctgacctgtttttattttctattttagacatcacttgctgagtttacccaatgagtaatttaaatttagccatttaaatctcttccccgcccgtcccgccccagacagggtcttgctctgtcatccaggctggaatccagtggcatgatcatggctcactgcaacttctactttctgggctcaacaatcctcctgccttagtctcctgagtagctgggattataggcacgcaccactacacctggctaatttttgtattttttgtagagacaaggttttgtcatgttttccagactggtcctgaactcttgagctcaagcaatctgcctgctgtggcctcccaaagtgctaggattacagatgtgagcctccttgccagcccgtcaccttttatatatcttctactttctcctcttcctcttccttctcattgtggtaatatcaccatttgtggttaaatcagtattgaatgtttatattattattattattaagacggagtttcgctcttgttgcccaggctggaatgcaatggtgcaatctcggcttaccaaaacctccgcctcctgggttcaagcgattctcctgcctcagcctccccagtagcacggattacaggcgcctgccaccacgcctggctaattttgtgtttttagtagagacggggtttcaccatgttggtcaggctggtctcgaactcctgacctcaggtgatctgcccgcctcggcctcccaaagtgctgggattacaggtgtgagccaccgcacccagccgaatgtttatattattataggcatgtatatattgttatagcttaaacaaatattgtgggctgggcgtggtggctcacgactgtaatcccggcactttgggaggccaggacgggcagatcataaggtcaagagattgagagcatcctggcgaacatggtgaaaccccatccctactaaaaatacaaaaattagccaggcgtggtagcgcacgcctgtagtcccagctattcgggaggctgaggcaggagaatcacttgaacccaggaggcggaggttgcagtgagccaggatcgctccactgcattccggcttggcgacagagtgagactccgtcttaaaaaaaaaaattgtggtatgattgaattacatttcttgtacaacttctttcctggaattaataattgtctctcttttgattctttgttttgttttgtatgccccgtctctaaatcacccttaaattttccaacagaactattggaaaatcagtgtaatggaaaatattaatctatagatcagccttggtgctatcctcctggaacccattgcctcattttggtgtctagatctgccactgagttgttggaagaagacttccctttcatatgactctcagatcatttttcatggcttcttggttggggttccctctgttgtttgtgaagtattttcctgagaagggtacatgggaagtaaatgttttgaggctgtgtgtgtctgaaaatgtctttattttatgctcatccttgattatctcacagtttggccgggtatagaactgtaggttggagactattttcctcaaaaatttgaaggcgttactctattgtcttccaattttcaggaaagacgccagagcataatacagaatacactcaactgaaagccagtatgggccttttaggatgagttgttacttgaatgatgccccttggaaagataaagttattagagtgatgtcttctgaaccataagggaaaagataaagttgagagaatttcattttactcccatctgttaaatggcagtagttcaatcctctctagagatattgtagaaataaatatttaaaaatttaaagatagctataactatcaaatagaaaattacttcttggggtgaatggcaaactttgtggtattagccatttatgtttgtattttaaagcactttatcatgataggatttttccaatcactaccctttaaaagccaaatgaattttaaattcatgtgctatgtgtattttaatattaatatttggatatttttggcttaaagttttcataatataacgtttaattccatttaaaatggagtccaccatgaaaaagcctcattttgattgcctgtgtaagctaagtataaagaatggaatcagaaaattgtaatttttgaaataaaatacctttaatgttaggtatgttaagactgtttagcactgtagttgaagtttgcaattactattattattattatcatcatcattatttttgagatggagttttgctcttgttgcccaggctggagtgcagtggtacaatctcggctccctacaggctctgcctcccgggttcaagtggttcttctgcctcagcctcccaagtagctgggactacaggtgcctgccatcacgcccagctaatttttgtatttttagtagagatggggtttcaccgtgttggcgaggctggtcttgaactcctgacctcaggtgatccgcccacctcagcctcccaaagtgctaggattatagatgtgagccactgtgcccggccaaagtttttaattaaaaaaaatttttttcttaaaagcagagaccaaccattttgttagggataaaacatttttaaagttaatctgccttttttgcaagaatttgcattcaagcaagagtgtcatttttacatttgattttaataattaatattagtataatgattaaaatagaggtaatcaatagaaaacttgtatcaaatggcaagcaccaattcttaacccactgctaattgtttctaggaggttgtcttagcattggttactatggtttttccttagcctttataaattaccacaaaagacaaactgttcctcctccagttactaaattagttcctatttaatgttgaaaggtatcttgtaagatttatgattcagattttataacaagtcttattttaggataatgtgcttttctagttatatgagtacctttttggccttttccctagggacattaatccttggctgggaagaataaactatagtcctccatagcagctgactgcaaactgcaaccatgacgccttaggctgttaaaacaaacatttctcaaccttatagcacagacttcctgtttttaaagcttttctgaccttcctgagaaaaagaccaatatagctgtggttacatcctgtgttttttttttattttgtttttcattaaaaaaaaaaatccattgaatttttctaaagcccttgagtataaaagtgattaatgcaccaaaaaatgtaaatagcacagggctcatgtctgatctttgctaggccttcaataaaagataatagaaccaggtcggcttttaatgcgtctctgtttgttcaatgtctgctacaattggaatgtcaggaaaatctcacattaaaggacctgccctattctggagagattgtgaaggaagcatttggcagtcatttcctttcacttaagagaatgaacatgctttacattataatcgtttaaacataccagagtcagctgatagggctctcgtattcttcactgtagagtcagcttgctctgaagattggaggggatgatcagtgtttagattttattgttggaattaatcagatgatgtaaacgttagaagttagcccatgccttcctttgtactcactcagttgttgtttcctgcagcccaagtatttgctcttttagttaaaattaaactccagaatgtatgttcagcatttgtctttatgacagtctcactcacttctaatcccttcagaagaaaacacaagaaaccaccctgtgttgtgcagatcaaacattctcgaatctgtggcttttgatttttgttttagccaatgtattatataatgtttgagtgtatatttttaactggagtcttctggcattttctagagagcagttattggcttttaggcaggcagttcctggatctgtaatgctacctctgatgctgagactggcaaatggtactcatttaattttttgaaacatttaaatgtatgtatttttttctgaaatacacgtgtgtaattttattttaaagtattttcatttattggcggcataatactagagaaaacatgtcctaataataataaagggcaaaattatattttgaatttgtgtacattattttaataagtcatacaattatctgtctggttaatattttgaattcttaggatattgatttcagttgtggttttgagttatccttaagattacttccagtacatttggctggatctccacactgattttatcatatatcatcagttcaaaatacacgaggggcctcattttaaacatcccattgaggccctgcatccctgagctctttcttccacaaaactgtttgtttttaaatctgtaaaacccttttccaaacgagaaatttctcttcttaaccctgctttggcttttcaacgtatcgctctattggaatttaataatttgatctgcacagtctgagatctctagtgagttttgaaataaaaatgaaaatgtccttaaacatatttaaagcatgtgctatctaagaggtcttgctctctgtctgaagttggtttagggctacatccatgagacggctgcacacttccaaaaactaaaacctccaggcctgaccttcgattgatgactaatgtcataacagtttgctgtgatgcccccgggagcctagtggaaagttgtattttttgttttctggagtatatttttataatgctgataatgtatttcatgatataatactttaaatacttattagcagtttatcactcccttttttttttttttttttttttttttttttggagacagagtcacactctgtcacccaggctggagtgcagtggctcgatctgggctcacagcagcctccgcctcccaggttcaagtgattctcctgcctcagcctcccgagtagctgggattataggcatgcgccaccatgcccagctaatttttgtaattttaatggagatggggtgttgccatgttggtcaggctggttttgaactcctggccttaagtgatccacccgccttggcctcccaaagtgctgggattacagcactttgctactgtaatcccagtagtttacaggtgtaagctactccgcctggcctatcactcttaaatatgtttgggactatggccaggcacggtggctcacgcctgtaatcccagcactttgggaggctgaggcaggcggatcaagaggtcaggagattgagaccgtcctggctaacacggtgaaaccccgtctctactaaaaatacaaaaaattagccgggcgtggtgggcacctgtagtcccagctactagggaggctgaggcaggagaatggcatcaacctgggaggcggagcttgcaatgagccgagatcatgctactgcacatcagcctgggtgacacagcgagactccgtctcaaaaaacaaacaaacaaacaaatatctatgtttgggactatgttggaaagtaaaacatgaaggaaggttgtaactaatgcccaaccttaatgttgtacctatgttatttcactttaaagtgtgctattcagagttttactaaaggccagtctgtcttgggctttttgttttctttttataatctgatgttatttctagttatttttcaagagtatattacgtagactgcaacagtatattcaagagtatattacgtagattgcaacagtccccccaggacttagggggaagaacattttgatttggtttgggattgagagtgtctgtggaatgccattatggtggaacccatagggcatttgcatatgtgggcctcttgctaagaagcaagctcagctggaaaaatcaaattttggaatcacaaacacagaaacagcttgagagtggatcttttcactgatgtgagatggccgaatgtgataaaaggaggcttgacagggactacttgtatttaggaggagtcatggaaagaaagagagaatcgccagaaaggtaggagatccaagagagtgcctaatccaaaaccaaaccaacaaaaaccagaataagagtatgggaacaggaccaggacccactgctggtaagagtataagttgtacagcttttggatggctgtttgactctctctgaaagagtgtatattcattgaactagggattccttcagtgtagaaatacatgtatgcacaaagaagtttgttgtagcactgtttataagagtaaaaaatgtgaaaaagactcaataaggggcttgttatataataattatgggactcccacactgttcagttctttgcagtaataaacaggaatgggatgttaatggtcttctgtaaagtgagagaagtgacttgctgtataacataaatagtgggatttcatctttgtgacaaaaaatcaacaagtgaaccctcagacaaatgaatacatatgtttttatgtatatgtgcatgcttttgtacctatgttctagagaagagcctggtaaaccttcagcctgttaagtggaattgcttggattttccgtaggaccatatactctaaaaaaaatctacaagggagctgggtgccgtggctcacccgtaatcttagcactttgggaggccgaggtgggtggattgcttgagctcaggagttcatgaccaacgtgggcaacatactgagaccctgtctcaatataagaaaaaaaaaaattaaaaaatctaaaagagcttcaagaattttatatttttcttttttcttttaaaaactctagagttgccgggcacggtggctcacgcctgtaatcccagcactttgggaagccaaggcgggcagatcatgaggtcaggagatcgagaccatcctggctaacacggtgaaacgccgtctctactaaaaaaatacaaaaaaaataaattagctgggtgtggtggcgggcacctgtagttccagctactcgggaggctgaggcagaagaatggcgtgaacccaggagatggagcttgcagtgagccgagattgcaccactgcactccaacctgggcgacagagtgagactctgtctcaaaaaaaaaaaaaaaaaaaaaaaaactccagagtttttgttgtctagtgacattttggtgagttggaaaagcaaaagaagtagatagtttgcttaaaattgtaactccatgtattagtatattttcatgctgctgataaagacataccagagactgggaagaaaagaggtttagtggactcacagttccacgtggctggggaggcggaaggcaaagaagagcaagtcacatcttctatggatgacagcaggcaaagagatggagaggttgtgcagggagactcccatttttaaaaccgtcagattggccgggttcagtggttcatgcctgtaattccagcactttcggagactgaggtgggtggattcagtgaggtcaggagttccagaccagctggccaacatggtgaaaccctatctctactaaaaatagaaaattaactgggtgtggtggcacacacctgtagtccccagctacttgggaggctgagacaggagcattgcttgaacctgggaggtggaggttgtggtgagcagaggttgcggtgagctgagatcatgccactgcactccagcctgggggtcagagtgagactccgcctcaaaacaaaaacaaaaacaaaaacaaaaaagcaaccatcagatgttgtgagacttatccactatgacgaaaacagcatgggaaagacctgcccccatgattcagttatctccaaccgggtccttcccacaacatgtgggaattatgggagctacaagatgagatttggatgcggacaaagagccaaaccatatccctccgtattctgtataggacagtagtttcctcttacccttgggaatgtgttccaaggcccccgtgggttcctgaaactggataatactgaaccctgtttttactattttcctacacatacctacctatgataaaatttgatttataagggaaattaaattatcaataataagaacaattataacaatacattgtaatgaaaattatatgaatgtggcctctcaaagtatcttactgtaccttagtcacctatttttgaactgtagttgactcagggtaactgaagccttggaaagcgaaactgtggataaaagtggagtactgtgttacaaatcaaatcctctccaccctagcatcctatgcggacatagctaactggtactaatacaatcctggattcagtcactgtttgctggatgacgttggggtgtacttttgacattttgacatgggtgagctaaattacttggtctgaatggttgtactggataatgctataggaaagaatgttgattgtctcaggtaacttgatagttagaattttgacacttattagtgttattaaatgagtgctactgtttaaactttcatgtaaaaatgcagtttccttgctgcctcggtggtcttggaaagtggcccaaagttgccatcttcagaagatatggttatgattcttcctttgctgtgacagagcggagtggtggagagagtccatgcagggtggttgctccaggttaagggtctggaataatgtgggtcctgttcagctattgctaaggttccccttcacatttcccctgtgtgatgtttctggtcatagctttaatgttagtttaactagactttcgatttaattataactgttaggataaagtcagatgtcagctcacttggctgcatgctgaggcctgtagaatatagagtgctttgcttccagccacatctgttgtctcctctcattatctgttaatggtactcaacttgacagggttgttttgataaatgacgggtgttatggaaacggagagctggaatttgtgtggaatggagcttaggacaaaaagaagcaatggtgcagaccaggccagggagataacatgggaaccaaggaatcccttgtggaatgctgacagtcataatgagtattaatttgggagggatgtggtatatctaatatttttcatttatcttacataattattcttcctattactttttcatgtggtcatgtgcaaaacacctgaaaaattatagtttttgttgtaataactttgatttttcctcttcacaaagtaatttacaaactcatactaatgagggttaaaacaaatgtttcactttgaggagtacacccaccattgagttcctaggtggaaagagctctttcgaaggcttccatgtcaggtctgttacttagagaaaaaaacctgaaaataaagtaagttcagtgtaaaagggaggtaagaatgaactcccctcattcacagcagaatttggtagtgcttttgcattctgagaagctttgaagacaaactagtgtacaaagtactttctaagttttatattctgtttatattgctctgtgtgtatacaagatttagtcctctgtccagtttacctgtggctgtttgcatatcccttaagggctgggtaataggaagaacttggcttgaataaactagcgatggcttctatacttcattaactcttaaaaagtgtagcttggaaataggacactagttaggatctctgtgtttttgagtaaccccaggcacaattattttatatcttcataaaatggggataaaaatcctcctttttactagactttttatttttctaaatttttttttagagactgagtcttgttatgttgctggactcaaactcctaggctcaaaggatcctcctgtctcagcctcctgagcggctgggactacaggcgtgaaccaccactcttggcttactaggcttttaaaggttaatagaagacattcttttttttttttttttttttttggagacggagtcttgctctgtcacccagcctggagtgcatggcaatatcagctcacggcaagctccacctcctgggttcacaccattctcctgccttagcctccctagtagctgggactacaggtggccgccaccacgcccggctaattttttgtatttttagtaaagacagggtttcaccatgttagccaggatggtctcgatctcctgacctcatgatctgcccacctcggcctcccaaagtgctgggattataggcgtgagccaccgcatccggccaatagaagatattcttatttgcatagatgttacttatttgagataggcttctttgtgccaagaaatgtgcagagaatatatggagtgagtaaagcagtgttgttgacctcagttcatttattcattcaacagatttgtgtacctgacataaatctacatgatgagcaaacatatagaaccttctctatagaactctatggaactgtttagaaggggctatgagtgttaaaaaaaatcacacccatgacttacaaacggagatcaatgctgtgaaggaggaacacagttctatgagaacttataacaaaggaacttgacctagaatgggatctcaggggaagcttctctgaaaaagtgatgtttgacctgagatctgaaggaggctttaaacggtctgtgagtggctgtttggggctgcaaggagattattcctgctctggtgggaagaagcctgctggcctgtggtagaaatccctatacctgggggaagtggaaaaactggtgtaactgcaaagtggggggctgggtgcaggttggattagcagcaggtgcaagatgagcacaaaagaatttgagtggcataaaatgctgtcaaagcatttagaatccctgagagactaggtacagtatgaattcagaatagagcggtttgcttcttctcaccagccttttccaactcactataaactggcacttttaaaatggtctgtagaaaagaaaaaagaaattcttttcagcctgtgccatgtgtctggatatagctggttagaaaattggaagtgtgtccaagtacaggagtagctttgtagcaaggctttaggatcaatttcatctctgacatatatggagtaatctcatagccacttggatatgaagcagattttcaagtcacaggtccccctcaggatggtttcactgaggaatggtgtttagtggagcttatagcagagctagatttgcactacagaccatctctgatttgtattgatcacagccacctttcaggggggcaaagacattatgcctcatcagctcttgctctcagtacatgtgctgtgttaggagtttgagacagatatttctatgtcctgtagaataacttgatttgtctttaaagagagaccagcagagttatctttaaatagcaaacatgcatgtgcatgtctgtttggctgtctgtggcaacaaagcaggacccctgggttctattcagcctggccccacccccatcttgttgagagactataggcaaatcactttaatctgtctaaatttctctgtttattggaaagagagtacctgataatgcagccactttatagggccttggaaagtctaattaacatttatgaagctatttgagagttccatgaaacttgcctggaaggggaaaggtgtaatagtgaagataccagaagtaatcatttaaattttcagcttgtacctttctaatttgggttgacactgagtgaacttaatagttagaatttgtattttataggaatacatttaaaaaattcctatacaatgtctttgggaggacaaaatgatcttggctatcaccactagagaatacatgctttaaatgtactttaattttaataaaatttagcaagttgatatatatattttttaccagaattaattgtgggtgggtaagaaattagtttgaaattaacagttggtaatctgttaagattcacataaaaattgaattaatgagggagtttggaatctggtagctggtaggttatatgtttatttaaagccacatggtaaggaatgtgcacttattttgcttccttattagatgaatttcaatcatgcacaatttaagctatgtcttgtctaacagatggatctttatttacttgtggaaaagggattggtgagatttttaaacaaatggcttgcagagaattcttaatgtgtaaggaaaactggggtcagaagtgttctttgacacgaaacaatgctgctttctcccggtgcatctttgaaataaatgtttagcttgtctgtgattgttggttgtttcatctgcatttattagacgtcagaggtggttggcattaatattcctggcagaagcagaggcagctctaggatgtgtgaaatgctgatcactcacagggatgcgctgcctctttaatatcttgcttgcagatgcattttctagctgaccacgctattaagagctgccatcaatcacgcaggctcccagttccggctgtcggaggggagggaggattggagcgggtggaggctggccaagcaacgaaggagataaaattgcagctggcattgtgtgtgcgcgcgcccgcggcggcggccagcaggggtgcgcgcggagcgggctgggctccagcccgggttttgccggccgccgccgtcgcggggagtctgctctttctctcccggcgtctgggtcaccggcatgtggcagtgctggcccggcctcccgggctgaaggagtgcgagctgagtgccgcggccgtgggcagcaggctcgggccagggcggccgcctccctagccgcgggcggggccccgcgcggccaccgcctcccggagccgccaagccgccgggacctgcgcccgcgccgcggtgccctgcggccgctcaggcctccttttgttttagcaagtgcacttcactccccgggcccccacctgccgcctgcccgcccctttcgcgggtccggagttggcggggccctgcgccggaggaggaggaccaggcccgcgggctcagctctcgccgccagcgggccgcaggcaagtggccggcggcctcgtgcgtcgagggggacgcgaatctcgggccagaaagttggacaagtgcgggcggggggctcggggtgggtgcacggagtgttccagccgaccctagaaagatggaactcgggtgttcctaagaatgatgatggctttccaggaacggggagtcagtatttgccgtgtcccattgcatttctgttgggctcactagtttttaagtagccccaaactcttgaaatctcagttaattaaatcgaacagaaaacatttttttgaggggggagagaaaacactatttaaaaatacatgtatatgtatatatttttatttttttcttctgaaaggaaagtgcttttgaagccgagtataatgcagaagtcgctctttgatcagaaacttcattgctttactgtggaataaacaagtttaaaaataaaatgaatttgatggacttgatttgaggctacttaagtgacaaatgaaattttcttcttggaccgaactactgttattttgccagagtagctaaaatgcggaggtactcttgacgattgttttacgtttaaattgttaaaagaattttttagtgtgggatgctgtcttccttgtttctcctctcttgtttactcaactcttgttttctgaaactgtagggagacctgcttgaccactttttgtttgctgagaaggaaactcctgtaataggttactttgttttacttgcagcccttaagcgtccctggcgcacatgtgtcccgcgctctgtgggcattgtttggctggaggcctctcagccacacggaaaatctaaaaaatggtctgtgaatgaacacgggtgtctacagagaaattccattttccctttgtgcctctgtgttttaagattgagacactgagtaaaagttgagaacagatttaacaaagtcctcacaattctgtgccaaaattactgttttgagttctggcttttttttttttttcctctttctggaaactccaaatttaaagtagacatgatttgaaaccttacagatgggaacaatatcccatgtaagcacgttgatctgtgggcaattatttccagaagcacaaccaactctacatttttatgcatgtgttagacttgggctctgagaggcagttgcctttctgaatatttacattgcctagtaaattacacaaggcagatttttagatgcttaacagcagcttcacaatagtgtgggggcagcagagttgagcttgtattttttttttctaactctgtaatttagtagtgtttaaactattttataaagatccctgggaccagtgaaagatggtttttcagtccagagcagttgagcgctcattgtactccggcaggcgctggcgcttggcaggctgcacttgaaatgttatttgatctggttgcatgatagaattgaccaagattacactttttccctccccgtggctgatgaaagcaatgcatctgcgagaagtgttcaataacatatttaaagacttaacccacattcattcactctaagatttccagaaaaaggccgtttagatttttgtcttgttttgtggtttttgcatttatgaattgaggcaagagctgacgtaatgtagctgtaccacttcctttgtgtgtgtgtttttatagcgtataggatatgttacaatctacatggttgtgattatttttgaaatgcctgagagagggagggagggagtgtgtggtgtgtgtgtgtgtgtgtgtgtgtgtgtgtattcccctcacccccatcccggtgccttcagctatatggcaatttattttttacattgtaggttaggggagggaagactgtgatggtaaaccccatcaacgtatcagtaaggctcagtgaattgcctgtgtgtgatgcagactagcttttcattttaactagtgcaactgtgtacagctgttaggtcagaatgcattggctgctcctacagggtagttttatcttacactgaaggttttatggacttgactggttgtgtttcttaatccctctcccatgccaccgtgcttgcttttaagcaagtgatagaacaagacaagcttttgtttacttatttaatagttgacttgtgagagatttatttttgattttgaggaaattggtaaaccatgtaacttattagtaggtattatatttaccatgcttttccaaggccaaagggttttgcttgctattgtgtaggctgagaagccgatggagccatccattttataatgacataggaagccaatattttgtgtaaaaatcaacaatgaaaaatgggttctttgttaactagtctaggattagtttgtaaaactcaagcagaaataaatgttggcatcattggagataaggtggctagaatgtttcccccttgtctcttacctctcgttacattgtacaaaaggacttgagcaacccattgaccaacagcagtttggccatgggctgggtggcacatagaagcttttagacgtgtctgctcaggggcatgtgtggccaacttgatattttatagtgttattgtttcaagttattagaaagtatttatgagtagatttgagtcttttcaggcttttcaggctgtaacatagattgtaatgtgactgacatgggttctcagtggtctggtctctttactgtctgctttcctgttgagtagatactactgtccagagctgttattatctactgcatttatttttatttttattttttttgagttggagtctcactctgtcacccaggctggagtgcaatggcatggtctcggctcactgcagcctccgtctcccgggttcaagtgattctccagcctcagcctcctgagtagctgggactacaagcgtgtgccaccacgcctggctaatttttgtatttttagtagagatggggtttcactatgttggcgaggttggtctcgaactcctgaccttgtgatccactcgcctcggcctcccaaagtgctggtattacaggcatgagccactgcgcctgggctatccattgcatttttaaaaaggagcaaaagtcgtagaaacaaacttgattgaaatctgtttatgactaaagctgatattataaatgtggtacctttgtgtcagaggcccagtttgctgatagaagatgggggctgagggttgttggggcggagtgggatctcgtgggggtggctgggtagaaagagagcttgtcttagactaagatactttttaattcattggagaaattggtccatcttcagacaacctggaatgaagcagtagagtgcagtattttctagaaaacgtgataatttcattgtaacttatatagaaaatgttttctctaattaaaagaagttaaaacattcagattggcaacagactgctgaatccaaggaataatggagggaagtaggtatcctacatccaattcaaacaggttatatcacaagttcatttgtaagtctttttccaggttgttatccaattccacatattaatgatgattggggtcttagactttccctctaaaatctaattaatccatgaaatagttgacatacttaaatatttgtaataaaacagaataatgttgatgcttagtcaataggaaaattagcataattttactcaatttttaatgttatcattgaactctggtgtaattcattaatttattcagtacagcgtagtggtaaatagttaggctgtctgagtttgagttctattcttagtttaccacttactcactgtgatacctggggtaagttatttaacctctgtgactgttttctcataccagaaaataatgagtctacctagagggtttacgaaatgctttaggaccatgcttagcatgggaaaacagtgaatagttaacatagtgagcactaattatgtactaggtactgttttagttgctgaagatacaaaaaagatgaagtctctgttctcatagcatttattttccagtggaggaggacaaaacaaataaaaatgagcatgatgattcgtgaaacttacaaacataatttctgagcaggttagtgagccatgattgcaccactgcactccagccagagtgacagggcaagaccctgtctcattgaaaaacaaaaaagaagaaaacatttaattttagagtattaatcagaagcttcttgttaagataataagaatataatgggtaagtatgggagatcattataaaagtaaagtgttggggccaggtgcagtggctcacgtctgtaatcctagcattttgagaggccctattgggaagatctcgatctctggagtccagaagttcaagactagccttggcaacatagcgagaccctgtctctatctattaaaaaaaataaaaatagaaaaagtaaagtatttatgctgttaatgatttgaaataatcacttgttctaaagctgaacaattagatttgtttctcatatcttgttttccacaagatgaatgagcttttgtagttgtagttttaagaaagggtccatttatatgtgactggtgggcttcaaaggaacaaaagagtgtaaatatactgtgcatttgaaaaatcgcttaagtcaaaagcctccagatggtgtgtgctgctgtgttcacagctgtatttaccagtagctcaccacattatctaccaataattttaaaatagctgggtagaaacagtggtatattcagcagtagtgacttgtgtgccttttaataaaatgacagtgaaagtacctccttttgcatgttcttcaggatttcttagttggggcagtttatgttttgcacaaacaacctgagtttacatacagaagcagataaccaagttatttttatgtggtggtctctcaggaatgaggctggggaaattctgccgatctgtatcactcaaagatgtttttgttttactcaccagctttataattttaaacatttaaaaaatgttaaatataggctactctgcctaaggaatagccgttctttattcctttgctttcttaataaacttgctttcacttaaaatgttaaatatatgtaattgataacttatacataaataatattataaggtgagtcttgtgtgatgacattctttggcattaccaacaaaaaaagacaggcctttcaatacccagatctactccctaatatgaactttttttttctattccaaagatttaatacaagttcttttggaaggactcaaaattttaagtcttattatttttggccacagacactactgttcatttgcttagtaaagtgaatggcttgcataagttacatgtaaaacatagaaaaagagtttagaacattatccaggaactttagaaagttgtgtgtggtaggttgggtgtggtggctcgcgcctgtaatcccagcactttgggaggccgaggcggcggatcacgaggtcaggagatcgagaccgtcctggctaacatggtgaaaaacattttgtaaaaatacaaaaaattagccgggtgtgttggcgggtgcctgtagtcccagctactcggtaggcggaggcaggagaatgacgtgaacctgggaggcggagcttgcagtgagctgagatcacgccactgcactccagcctgggggacagagtgagactccgtctcaaaaaaaaaaaaaagttgtgtggggggggtgtggttgggggaagaaagatacatgtgtatttatttattaattgattaaattatacagaaaaacctatatctagattgaacatttgaacaattttttctttttgtttttgctgtttatttcttactgttaccttcttttttgagtggtaggaaaatgacgcagacaagttttcatcttatgtgtatgttttttggctatttacctaggcagcttccttagcctgtgctctttccacagatcataattcttaacataggttagagtaaatgttcagtaatgaaatattcacctttctcaatatgttagatgttcatggaaaggactcttaacagtatttactcttaagtgtgttgggtgcaggagcaatttgagtttggatcttattatttttttcactagtacctccattacattttatttactttttttttttgataatttcaactgtttttattttattttttatttttgagatggagtcttgctctgttgccgaggctggagtgcagtggcgcaatctcagctctctataatctctgcctcctgggttcaagctatactcctgcctcagcctcctgagtagctgggactacaggcgcctgccaccatgccctgctaatttttgtatttttagtagagatggggtttcaccgtgttggccaggctggtctcgaactcctgacctcaggtaatccactcgcctcagcctcccaaagtgctgggattacaggcgtgaaccaccgcgcccagccttgttcgtttatttgtgagagtgtctcactctgttgcctaggcaggagttcagtggcacaatctcagctcattgcaacctccaccttgcgggtgcaagcgattcttttgcctcagcctcctgagtagctgggactacagatgtgtgccaccacacctggctaatttttatctttttagtagagatggggttttaccatgttgccctggctagtctcccaactcttgagctcgggtgatctgctcacctctgcctcccatagtgctgggattacagacgcgagctaccgtacccagcctgtaccacattttctttatcagtccatcattggtgggttcctaggttgattccatgtctttggtattgtgtatagcgctgtgatgaacatacgagtgcatgtgtatttttggtagaacgatttaatttcttttgcatgtatacctggtaatgggaaatctccaaactgctttccacagtggctgaaccaatttatgttcccaccaacagtgtataactgttcccttttatccacagcctcaccagtgtctgttgttttttggctttttaataatagccattctgactggcgtgagacgatatttcattgtggttttgatttgcatctctctgatgatgaatgatgttaaacattttatcatatttgttggccacttgtatgtcttcttttgaggaatgtctgttaatgccttttgcttagtttgtaatggggttatttgttttctgcttgttgtattgttaaagttccttatagattctgggtattagacctttgtcagatgcatgatatttaaatattttctgctattttgtaggttgtctgtttactttgttgacagttttgtttttttgagttggagtctcaccctgttacccagactggagtgcagtggcgtgatctcagctcgctgcaacctccacctcccaggttcaagtgattctctgcctcagcctcccaagtagctgggattacaggcgctcactaccatgcctggctttttttttttttttttttttttttttagtagaaatggagcttcaccatgttgttcaggcagatctcaaactgctgacctcaggtgatccgcccccctgggcctcccaaaatgctgggattataggcatgagctaccatgcctggccctttgttgatagtttcttttgctgtgcagaagctctttagtttaattaggtcccagttgtcaatttttgtttttgttgcagttgcttttgaggacttagtcataaattatttcctaaagccaagggtcggaatggtgttttttaggttttcttctgggatttttacagtttgtggtcttgcatttaaatatttaatccaccttgagttgatgtttatatatgggaaaaggtagcggtccagttctgcatatggctagctagctatcccagcaccattttttgaataggcagtcctttacccattgcttgtttttgtcagcattgtcaaagatcagatggctgtaggtttatgactttatttgtaggttctctattctgtttcattggtctatgtgtctgtttttgtacctgtaccctcctgttttgattaccgtagccttatagtatagcttgaagttggataatgtgatgctgccagcattcccccccccccccttaggatttctttggctctttgggtactttttttggtttcatatgaattttagaattactttgtttaattctgtgaaaaatgacattagtagtttgataggaatagcattaaatctgtagattgcttaggaaagtgtggtcattttaatgattcttccaatctatgagcatcaaatgtttttccatttgtgtcatctgtcatttcttttttttttgagatagagtctcgctttgtcacccagccgtgaatgcagaggtatgatcttggctcatttcaacctctgcctcccgggtttaaatgattctcctgcctcagtctcccgagtagctggaactacaggcatgtgccaccacgcccggctaatttttgtatttttagtagagatggggtttcaccatattgatcaggctggtcttgaattcctgaccttgtgatctgcccgcctcaacctcccaaagtgcttggattacaagcgtgagccaccccgcccagcccacctgtcatttcttctagcagtgtgttttagttctctttgcagagattttccccctccttggttaggtgtattcctagttattttctttctttatggctattataaataggattgcattctggattggctctcagcttcaacattattggtgtatagacatactgctgagttttgtacattgactttgtatcctgaaacttttactgaagttgtttattgtaccaggagtcttttgatggcgtcttcagggttttctaggtatagaatcatattgccagcaaagagcagtagcttgacttcttcttttcctgtttggatgccttttatttctttctgttgcctgattgctctggctagcacttcctggctctttgaatggaaaaggagaactaaaagtgcggaaaatgtaaggattaaagcaatctggccttttttttttttttttttgggaaagaaaattggtgttgttcagttttgctaacaggcctaacatttaagcatttagataagtagcattttattttatatggtagattaaaacattaaaaaattttaaaacattaaatcagtagactagtttttagaatggttttgggtttgcagataaattgagtagaaagtacagagttcccgcatcccccctaactcccagtttcccctattaacatcttgaattagtttggtacattgttattgttgatgagccaatattgatacattatttataactaaagtctatagtgtatgttaaggttcactcttggtgttatacattccatgggttttgaaatgtttcataacatgcatctaccattacaatatcatatagaagagtctttactgctctaaacatgccctatgttctccctattcatccctccctctctgcccccaagcccctggccaccactgatcttttttaatatctccataggtttgctttccagatgtcatataactggactcatacagtatgtagtcttttcagattggtttatttctcttagcaaaatgtacttaaggtttctccatgtctctgtgagcatgatagctcactactttttatcactgataatattccatcatgtagctgtgctgaagtttatttatctgcttacctaccgaaggacatctggattgcttccaggttttggcaatgatgaataaagctgctttaagcatctgtgtgcagttttttgtggtgagataagttttcagctcctttgagtaaatatgaaggtgtgtgatttctgtgtcccatggtaagagtatgtttagttttgtaagaaacggccatgctgtcttgcgaggtgtctctagcattttgcattcccacaagcaatgaatgagagtttctgttgctccacatacttgctaccatttggtgttgtcagtgtagtggattttagcccttcttagttattaaattttttttttcatataactgctcatttccgatgccagctctgttacagtttttatttttctctactatttgtcatggagcaggagaaacgaggaccataaatcttatgcattacatgtgcctcatactctgtcttgtaagcggaaagcataaactttagatgtaaaaaggaataatacaatctaattagatttttaaatgggcataattctggtagagtgataggttagggttcatgtaaaatatgctacactaagccctttgtattcttggcttctgtgtccacggatttaatcaactgtggggcaaaaatgtttagaaaaaagcacaaattaaaaaatatagcgtttatattatattaggtattatacgtaatctagagattctttttaaagtataccgggccgaatacggtggctcatgcctgtaatcccagcactttgggaggcctagacgggcagatcacttgagatcaggagttagagaccagcctggccattatagtgaaaccctgtctctactaaaaatacaaaaatattagccagatgtggtggtaggcgcctctagtcgcagctactcgggagtctggggcggaagaatcgcttgaaatgggaggcagaagttgcagtgagctgagatcacaccactgcactccagcctgggtgacacagtgagactccatctcaaaaaaaaagaaaaaaaaaaagtatatgggagaatgtgagtaggttatatgcagatactataccgttttatatacgagtgtctggatattggtatctgtggaggttctggaaccagttccccttggataccgagggatgaccgtagtatgaatttgttagtggttccatgtaagtgttatttcccctcagtttccctgtgttcttcgttttccaaaacatttcattttataaaacaaagggatgcttttcagtttttagaaataaacccattctgctaaggtccttatttgctagatctatgtagagttaaatgtttgtattattttctttctttattgaggaccatttattttaatgatcaaggaactcagaaatgcagaagatttggtcctgtccttggagcttgtaatatatccagtaataattgcagcagtgcatattcaggggcttactatgcaacaggtactgtgcacttcttagaggaggttagaactacttccagggtaagctaagttagagcgtttgactctgcatttatccagtactagctacttgttggaatttaacatcagcctaattgtggcatataagtacccagtgccttggttgttaagatgatttggataggctctcctgatggttatgtagttcattaattcttgttacaggtccttaactttatttttatcagggacttctttgagtattggtgtaatatatgatctttctcccagaacataatttgtgactgtttgagtacataaattgcagatggtttatgtagcctttgaagcctatccatgaaccctctcattaagaactcctattctggtgagccctagatctatgtttgaatgactaggaaggctttgcatttcttatttttggcaggtttgctttacttatattgatttgaggccattgacttgtgcgaacacttgtggaacagtgtttgtgtgtactgaatggtttataaaggggttcccaaggctgctgttgaccgtattaaactgctttctttatgaggacatagagataaacttttcttagctcttagtaccaaaaaaaaccagaccttctgagcatgtggtttgttttctaacttacagatttagaatcctgtaactcatcaagtttcctttgagccatttgcttataaaattttggccggccgggcacggtggctcatgcctgtaatcccagcactttgggaggtggaggcgggcagatcacaaggtcaagagatcgagaccatcctggccaacatggtaaaacccggtctgtactaaaaatacaaagattagctgggcgtggtggtgcgcgcctatagtcccagctactcaggaggctgaggcaggagaactgcttgaacctgggaggcagaggttgcaataagccgagattgcaccactgcattccagcctggtgacagagcgagacaccgtctcaaaaataaataaataaataaataaaaataaaaaataaactaaaattttggccacatctaacaaaaggtacaaaatgaacatgaatacatacttttatgtagcagctcattcatggtttcatcttttagattctcctcctcttctattttttcctttgttccaaggaaaagagaagcaaatattgtataattaaaagtaaaggctttgtagcctgtgtgacccgtgaaactaggtgtgtgacctaaggaaactatccacaaaggtaaatacttaatacttcttagctattattctccaccaaataccctcatctgttcttaaattttattttacattgtctaaatctcagtaagctaccttcagccccctttaaagccatcctttaaaactatctttctctctcgatacaaagatttaatttctgcctagagacaatcagtaaagaaattgtgtaggcgagtgccgtggactgaattgtattgcctcaaaattcctatgttcaagccttagctttccgttccccaagtgctatagtatttggaggtggagcctttggaaggcagttaggtttagatgagatcctgagggtggggctcctcatgatgtgattagtgtccttataagaagaggaagagagaccagagatgaccagtgctcactctgacatgtaaggacacagccccagaaggtggccatttgcaagctaggaagagagccctcattgagaaagtgaatctgctggcaccttgatcttggacttctgagactccgaaactgcaagcgataaatttttgctgtttaagccacccagtctgtggtattctgttatggcggactaatacagagcataaattttatacctgcagaagatgatcagtatgttactacagagactgagctttttgagaacgaaatgaggattatacttctcttggcagaagactttagacctactgaacagcctttactggcctctagttccatccttacagctgccttctgaaggaggcagaacagatgttagcctctcaggttacacaaaatgagatgcaagtgtagggcagttcattgagtttcccacatttacagtttacattttggaagtggctaactaagcctgttagtagttttttttttttttttcctgtatccattgctccttcgatgggcaccttaatttgtcagtcttataatcgctttgcttagaagaatataacctttatttttagtccctgtggtgatttgattttcaaggtgaagaactctctcacttctcacattctggcatgggaactgaaacttcagtggggaaattattgaattatctttcctgtctcagggaaaaaatatgaattccttggcctgctgtttagatttgaagtataaaatttctttgaagtgtcataactctaagaaatgtgatattacctgaattagtacttgtgatattgtatcctttcatttttatacaggtattggtttgttactcagtcttgctgatgaatgtctgtaataggatagaggagttatttgtggctatctacaaccagaaaattgctgtttattttagtcaaagtgatttgagtatgtcttcatcaaagggataaagcaggaatgccagaaactataaactttagtcaactaaagaagaaaaacaaccaaaccaaaggccaaaaactccatccttaattctgcccttcattctgaaagaattctgagtctctacaaagtttatattcataagctgtcagaacatacttaatttgctccattttccattgaaatttcaacaaagaaactaaaaaaaaaatcaaatttttacttgataaaactatttctttagattaaaagcttggaatagatttttaaaaaagctttattgagagaaaattcctatacgagatagctcactcatttaaaaagtatacaaatcaatggtttccagtatatagctgttccttgacttaagatggagttgtgtcccaggaaacccatcctaagttgaaaatacatgtcgaaaatgaatttaattcacctaatctaccaaaatccatagcttagcttagccgatgttacacatgctcagaacacttgcattagcctacagttgggcaaaatcatctaacataaatcctattatataagaaagtgttggatatctcatggtatatatgtatgagtggatgaatggatggacaaatggacagacagatagatgttttgcccagtggcacgatcatagctcccatgctcaagttatcctcccaccttagcttctggagtagctgggaggctacaggtgtgtgccactatgcctggctaattttttaattttaattttaatttttttttttttgagatggagtcttactcttttgcccaggctggagtgcagtggtacaattttggctcactgcaacctccacctcctgggttcaagggattcttctgcctcagcctcccaagtagctaggattacaatagcaggtgctgcgcccagctgatttttgtatttttagtagagacggggtttcaccatgttacccaggctggtcttcgactcctgagttcaggtcatccgcctttgcctcccaaagtgttgggattacaggcatgagccaccatgcctggccttaaattttttgtagagataggggtctcatgttctccaggctcctctcaaactcgttggttcaagcgatcctcctgacttggccttccaaagtgttgagattataggcgttagtcgctgtgccctgaactgaaagtgaaaaatggaatagttgtgtggttacctagagtatgttttccactgaatgcgtatcacttttggactgttgttaatttgaaaaaatcgtatgttagaccctcttaagttggggaccatctgtgttcatagagttgtgcaaccaggaccatattattagaaatagatttttatatggcagttcttggtgattaattgaatgctgttagataatctttttgtgtaaatttgtacttctgtgaataagaatataactaaactaaaactaaatttgtacttctgtgaataagaatataagatgttttactttgcaatatataattggcttaaggcattaaaaccctgcttttgtttactgtggtctgacataagggagttaacttcagcttaaggttattaaatccttcaatgactgatgactcccttcaagttatgtatgacgaagcaattatgaatatggtgtgaaaatgggatgtaatctctttcaacacattatttggagaaattacgactctccccaagtattgtatattcaaatatgttagacactgaccattttcagcagtttgttagagaattttttatttatagtagaaagtcagagtcagcctttatgtctcagatttggtgagtttctcagtgttaattcccaattggttaataaacgtcaaatggagctttaaggctcctgggcaagtccattcacttatgcagtttcttagatgcctgtttcatacattgtccttttatacttcctccttggcctcatggtgggcttcctacttgcatgagaaaatcagaacagtcttaagagcccttctgcagactcctaccacatcttgccaccttccagggcatcctgtgctttccccactgcttgtgtatagaccagctgttcagggaactctctgaggcgccacccgtgccctctcacatagtaatttcctgtctctcataatgttgatgtttcattctctgctggatctttcccagcagcatacaaacatgccgcttttctccaatcttaaaacagatacaaactcccgtatttggatcccacttactctgccagctattgctgatttctctgcttcctttgcagaaaaacttctcaacaagagttttctgtacccagatctccagttctcctttcctcttaaatccatccgttgttgctccagggaaactgcccttgtgatgatcactaaggcctctgcactgactgttccttctgcctgggatatgtttctccaaatatctgtagctcaccgtcccgctttcgagtctcagtgagaggcctaccttgaccctcagtctcggctctactttgtccttactctgctctgttttcccctagagtacttgtcttcatcacaaactacacctttattttttttttgagactgagtttcgctcttgtcgcctaggctgcagtacaatggcgtaatctcagtttactgcaaccgccacctcccgggttcaagtgatcctgctgcctcagcctcccaagtagctgagattacaggcacccaccaccacacccagctaatttttgtatttttagtggagatggggtttcaccatgttggccaggctggtcttgaactcctgacctcaggtgatccacccgccttggcctcccaaagtgctgggattacaggcatgagccaccgtgcccggctacatctttatttttattgcttattgtcttgtttcttccaccagaatgtaaagtcctgaatgacagagaattttgactctttggtttactgctctatctccagcacataataggtgtctgataaatatttgttgaatttctacgtaattccctaggatgcatggctttaaaaattacctaaatgcaggctagacacagtggcttacacctgtaatcctagcaccgtgagaggccaagacgagcggattgcttgatcccaggagttcaagaccatcctgggcaacatggcaaaaccccgtctctactaaaaatacaataaattagccaggcatggtgatgtgcatctgtagtcccagctacttgagagtctgaggtgggaggattgcctgagcttgggaagtcgaggctgcagtgagctgagatcgtgctactgctctccagcctgggtgatggatgtgagaccttgtttccaaaaaaaaaaaaaaaattacctaaagagtttaaaatgttatctttagtccagacctacttagctgccttccttgtatctccactcagaagatatagctccactcacatgtccagtaagcacctaacacttaacatgtctaaatggaactctgatgtttttccccaaaccacatatcattgtggagttttatttttaacttcttcagccagctgagttttatgcaccagcttcttttctttggtttatacattgtaccacctgaaaaaccagcggtaattggagcaatcttaggttatttaaattagtcttatttggcatctctaaagcagtcacatttttggacattgaaaacgattctaaacagtagagtagctgggactacaggggcgtgccaccacacccggctgattttttttgtttttttgtgtgtgtgtttttagtagagacagggtttcaccgtgttagccaggatggtctagatctcctgacctcgcgatccacccacctcggcctcctaaagtgctgggattacaggcgtgagccaccgcgcccggccttaatagataaatctttattgtggatttcttaggattatttgtattttgttgttttaatacttggaaatatggttgtagctttcaaagtaaggaagtaatgataattgttattgaaacttggatgactttaaaatattttacttaccgttatttagcaaatataaaatgcttcctggaaagcctttctgtgtgtagtaggtaaactgttgaatcaggaaatgtgtagtttaaaagttcctctctatggaagcatcaaattagttctttaaaatccaaatttgggctgggtgtggtatgtcactcctataatcccagtgctttgggcagcctagaagagaggattgcttgagcccaggagtttgagaccaccctgagtaacatagtgagaccttgtctctacaaaaaattgaaaaattagctggctgtggtggcacgtgtctgtggtcccagttacttggaagactgaagcaggaggattgcttgagcccaggaggttgaggctgtagtgagccatgatcgtgcactgcactccagcctggatcacagagtgagatcctgtctcaaatgaatggaatgaatgaatgaatgaatggatgaatgagtaaagggatttcccacccattgctggtatttagcttctggaggtgaccaattagtgtttcctgtttattgcaattgcaggaggcaaagatggtggtgacaggaaggcttctcatagggagaggtgggttaacagctcatagggagaggtggattaacaggcatcagattgtgcttgggtttgattatcctttgtaggagctatacttactatttcaccaaatacttttgaacttgattattgcttaattaatcattcttgtttgtttttaaatctctagttgaaatatgttggttttaagcccccttttcctgtgtctgatacttagtgcttctgtaacagttggtaaaatgattttataagcttccgtgtttcagcattgattccatcatatgagaggagggcggggttttttgtttatgcccaggattttttttaatgataaattatttcttcttttatgacagtggcttcatgatactagcttttctaacaaaatttcctgtaattaaagtggatattttaatatacctaattattatttggtacattgattcattgaaaatgtatttggtcattgaagcattctttaaaatgaaggctttttgcacaccttgaaccatgaaaaatttgtcctgctttagcatgactttaagtggaaattttgtttagtatctatctttaattactaagatccttttggtgtgttttaatgcaatcatttaaggccagtggtaaaaaccaaaaaaactggcatttaacctgtgaagtagtattgttaacctggctttgaaggaaaacctgtgatgtgaatttattttttaattaagattaggttgtaatatccccaaggagttggtagctgtgcttgattgattgattgattgatttgagatggagtttctcccttgttgcctgggctggagtgcagtggtgccattttggctcagtgcaacctccacctcccaggttcaagcaattctcctgcctcagtctcctgagtagctgagattacaggcatgccccaccctgcccggcttattttgtatttttagtagagatggggttttgccatgttggtgagattggtttcaaactcctgacctcaggtgatccgcccgccttggcctcccaaagtgctgggtttacagacctgagccactgcgcctggtcaatttattttttaaaaataaagtcatataaatgcatatattttgtttttaatctctgccataaatgaatattttctgtgttttatacctttattggtattctgttaaaagcagcaccagtaactgtggggaacagttttcccttagacagtctacagtggatgggttgtagaatttctgtgtgtctctgaagaggtttttggaaaggtgtcccatccctccccgtcttttctctttagcagggtccagccatttcatttctttagtctttaagtagaatgattagattctactaagtggtgcccttttatgccattctcaagcagagaattggggaaaagatgaaggaacaagtctggagggaggagtgggattaaaaggaaaacaaaagggtgaaggtacatgtgtggtatagacttgtaggattcctaggaggatggcttggcgtgaggctgggcctgcatcctctcccctttgaatattccatttttgatgttattaattcttcaggcatttggcatctaaaatatggataatttgtaacatttgttatatttggtttttgaagcttgatgattatactaatagaatttttgagttccattcttttttttttttttttttttttttggtaaagacagtgaggcagagttggtaaattatggagtctaacttctgattggggtctttgggctataccagtgtttattttaccgaagtatagcattgagtagtagttgtatttcccatcattgaatctgttaccttcacactcagatccttgattgctctttggattaaattaaggcatgcgaaagaatcacttgtcatttctaataaagactgggttgaaaacctgattgaggctggcatacctgtgaagtatgagtcatcacttgcctaatttttattctgcattatagtactagagccggcatttcttgttaaacattattacatgcttcacatttctaggtatagagaagttcgtgaattagtatagttatttttattgtgtaggtaacaatttttaccacctatacattggaaggcttattaccagtccctagtggacactgaaatgtcaaagaaatcaagaaatacactcataaaacaagacatggtcccaatcattttgagaaagtttatggtgggtaaaactgaactggacagataattaatgtcatacaacaacaacagtgcccacaggaaagttccatttaaacaataaaacaagccacataatattttcatagtacctcagaacaggaattggttgtgtggcttaagcaaattcaaaggctgtggtattgataaagagatttatattgaaatgtgaagaatttattgtatcatggaaagaaatgagataggatttagttgaaattattagtcatgaaattatgaagaatatagagcctgactttgttatagacagcctataatataaagaagggaacaagtcccatttcacctattactaagcagacttcatctcatgatacgacagagcttcagtacaggttgggggtggtaagcctgggtagaggaaggccaaaatctgtcacttagccaaaacagggtaggtagggttcagagtaaaggagattatgatcaaaataagcccttagtctgattagggctttgcatggttatgttgaaatgagagtagaatatacaaaaatatttctggtgtggagtttattgtacttaagtgcttatttctcaaacccagaaccaagttgacttactatatttgcccagatctctcaatatgaatattaggatataaaagaatcaatttcgccttccattcctgtcctacttatttaatggctactcttaaaatttcaactaaagattaaacttctttatttctactgggatctgtggaaatctgtggtgattgcgttagtacctatttcagtttaatttctttgttgatctctagtattatagataaatttcatttactttttttgatttagtttaagacttgtgatatagaacttaaagtgttacctaatctcaatttgttgagatgtttaatagcacactttaatctgtggccaaatttaggtattaatgatttgaggtttcaactcatattttgtatttacaggggaagtagaacagtatatatggaataattaagctaagtaaatatttgccttttgccatggtgttcagtgttctaaagtcaaatatttacgatagaaatgaaagcttagctaaactgaaagcaagccatcttaccttttaagatgaataggtatgctgtggcttctaaaacctcattttcagagctcctgacaaaaatattaagagaaagactccccggttattatacataatttagtatatgaatagtcctatatgagatccttatgatttattccttgtatataaaatttctgagtggtttggtttggagatgcctgcaccagtgagaaagtggtaggagaatagtagcttattgttggccgtttctctcctgccccctgccccgtttgttttatttctgaatggtttcagtttgcgttttctgtaagttagaaaagacgaatggttttaaaagcctaggaaatttgtttcccgggacctcgatggttttacatgctttctgactcccattctccggctctccactcaggtggttgagccattggaaattttgacctgtatttagcattcgtagagggcacttggtaatttttatttttgcaagtattcctgcgagattgacccatattagtggtaagcagttgtctcagtcctttgtatgtttacctgtctctttctcccgggctatagtgtttttcaatttccgactcccagtctgagctgaatgtgaactgtgaaagggtgtgtagcttctaaattggtaaggtttattatactctgaaacggagttgaggaggtacaattcttttcctttaatcctagctgagtgctttcttttctctaaaggacccatttaaacatagatgttacttttcagtctctctttcctttttaccctgaagcccacagttctgattctcatgcttaagaactaagattttctcagactcctcctctgtcttccttcttttcctttctttcccccatccatatggcattacgtccttgttcttgaattgcttctttctgttgtcagagtccttctggaaacattttctatggaatcctctccattcaagctagaattccgggcgagaatttgctttatacaccacactacgtttgcttgctttctcagattcagaagtgctttggttagaaaggaatagttgcccacattttggcctcttctcatggcagatggctgacctttcccctcagagatcattggtacctggactcagagggcagaaggaagtactccagagaaatgcaacttatgcatatactcagatgtatttttttttcttttagtgaagtaataaccaaaaaatcagaatgataatcactgaacaggtttttctggctttctccattttccaccaggtgtataggaaaaggacattggtgtcacgtgactgcctttcttatgtgtacagaatctcttgcacccctacccgctaccaccttccccatacatcactaagaaaacagctattccatgatgattattttgaaggcagtaccatagtgttgcattatggaaaaacgtgtgtagtttaaattttagagaattttataaaacatccctgtgcaaggtcatgagttctttcccgcttcctctcttcctgtgtataagcagcctgtgataattaacttgagtggcagatcacaccagtgaagttctcagggagcgcttggagatatttcaatcattcttgaaaaataagtgattgaaaacatgtgctcctaaaagctctagttttgtagaaaacagaactctgccatcatcctgtattataaatacggaggtaatttattgattttacagaaattgaagctttgtttttattatgaagaaaaatgtgcagccttctgcctacccacatgacaattgcatagggttgggaaatcctctgagggagggtagacttaagattgtacccaggctgtcattacatatagcctgtctgccagagactctaggccctgatttcagagtgatggtataatatgttgagtgagtcagagaagatcagtgtggagaggggaatttataaaggaagagtgctgacggtgtaagataatggaacctgtgattctaaaacttggcagatgtgactatgatagataaaggtagtggaaaaaaatggtttcttgctcttttttcctcgggtcacgttgtgtaaattgctgaagaaatggaagaataaagccttagattgctatgggactgtctcactgtctttcctaagaagaattgtaatctgttgcctttgtgagagtcaaagataaagtcccctgggttcatgtttatgcatattcttgtacttgaggctattagagttgattaaaagagagtggcttattgaggaaatgagaatcttaatatttgtacttaccatacatttagctttagatcagcactgtggaatagaactttcagtggcaatggaaatgttctgtgtctgtgctgtccagtgtggtagctgctagccacatgtagctagtaagcacctgaaatgtggctagtgtgacctagaaagtacattttaaaaattttatttaattgaaatttatttaaatagccatgtagatagtgactactatactggacagcatggccctagattaaagttcttaagtgggtcacatggctataagaggaataatatctgagagcattctcttatgtctagacattttgtggttttgtggacacatgattatttctacattttttctttagagaaagttggaatggaaaggggaatgtaaagactattagcatgtgagttggagagttataatttactttttgtatttttatttttatttttttggagatggagtctcgctctgtcgcccaggctagagtgcagtggtacgatctcggctcactgcaacctccgcctccctgcaacctccgcctccctgcaacctccgcctcccaggttcaatcgattcggttcctgattctcctgcctcagcttcccgagtagggactacaggcgcgtgccaccatgcctggctaattttttttttttttgtatttttagtagagatggggtttcaccatgttagccaggatggttttgatctcctgacctcgggattgcccgccttggcctcccaaaatgctaggattataggcgtgagctactgtgtctggccccataatttaatttttaaaacaaaagacccaaaagtcgcctgttttttttaagtatttaagaaaaacgttaatgaaaaccatattgtttttacttaagaatctgtgccctttgattataaaagaggaaagcttgttagtgaataatgaaaaatgaaatctaataaattgattttattcatgaccaaatatttcattactttcagaggtaaatgtggcacagttcctgttctcgtggatctgaacagcaaccaggagaccatgcttctgcagcctgagaagggttggcctgggaaaccaggcttccggagggctgcaggccctttggagggatatgaggagtcaaggcaggcttcttgagtagaacaaacaactcttcctgttaagcaatacaaacaaatagtttttctgggaccagattgatgtgttttagatactgttttctgcaaaatgtttattgcttgcctctgtgctgtggaattctaaagatgtgaataacatggtttgtcatcagcagtgttgaggtttattgagcatcttgtatctgctagcattgtgtggattggtaagtttgcatggattattttgcttattcctcacaactccatgagatacgtcatattattatcttcattttgtcagtgaagaaactgaagtctagacagagaaattgactagctcatgtttacaaaactagcaaggacaagggtatgttctgtcagtggagccctacagagaagggtgaggggagatggtacatgaaacatatgaattagtgaataataaggtttttacgttattcttatgttagaacgctaacctgtgaaatactgaccgtgtgattacaaaaggaattaaggaatggcatggcatgggttggaagcatcaacaatttctttttttttttttttcttttctttctttctttttttttttttttgagacggagactcactctgtcgcccaggctggagtgcagtggcgtgatctcggctcactgcaacctctgcctcccgggtttaagcagttctgcctcagcctcccaagtagctgggattacaggcacgtgccaccacgcctggctaattttgtatttttaatagagacagggttttaccatgttggccaggctggtctcgaactcctgatctcaggggatccacctgccttggcctcccatagtgctgggattacagatgggagccaccatgcccagccaaattacttttctgacacttgaagtggatgtgaatggtgtgcatttatcaaaaacccctcttgggctagtggcaaggacgcatgagcaaaggtgaaagggtgagctcaagcacaggggatctgtagagaaggcttgtattggagagtcaagggggaggctgtttagggaggactggaggagtggtttcttgaaggaggaaattgggcctgacatgatttttctttgtaagtttttgaatgaagatattaaaaactgagacaaatgtaggtggcatttgcagagagcaggaactgaggtctaggacaaatgagggcgctttgaatggagaaaaagattcacagaactgcctcagacgttttcctccagttcaagttagtgaccagcaataactgccctatttggtactcatccctgtgggtggttggaactccctggggaccacagagggattctgcctttgtccctagtttggagcctgggttgtgatgagggctcattgagggcagagatacttttgccttgggaccctaaggtggttttaggcattaagagtctctttttccttgagtttctggtattccttcttggtagtttagtttatgaacattttgatttaatgtcacacttgggaggtgacacctctctcattgctgtcaggttcttcttttttttttagtgtaaaaaaatatgtgacttactttagtccttcagcttgccatttaagaatgttttgtgacagaatcattctttacatggttcttcatgtgagctgagtctctaaggtgaaaagaaaggtcagttgggcttttttggattacttttctgaaaccccatcagtagataaggcacatattgatgtgacagatgtcagattcccactgagaactcctaagatagttaagtgcagttaaattgtaagatttgtgttattctaatctgtgactcacattctattctaaggaagagacttggcattgatcatttataagttttgtaatgtggagatgaattacactgggaaatttactgtgggtatttaattttgttgattactaacttgttgaacagttttcttacatatagacttcatagaccctttatatggtaatatatagtgtaaaccttaagagtccaagttgaggatctcaaatccaaaaatacgatatctgaaatgcttcaaaattcaaaactttttgggtgctaagatgatgctcaaaagaaatgctcattggaccatttcagattttctgatttgagatgctcaaccagtaagtataatacaagtattccaaaatctgaaaatacctaaaatttgaaactgctctggtcccaagcatttcaaataagggatactcaacctgtatgtatgtatgtatgtatgtatgtatgtatgtatgtatgtatgtatatatgtatgtattttgagtcggagtttcgctcttgtcgcccaggctggagtgcagtggtgtgatctcagttcgctgcaacctctgcctcccaagttcaagtgattctccttcctcagcttcccaagtagctgggattacaggtgcccaccaacacacctggctaatcctcccgagtagctggaaccacaggtgcttgccaccacgcctgtctaatttttgtatttttttttttttttttttttgtagagatggggttttgcgacgttgcccaggttggtcttgaactcctgggcttaagcaatctgccaactttggcctcccaaagtgtttgggattacaggcatgagccaccattctgggccttttctgcacaattctgatactctctgatattctaaaaatgctttttatctgtatcatatcatgtcatttgtttatttaaaactatatcgaaagtgacaggcctatatatagggaagaaagcagcacatatcataaccagctgatttaaaaaaacactgtaatttaccagttgctgaaaatggcacgtctctaggcagttagtcatattgttagtcactttagaatgtgcaaggtaaagcagggaggagagaaaagagggatctgtgcattcccccagggccccatggatttgatcaaattaactttaatcagaagtggcagtttttccactgaaagcttttgagaagacctctgtttgctgaagtgagaaaggggatttctctggagaatgctgttttaactgtgtgctccatttacatttcagcctcccaggttgcatttgtcagttgcttttgggatttatgttctctggtagtgtatattgccttttttccaggtgagctgaagggtcactagagactagagttcttcagtatatgcttacgttgggcaccaaactgagcttctgatatttttgtggttgtggagtatgaaatgattactttgcttgtaaaatgaagtatgagtatgtaaaatggagtatgaaatgcgtatttttccttgacaacaaaattgaggaagtttgtcaagtcaacattggggcacttgactttaaacagttggaatacagaccttatttaatctagcagttgctctactgtctttattttacactatatgagatggaagcttagaaagaaatagctgtgtggtattgattaagccttgccaacacaagaccagtacaagtgttgttgggagatccgctggcttgcggaagaaatggagtctctgcctccttcagtcctgcttggtgttatcacagttattgtttgtatgtgtgatcctattcagttattttcatatttaagaaaacttatttggtaaacctctgaagacgtagctgtttttttgtttttttaatcctgaaaaagaagtatgtattactttccttctgatgataatgtccaggtccataaatcaaaggctctcttttagccttgtgatatttaacaggcctgtgttaataatttataaatgtcaagatgaggcctctcttaggccattgatctatggaaaaagctgcaactttgcacatattatttaatgaaagcttgcattttacatttgctatagatttaatttgggtatgttttgttataaatgggagctaaataataccaaagaataaatattacaattttaataatttgaatatttttaatatgaaaatatttatttttgagataggtcttattctgttgcccaggctggagtgcagtggtgcaattatggctcactgttgcctcaacctcccaggctcaagtgagccacccacctcagcctctagagtagctgggattataagcctttgccaccaggtgcccagctaatttgtgtagtttttgtagagatgggatttggccatgatctcaaactcctgggctcgagtgatctacctgccttggctcccaaagtgctgcgattacaggcatgagccactgcgccagccaaaaaatattatagccttaagctttttcactccattttttacagaaacatgatacttgactttttcttattttggcacttctgttttggagccctttgtttatttcacaaataaatgcttttctcagtaatgaccttctttccaagatcttgacagatgcttgctttagaggggaatcatatttatgttgaaaacccatgacatagacttgaagacattctcttttttattcccaggtaggcattgtcagggggtatgaatttttattagagaatatgttacatggtaaacaggactggagtgtattgtctgtgatatggggtcattatatcatccttgagagcttgttgtaataaattaagctcctggctgggcacagtggctcacgcctgtaatcccagcactttgggaggccgaggcaggtggatcacctgaggtcaggagttcgagaccagcctggccaacgtggtgaaaccctgtctgtactaaaaatacaaaaattagccgggtgtggtggcgggcacctgtaatcccagctacttgataggctgaggcaggagaattgctttaacctgggaggtggaggttgcagtgagctgagatcgtgccattgaactgcctgggtgacgagagtgaaactctgtctcaaaataaataaataaataaatgaattaggctcctctaaatgataaaggttattttattcttgaatgtatggctgttttccttatcaggagggtagaaatgaaaaccttttcttccctccatctgattctagtcattctgtcctccgattctaattactgctgattaaatatttaaagagctttgtttgtttgttttgcagatagaattggtattttaccctgagcaaatagtattaaagattttgtttgtttgtttggtagtaaacatctgatacaaggatgctggcatattcttgagtttttttttgttgttgctgttgctgcatggagacactgtaaagtgtgaagttacaataagattgacatattgattgagtccagaagccaagtatatctgaggctgaataaccataaaggttattgttgacacctgcagtagtaattttaagtgacatttttgaaggtatgcgccattctttgctttttcatagtttcctttttccacttgcagtgaagaaatgtgtttgcacaggagtagatagaaagtgatggaataatactgcattttctctcgttgctggaaacatcttccctgtcattagccagaatttgataatttgatctctttaaattagatttccaggctgagcatggtggctcacacctgtagcccaggattttgggaggccatggtgtgaggactgcttgagctcaggagtttgagactagcctgggaaacctagcaagatcccttctctacagaaattaaggaaacttagccaggtgtggtgatacgtacctgtagtcccagctactctggaggtaaaggtgggaggattgcttgagcctaggacatggaggctgcagtgagccatgatcatgccttggcatcgcagcctgggtgacagagggagacgctgactcaaaaaaacaaacaaaaaatatatttccggagtgagattattctttttttctttttaaaaattattatttattttttgtggagatatgggagcttgctatgttgcccacgctggtctcaaactcctggcctgtagtgatgatcctcctgcctcagcctcccaaagtgctagatagaattttagggatgagccaccacgcccggctgagatgttttttctaaatctagcagctttcccctttctcttacagatgtaatcatatatttctcatgataatgctcacagattttggatccagttttaccttttcatatcacttactttaaaacagtgtgccttcctgagacatataaatgttgctctatttgaattatttcggattcaaattgtggtaccagctaaatatcactagcgaacccattaaatttcattttttctagagttgaactttgttttaaattcatataattagtcactacatgttttctttttctcttttcacatggacattaaaaattttaatttaggccctcagaaatgttaacaaagctaatttttaaatctgacaactctttttagaattaatttacaaggcaagaatctttcaaatagtttttccttccttaattcgttagcccagaaggacctggcaaaagtcatttggacagctggtgtatttccctgtgaaacagcagggggaggtgtttccatcctatgtgtcttctagcgtggaaatcagccaggaaggacttcagcggtttggattttattaaatgcagtatttggtaacatcattaatacagaagttgtccataggcacccgtttcctatgtagacggcttctctgtgaataaaaaagtgtattcttttcagagcatcgtcatgtagtctttccatcattctaccatttcaacttcattggcagtttacagaacgtttttggcctgtccataatattcattgcaaagcattctttgccatcttgaatatttcatccctagtagtttgttttgataccatccagccccatggttattagtacttgtgcactgaggactcctagatttaggtctagcccagagctttctgaccactcaacacatacatcttaatacattccaacagaattcccagtttttgttctctttgcatgtcagtaaatgactgtagttgcttggatttaaaccttattgtcttccttggcctccttttttctcacaccacgtgcgctctgttagccacttctgagggctagaatctgaccactgcttaacaccttcactgctacgaccttgcctgagttgtttcctaaggagccagagggagtctgttaaaatgtacctcggattgttacttctctatgcaaaactccaccatggcttttcccttatttgagtaagtactgagctatctctccatctccaattcttcttgcgctcactgcttcagccaccatgtccctttgctgttgcctggacatgccaggcatgcttctgcctgagtcagaactttgtgcttgcttttctctctgcccagaatgctttcccccactttaaccatgtaacttgcaccttgcttcgtttaggtccagtgatcccttgccagtgattaccttaaattgatgacctctccatggccattgcccagctttattttttttctatagcacatcttatggccaacttacagactgtgtctgtagtaatctacttgtttgtttattgtctgctctctcccccactagattgtaatctctctgaggttagagattgtgtgtgttctggacatagctcctaggccacctagtatgaactcagtaaacatttgctgaaataatgggggaactgacagaatctcctctggagattgatgtttatttgatgatcagtgttataactacatttaagtgttatgttctaggtcctgggacttctcctgccctccctggttagttactagttgctggcatcttaattgagttgttctagtggctcttctgcttttctttttgaatgacatcaggttaacagagagagcagggttaatacatttggtcaacctagaatcacacccagttagaatggctcagacatagaaaacagcaaattgaattttgactgagacttgtgtttttagtcagagccagtttgccttttatcttagacttagagattctaagtgtttaaaagagctgctccgatgagttttgtggttccatttttcctttgatataatttgtacctgtggattagaagtgcattttgaatgcttttgatttttttctataggtgtgaagtgtaattgtattaagttaaatataaaattcaccctgtcatttcctttcatcacacgctgagagcttatgtgccatggttgcaaattactttgaatcttagagctttgcaaactgaaagaaaccctgtccaacttaatctacttttgaacatgctatacagagatagtaagcctgaccaagaattcctgtatattaaagattaccgtggtccaaagaaggctctctttcattctcagcattacgtgaaataaaactctactagtttaattgactgtgtttttacagctttaaaaggtggtttttctcagttgcagaggtaaagctcatccttgtgaatttcgtagccagatgcacctttgtttggctgtagtgaagcctgagctttttcttgttagtttgtaattcagttgctgctgctgctgtgtgtttgtttttaaaacagctttgttgagatataattcacatgtcatataatttacctatttaaagtgtacaattggctgggcatggtggcttatgcctgtaatcccagcattttggaggccaaggcgggcggattgctggagggcaaggcaagcagattgcttgagcccaggaatttgaaaccagcctgggcaacacagtgaaaccccatctttgcagaatacaaaaaaattagccgggtgtggtggcatacacctataatcccagctactggagaggccgagttggggggggtattgcttgagcccggtaggtcaaggctgcagtgagccgtgatcacgcatgccactgcactccagcctgggtgacagagtgagaccctgtcttaaaaacacaacacacacacacacacacacacacacacacacacacacacacacacacacacagagttgagtgcattagaattcacagaagacaggtcttaaaaacacaacacacacacacacacacacacacacacacacacacacagagtttagtgcattttagaatattcacagatactggcaactatcaccacaatcaattttagggcattttcatcattcccagaagcagccccataaccatagcagttactctgtatttacccttgcaaccctaggcaacaagtaatctgctctctgtccctatggatctgtcttttctgtacatttattacaagtggaatcatatagtatctaatcttttgtgactggctcttttcatttagcataatgttttcaaggttcacccatgttgtaacatatatctgtacctcatttcttattgctggatattttattgtgtgtatgtatactacactttatttacccatctgcttgtgttttgcatttatcttttccacttggttttctgtttacagccatgctttgggaaagtgagtttagggattcttttcccctttcaagatcagggatttggtttcatcggcatttggcttcccttgcccttggcatttgtggacaccaggttttctctttagttgtgtgacagcggaagcttccacttgaccccatgaccagagcaggtcacctatgagtaattctgttcctagcaagcttcaggacttgccagtaaacaacagaattttcaggatatttgattatgttctcctaattcaccctcaaacatctgtggaattactgtttcaagcaatactttgaatttgtctagtttatttcagagaacaaagaacatggcagactatagttttcgtaatggtgttttatggattgcatattagtgaagcataattttgcatgaagcaacacagatgcttaaccctttgaaatctctgcaataggcaaataatttgtttaaagcagtagttctcaactgtgggcatatttgctccccaggggatatgtggcagtatctggagatatttttgtagttctcactggagcagtgggttgcgttgttagaatctgtatgggttgaggccaggaatgctgcgaaatatcctacaatgcacaggatagccccccacaacaaaaaattatctgtccccaaatgttaattgtagttcagttgagaagccctgtttagagtgagcagtgtatttcccttaacctgctgagtagaagagacacaactgttggcagtgtacaagctaactgtatataattggaaaagcttcacatttaaaagtatatgaaagcagttatttgtatgaatgagtttgtgtgggttttgttgttgttgttgttgttttttgagacggagtcttgctctgttgcccaggctggagtgcagtggcgccatcttggctcactgcaacctctgcctctcaggttcaagcaattctcctgcctcagcctcccaagtagctggaattacaggcacgtgccaccatgcccagctaattttttgtatttttagtagagatgggatttcgccatgtgggccaggctcgtctcaaattcttgacctcaggtgatcctcctgcctcggccccccgaacatgctgggattacaggcatgagccaccacacctagccgagtttgtgtgttttttaaagaaagacaggattttaaatttttattggaaacctcctggggcacctcatctttgggaatttttgcttcaaataataaagattatatatcgtttcttacttggttttaattgggttgttaattgtagccttgagttttgctgttttgggtacttttgcaccctctgcagtggtcttgtgttttgttattagtatgtctttttggaagaaattgagaagccttatttattagagtcttttaatcttagttctctcagttgtttccccaaagctcaaaggagatgaggaagtgctactatcagcattaaacccagtcctcattaaagggtttattttttgctgccttctgctctgataccacaaaggctgctctttgaatttgacctgggcatcccattgcagttatttaggttccttaaataagccgtatattctgagaatgagtatataaactcttagcaggattgattgagtttactcattaacctcagaggtagagaatcgtgcaggggtatatgtagctctttgcttatgtggttggtttgggtcaggtggaagaactttaaaacatggaaaaactctcaataccacataactttcagataaaaagctgttttatttctgtctgagtttgcagatctgctgacttcatatttcagtgatatcttgcagcttcatctgcaattctctggcatattttgaagtattctctacatcaggttactgtttatgagaatgccttacttcttattcagtgaatacaagtgttagagtgacatttccctttccagagcaaaagccattacgtcttctttcccaggcatgttgatatgaaaggcaacaggaaaggaaaattgatttccctttggaagcaagtcgcccagctgtagggtgcctgtttggttttctgctgcatgctggctgcagctgcttctcttggaggcagggctagcagagtaagatgttcatgtaggtcttccacacgtggactgtctccttgccttgtgttcctaaaggaggatgctaacacattttttggatacacaataaatgcagaaatggcacaggcaaaagtacttgaggtacctcggttccttacttaggctctcagagaatatggatttgaaagtaagtttgtttggccgacactaacaactcttggtggaaaacatctcctactgccagataagatgaatgttcctagactgctcttttcatctcagtagcctggcagcacctttttcacttaacctactgtattggataactcggcttttaaggccatgtcatttaaggcaggatggctttgtggttaagcatataggctctggagtcagctgcttgggttcatatcctaggtctcacacatagttgtgtgagtttggtcaacttgctcagcctctcagtgcttacttttgcattgataagatatacataacagtagtactgactgaataagggtatagctaggatatatgacctggctttcatatgtttttcctgcatggttatttgttgtgtcttttttctctctcagatgtatccagtttggatcataaattacattgtcacctttgttatagtgaagattaaatgagttaacatgtgtaaagtgcttagtgcatattaagtgcccagtgagtgttggctgctttattattttgggggcattccattatcccttccacctgctctacttaaatttactttgtactgctctttttcccctgtagctgctatttaactgaacactctcttaagtgaagttcctcccacctggactgtctttcgccttctctttgcgtctccttatcctactcatggtttatgaaccaaatcaagtacctcttcagttatttattcatgaaatattttctttccccaacacaagtctcatcataatgccctctttactgatccaacgtatgtgtgagagggtgggaaggaagaagaaataatttattattcctctttctgtgccaggcagtgagttaaggaattggaaatacagcaaagggcaaaaaacagtcaagggtcagtccctcaaggaacttctagctgggaggtggagatagaagctaaccaaatcacacaagtaaatgtaaagttacagttgtggaaaatgctatgaagggaatttaacctgttttgaacaagaaagctatcctcaggacgttgctgttgagctatgacttgaaggaagggtaggaggcacctaggccagacgaagagcattacaaagggtaggaagaaccttagcaaaggactctgggtaggaaggagtgtggtgtgttctgggaactgagggagggatagtgtggctgggtgtagactgaaagacagtgctgagagatgaagcgaaaaaaggataagcaccttgcagatcatgataaggatttggatttttaatgtaccaaagtgaagagtcactgacgtattgtaaagtggggattgacataatgtcattagcctttttaaaggaacaccctggctgcagtacagtaaaataattgtaggagttcagaggagtggatttgaagagactaatcaagaacctgattcaagtggtccaggaaagccatactagtagattgaactaagatttgtgatgttggaggtgtttggaggtataagtttgagagaaatttataaggtaacaatgagataatttgttgatgatgggatgtagggattaaagagaggagacaggaggattgcttgagcccaggagttcaagactagcctgggcaacaaaatgagaccctgtctctacaaaaaattttaaaaattagccaggcatggtggtgcacgcagagtatgcctttggtttgggcatgttgaggtacctttgagatatccaagaagagaccccaggtgaacagttttcacatgtgtctgaagctgaaggggagatctggtagacatgtacttgtgtggatcctcctgtgtgtcctggtatctgattggtgatgaacgcattatatatgagattggccaggtagaaagtagaggatgagaaaagagggagtgccccaacagaacttctacactggttggcctagtataagaagtggagggagcagttagataggccctggagaggatcgtgtctagaaagtgaaaggaaaagaggccttccaggagggtgtgtggccagcccctgtcagctgctactgaataatcaaataatgatgaggaaaatgctctcctgaatttgctgcagagaggaaattgcttgagtgggagttgcttcacggaatatgacatggtagacatggtccttgcctttgtggactttgcagttagtggggaagtgatgtaagttaacaactgataacactagtgggatcaatgagggccattttacaggcaggattggggggcaaagagaaggctggactctgggtaggtctgggaggcctcctggaattggagagcagaaacactggagactctgagggtcagtagaaggtacacagacaaaggggcggggaacagtattcccagcagttgggttctagggactgaaggagtgtcttgaggcagcaggaggagcatgcaggaggggtggaggtggaagcagtaggggagaggtgaggctggagaggtgaaggggcagccccataatctttgaaaaggaatagtgggcattgtatgctttaaatgaattgtatgctttaaatggtgattcatatggaacgtgaattatatctgaattgagctattatgaaaaaaagtggtgggacgtcagatatgctggctggctggctgcactggaggacagatgggaggaaggctaaggcaaacaatgttttgtagtcacaaagatctgttagaaagcagttgtattcatctgcatgagggatgatgatggcttgaagtaggtaagctaagattcagttggagcagtgggtccattacagaggtgttcaggatgtgtctggtagactaagtgctaagcaaaaatgcctagagtatggtcaggcatttgaaaaatataagtatgtcttactgtggttgagtgaggaagaattaactggaggacttcgctcactgtatttagtcaaaagtcaaacatcctaacaaatagcctggcttgagcaatggagatgagtagagcttgaggattgggaactcaggagggaggggcagatttccatggataagtgaattttacatgacccaagaggaaatatttttaatttttttcttcatttgtagttaattctccatgatttgtttcttaatcatggaactggatagattttacccccgcccaaatagttaagtttcttgaggataggggtgttttggctacctttatatcttccatagcttattatctaccatagtagatgtaaatcatgactgaaataaatacatattattgatattttacatttgtaaagcactttgcaatctataagtacaatttacatatagtatacttgtgtaattctcaacagcagcattgtgaaataggtaggtcttgtccccttttacagcaatgaaactgcgactcagacaggtagagtgatttgcccaaggcagtgcagcaagcggcagtgctaagaacttggatcttggcttctcagtccagtatccccagttctgtcctgggccccttccttaagcttaagtactgacaggaagtggttttctttttttgttttttaagagacagggtctcactctgttccctaggctggagtgcagtggtggtgatcacagcccattgtagccttgaactcttggcctcaaacaatcctcccacctcccacctcagcctcccaagtagctaggactacaggtctgcaccaccacgcatagctaatttttaaatttatttttcttttgtaaagatggggtcttgctgtgtttcccaggttggtctcaaatgattgcctccttgcctcaaatgatttctccactttgttatcccacagtgctgggattataggcatgagccgctgtatccagccaggaagtggttctcttaaatgagatttggaccatgagtatgactgaaatttttgtgctttgtctgaattggttttgagaagtagtgtgagatgtttgggggtggtgttggcttcattttgaagaggtaagatggtgtttgtagaggctgaagtaacctaaaatgaagagtaattctgtatattggctctgctgaaagctttgattctttcccctagattaagtggggaatctaataggatcaaaaaactgtgaggaatctggccttcagctaaataggtgaagctgccattttttgagctttggcaactgcccacatattcttacttaagatgaaatgatgatgtataatcttctaatcaggaaatgattgagaggaatatacttaaaaggagtcctaagggtactgcctttggaaatgtgtaactcataagtctattttgaatatcctctgcactcaagcgtgagcaataaatgttctcatgagttttaaaagttttgtcaaaaagttgtactcacttcctgggtgatctcattcagtctcatggctttaaaaactaaattattatctccagcctggacctctgccaacttcgactctgtgattttctaggcttcttgatcaagcttaacacattcaaagccaaattcctggtctccccatgaaactcaaacagcagcttcatccatccaggccagatgtcctttttcttttttccctctctctctcacctctcaagtttatcagcacatcctatttatttgactcttacctttaaaacatacaaacatgagactttccccattctctgttgctactaccccagcccttcccagctgctgcttgtcttcccggggtgatcgtgccccactgcgctccttgaggttttatcagcggccagagtgatctccggtaaacagaagtcagatcatgcctttctttgctactcacatccctgctaaagtgtcattcgagtaacttcatttcacttgagtaaaagccagagtcctttccctggcccatgaggcctgccaggatccaggtcctcctccccctgccccttcaacctctgaactcatctctgacctctctccccctttttgtgctattcctgcccctctggtctcctgtgtcttgagtgggcctggctcattcctgcttctggaccttgcactttttcccctcttcaggaatcacctcccttcatgtgtccttggctttctctctaatgctcctactcagggtcaaagccccctcagagaggccttccctgaacatcttgtttaaaattgcagtcctgcaacactgtgtcccccttagatttcccatgtaagatcttctcattaggtatggtgccttttgttggtggtctctctccactgctgagcacataagctcaagataagggcaggggttttatgttgagttttctgctgtttaccaacacctggagctgtaaatagcacataataggcattcacttgacatttgttcactgagtagctgaagcttgttgtaaatctgaaatgtattctacattagattttcttccttttcttatttaaagcatgttataatgtgtttcctgtttcactgggttgggtagtgattgacacagatattttcaatgtttttggctttccgactggagaaaaatagctttgggggcagagtgagtgtgtttcttaaatctgtctgcgtgaatcatcagcatggatgaatgtaggagaagttggtgcctgtgaagagctggagatcctggcagcacaggcagcaggagttcctgtgcaagccagatagggttgagctctgagacagctgcactggaatcctacttcgtgcccattggctgcgtggccttgtgcagatgatctcttctgagttctgtagactgtaaagcgaggatgacaacttctgtccagttcacttcatgagttggaagaatcaaatgagggacttgctctgtaaacctcatggtgctataataaagatgctgttgttgtatcgtctactttgtagatcatttctagcaaattgaagtgacaactctccttctcagtgccatctggttcctctctgggtccctttctttatctgtcacatcattggtatgtgttgatcactgtacactaaggcgcagaagaattataattcatatgctaaacatagaggaaaaaaatatattcccattgagctgtattttagagccaaatgtaaatggtaattggattgacttttgcttagattattaatgttcatacttatctgaaagttggttatataaatatgtcattaatatataaatgatatggtattaattattcatataatttaatatattaatataacatgcagattatgtaatatataaatagagccaactttcagataaatcagaacattgattttataaatatacacatatactggattttgttttatagacatctttattgtttcttgaatttttaactttcttgctcacttttggcagaaacaactctattttctttgtaaatagaaacagtgtatgattttgtagtgagtagtgttgaatgtacaatttggacttactattttttctctttgagtgctgaaaaaatgttttctacacagttttctggagcagttatcttgttaaccccagggagaatgattttttttcttaaagttatcagaagtgtttctgtctgaaactgcagttgcagtggagaggttttcagcccaagcttttcattctttttggactcctagtagacactgatgagttttcagggtcaaagaggaacattttaacaatggtgttagctgatcgttttttgtttgttttttattttgagacggagtctcgctttgtctcccaggctggagtgccatggcacaatcttggctcattgcaacctccgcttcctgggttcatacgattctcctgcctcagcctcccgagtaggtgggattacaggcacccatcactgcacccagctaatttttgtatttttagtagagacagggtttcgccatcttggccaggatggcttcgaacgcctgacctcaggtgatccgcccgcttcagcctcccaaagtgctgggatgacaggcatgagccaccgcccctggcctgatagttttctttctttcatgattggctcgttcatgctctaaacttaagacttgtcgaggaagtagtaggtctctgtattttcagttgctagcactagtagcctaccaggacttgggagtttatgactatctgtttagcagacggttcatctgggcaaaacttttgtaggcagtgataatttttccttttcttgaaatatgtttagaaaatggaaatcctgtttgaaacagcatgtttcttacatagaaggaagtaatctagttttgtgctacatgcgttccttcttctaatgtagcttatgatgcatgattgctccttcatcacctatcttccaaagactaaatactttctattttgctgaatgtctaaggatatttgagatgcttatgaggaggtcttttctggtaagaggtttgacctaagagcgctgcagagaatatatggtaattgttatggttttagcatgaccaaagagaattttcttttttctttctttctttctttcttttttttttttgagatggagtctctctcgttgcccaggctggagtgcagtggcacgatctcagctcactgcaacctctgccacctgggttcaagcggttctcctaactcagcctcccgagtagctgggactacaggtgtccaccaccacgctcggctaattttttgtatttttagtagagatggggtttcaccgtgttagccaggatggtctcgacctcctgacctcgtgatctgcccacctcggcctcccaaagtgctgggattacaggtatgagccaccatgcctggctgaccaaagagaattttctctgcatctgaagcatgtaactgcaaactgatttgtttgtggttgtcaagtaaagaggaccaatcttttgtttgtttatatgcactgtttcctttctcaccctagttgcatgagaaacagaagcttcttagattgatcggttgcctccttttgttgcatttgagcattgagaacaaggaccatgagttttctcctccattgtggttttagttctaacacttggcacatagtatttagtaaagatttgttgaataagtgagatagggtattggggaagatcataagaaaaacaaaagataaattatttatttataaatttattgttaggtctattccaaaactgacttagaaagacaaaattttttcctgctataaaatatctgtaagaactgtgttagcttggagtttgggattcacttttcccattgcagacgcttaaaaacctcaagacttttcttgttgggtttctttttggggagtactttattagggataccatttatagtagaaatctggaagactgtaaaaaccacttaatattcccgaaagatggaagcttgtttctggaagctgttatgttttgttaaggcagagacaatacattttcttttctttattgagatggagtcttttgcccagactggagtgcagtggtgtgatctcggctcactgtaacctctgcctcctaggttcaagcgattctcctgcctcagcctcccaagtagctgggactataggcgtgtgccactgtgcccagctactttttgtgtgtttagtagagacagagtttcaccacgttggccaggctggtctcgaacttctgacctcacgtgatccccctgccttggcctcccaaagtgctgtgattacaggtgtgagccaccacgcctggccagtaatacatctttagagagatcattttccttggaacataactgaaaatggtaggatgaaaagatgtgtaaaatgtaactgaaggtggaaaaatcttgctctgaagctctcactttcgtttgagttaaatattatttttattcttgaaggaagttctgggagtttgtagaagtagccagaaaatatctttagaatatagtgctctatgcgatatcctgagacttttttttcttttcttcttttttttttttttttttgagacggagtctctcgctctgtcgcccaggctgaagtgcagtggcacaatctcggctcactacaagctccgtctcctgggttcacgccattctcctgcctcagactcctgagtagccgggactacaggcgcccgccaccacacccagctaatttttgttgtattttttagtagagacagggttttaccacattagcaaggatgatcttgatctcctgaccccgtgatccatcttcctcggcctcccaaagcgctgggattacaggcgtgagccaccgcgcccggcctatcctgagacatttttgacagtgctgcaaactattactattttttcaggtagaaatattttattttatgttggagatgggatctcgctttgttgccagggttggtcttgaactcctggcttcaagtggtccttctggcttggcctctcaaaatgctgggattacaaggcatgagccgcagtgcctggcctggaaataatttttactacagattctttcctctttaaattaatattatgagttatgaagctccttttgtataataatacccattatatgttgtctaccagggtattggtttgctttttctttaaaaaggagaaaacatgtaaggtggaggaagtgtagtttactcttaggcattcagacagtttttattattggtgtcataaaaaaccccaaaccatttgctgagaccaaaaactgtagtttttaaattttaacacttaatttttctcctgtggcttgtgcgaagtttttaggtgtaaagcatgaataagtaagagattcatttaacaaaacattattttaggaaacaaatatgaaaaagcgttaaaaccattcttttttctctcctagcatttttgaaacgttggggttgttggagtggttggattttccctggaattgagtgagaaattcagaagactgaagcccaggcttactgtctacctttcacggaggcctagccgtgagaggacagaagaaggcacgtggcgaatcatgacagcggacaaagacaaagacaaagacaaagagaaggaccgggaccgagaccgggaccgagagagagagaaaagagacaaagcaagagagagtgagaattcaaggccacgccggagctgtaccttggaaggaggagccaaaaattatgctgagagtgatcacagtgaagacgaggacaatgacaacaatagtgccaccgcagaggagtccacgaagaagaataagaagaaaccaccgaaaaaaaagtctcgttatgaaaggacagataccggtgagataacatcctacatcactgaagatgatgtggtctacagaccaggaggtaaggagccttacgtttgggtcttgccaatgtttacagtgggggaatgatcttggcattatggtgaaataaatacgctttgtacactttaaggaaggcttggaatctagaagagtaggaaacttaatttggtaaacatgtgacccacttttggtcagttaggttcacccacttcttgcttgtgtctgccttaatttgctcttgtgtcctggtttatgcattcatgagttcttttcttattttcctgtgctgcttgttctctaactggaccatctgcttagtatttttttgtcttttgaattcatgcttgctttttaatcttcaatcataaatgagactgtggtgaccctgcagaattgactgcttggtggagacaagtaaaccttaagattcttggaaacaggaaattttaccttgggacaggatcgaccagactctagagaggtactttttaaaaatggcctttaggccaggcatggtggctcacgcctgcaattctagcactttgggaggctgaggcgggtggtgacctgaggtcaggagttcgagaccagcctgaccaacatgatgaaaccctgtctctactaaaaatacaaaaattagctgggctcggtggtgtgcacctctaatcccagctacttgggaggctgagacgggagaattgcttgaacccaggaggtggaggttgcagtcagccgagatcacaccactgcactccagcctgggcaacagagcgagtctccgtctcagaaaaaaaaaaaagccctgaagatcagagatgtattgctcctgctaacttccttttccaaaaatttgagcttcaggctctctaatcaacaataatagaagtagtcatctaacctgcttggttttccagaaaatgtattatggtcacaccagtatattgtggcttatagcattgctcaaaaaaagacagactcaacttttagatgagatcagggaaacaagtgagtcaaaacctgttgaacactagcaaagcctttccttttcatttgatgtattgtgtgtattaagacaccttttttaggctgggcacagtgtaatcccagcactttgggaggcggagacagaaggattgcttgagctcaggagttcaagaccagcctgggcaacgtagtgagacccccatctttacaaaaaatttttacaaattagctgggcctggtggcacacacctgtagtcccagctattcaggaggctgaggcaggagcatcacttgagtctgggaggtcgaggctgtagtgaagcatgattgcaccactgctttctagcctgggcaacagagcaagaccctgtctcaaaaaaaaaaacaaaaaaaaacaaaacaagatcctttcttacagaagccagtaaaacctaggtgaaatcattttgtttgagttacttttactgttgaagagtgacatgaattttgtatgagatgtaattagcagattaaagctgcccatttttatgtttttctgagaaggagattaaaatacttcactgtgttatgtccataatctggaacaatcattttactgaggaatgctgttactgttatgaacttcacgtcaagttccagattttcattctcccacacaggagttttttaaatttcaaaagatgtcagtggggctgggcacggtggctcatgactgtaatcccagcactttgagaggctgaggcggcgggaggattgcttgagtagtgtggagaccagcctgggcaacatagtgagaccgtatctctgcaaaacagtaaaaaattagctgggagtgtgatgagactgcagtcccagctactcaggaggctgaggtagaagaatcccttgagctcaggagggcaaggctgcagtaagccccgttcacatcatagcactgcagcctgtgcagcagagcaaaaccctgtctccacccctcccccccgcaaaaaaaaaaaaagtcagtgctagaacttaatacagacaaatttgcattcacagctacaatttcttggttggagattaactgagaaggtatttgtgtgatataaattgatcagagtggaggttttagagcagttagaaatctgctgtaacgattaaatgatgtgtgtaggttacagtactgtctgtatttatctttgatgtagactcagctattgggcagtaagaatttcttagtgactgaagaatctctcagagttaccacagattgcttgtttagggcgtacgcacatctaaatcatgggaaaggaacaaaacatgttaacccttttttttttttttttttttttgaggtggagtctcgctctgttgcttaggctggagtgcagtggcgcgatcttggctcactgcaagctccgcctcccgggttcacgccattctcctgcctcagcctccccagtagctgggactacaggcgcccaccactgcgcccagctaatattttgtatttttagtagagacggggtttcaccgtggtctcgatctcctgacctcgtgatctacccgcctcggcctcccaaagtgctgggattacaggcgtgagccatcgcgcctggccaactcttttagatatagattacattatgataacttcagtataaggaaagatttacttttttattatcctttctcttgataacaatttaatgtggtaatacagtttggatcactgtcaaaaggcaagctgccttgtgcagtattgaatgctaacctttctcagcatttataatatggaacgttattctggtgtcagtggggacatttcaccaaaaatagtagtcaaatatgtgtggaaaatgctgcctgtacagtctccctcatgagagagtcagaattagtgactccaagaagcccgacagttaaggaaacctctttaacatgaaaaacaccggctatttttcccatttatgggactgtggcaccctgtttctgctgagtatctccctaaaaatagaaataaaccaacaaaccacaaacagtcttggatctgggcacagtggcgtgtgcttttagtctcggctacttgtgagactgaagtgggaggatctcttgagcacaggaggtcaaggttgcagtgctctatgattgtagtgaaatttttacaaattagctgggcgtggtgaactatgattataggaagtcctcctgataatgatttggctgtgtgtcctcacccaaatgtcaccttgaattgtaataatccccacgtgtcaaggtcgggactaggtggagataaatgaatcatgggggcagtttccgccatcatgttcttatgatagtgagtgagttctcacaggatatgatggttttataaggggcctttccacctttgctcagcccttctctctcttactgtcatatgagaaggatgtgtttgtttctctttccaccataattgtaagcttcctaaggcctccccagccctgtggaattgtggatcaattaaacctctgtcctttataaataacccagtctgaggcagttctttatagcagcgtgagaatggactaatacacctcccttcttgagtctggaagaatatgtgaagggagattgctaaggacttatttacagaatggttcttaaagtgcttgggcaagaactatgtatttgtggaggctggtagtgtttcagtgaatctgaaaacctttgtgacatgtgagaaaggtatgctgtctctgaaagctaagtgtattatgaaggatctataaaggccacacatggtttggaagatttccgtggcacccagagcaagacagctccatgtgaggcacccttttgcttgagtgggggctgtgcctttgcatcctgccaggtccagtggatgtctatttggtaaggagactgtctttgaccttctcagtggtttcctttcgttttggtgatggatttgaagctgagttagctgccttctccaaacagctttttctctaaatgagtatttgttaaatattgtctgttctttagggttacttaaactgaagaatcagaagtagggtgctgggctgggcaaggtggctcacacctgtaatcccagcactttgagagtctcaggtgggaggatcacttgaggccaggagtttaaggctgcagtgaactacatgccattatattacagcctgggtgacagagcaagactgtctcttaaaaaacaaaaaacaaaaccaaaaaaaccagcagagtactgtgattagattcccagatgggggttgagttttttctttcctttgttttgtttcctgattttttttttttttcttttgagacagggtattgctctgtcatccaggctgtcagtggtatgatcacagctcactgcagccttgacctcccaggctcaagtcatcctcctgccttggcttcccaaagtgctgggattataggcctaagccactgcacctggtcttttactttcttgatataaactactacaataacatcctttgttagtgatgaaaaaccattatcctcacccacttgcagagatcctgtgtgcttagttgtatcttaaaagcttaggatctgtggagaatgttgtaaaggatatcttcaatggattactagcttaaaaaaaaacagagagtctcactctgtcgctcagactggagggtagtggcgtgatcatagttaaccacatcctcgaactcctgggctcaattgcttctcctgcctcagcctcttgagtagctaggactacaggtgtgcttacacctggcctattaacaatttttttgtagagatggggtcttgctatgttattcaggctggtcttgaactcctggcctcaagtgatcctcctgcctccatctcccaaagtcttggggttataggtatgagccactgcatctggccaaattactagtttttaaatggtagatttttttttttgagacgtagtctcagcctgttgcccaggcttgatgcagttgtgagatctcaactcactgcaacctctgcctcctgggttcaagcaattctcctgcctcagcctcctgagtagctgggattacaggcacgtggcactacacccagctaatttatttttatttatttatttatttaatttaatttaatttttattttttttttgagatggagtctcactctgtcgccaggctggagggcagtggtgcgatctcggctcactgcaacctccgcctcctgggttcaagcgattctcctgcctcagcctcataagtagctgggactacaggcgcgtgccaccatgcccagctaatttttgtgtttttagtagagacggggtttcaccatgttggctaggatggtctcgatctcctgactttgtgatctgcccgccccggcctcctaaagtgctgggattacaggcgtgagccactgctcctggcctaatttttgtattttttgtagagacagggttttaccacattggctaggctggtctcgaactcctgacctcaggtgatccacccaccttggcctcccaaagtgctgggattacagacgtgaaccaccgcttccaagtgaatagatctttaatactcatttatttctatgggatataaagcacaaattaagatttttcaaatatttattgctttctacatctctgaattggttttactactcagaataagtataaattatagggacctctcgaaatgtcactgagaatgagcatagcagggatactttgaggataaaggtaggctttcatataatcatacttttctgtcccaagctatatttaaattgtttagtgtttagaagcatgtgatcttatggagaaattaaatattatttagaatttatcactacggtttaatctcatgcgttgtcacaaccaggtctttttcacctttgctgctaaactctgggattaccttaattttgtccttaggagctcagcataatagattttgttacttacactgcccatgttcccgcctgcctcggggcctttgcacttgctcttctcgtctcggtaacacacttaattcttatcttttcttaagctctgccaccccagtgtcactgcctttctcccaggttagtcaaatacatttccttaataaatactgttatagccttttttgtatcttttcttctagcacttagaacagtaataattttattaggattaataagtctcccttctccaaaaaaacagcaattcttattttcccccactcatcattgaattcctgccatctactgacaatagtgtacacatagtgtgtattccataatatatatacatttttttttttttttttgagacggagtcttgccctgtcatgcaggctggagtgcagtggtgcaatctcagctcactgcaacctccgcctcctgggttcaagtgattctcctgcctcatcttcgagagtagctgggattacaggcgtgtgacaccacgcccggctaatttttgtgtttttagtagagtcagggtttcaccatgttggccaggctggtctcgaactcctgacctcaagtgatctgcccacctcggcctcccaaactgctgggattacaggtgagagccaccgcgcccagcctgtattccataatatttgttgaataaagaaatttctagaaacattaaaaaaaattattgactcattgatgatgttaaaattagaataagacttctggaagtctgttttgtattacttcccaatgaatgatttaacagacttgttaaaaataaaaccaaaacaaaaaccttgtggggctctattgtatattgtccttgagtcagatctaacttctttgttgtctgtcagccattactcctgttttgagatgactgtcacggtaacaaattgatttattacacagctgtgtgcagccagattttccttctgggcttctttagcataggatattgatttctggagtttgctgtaggtggcatattaatttctttctactgttttcagttaggttctaggaaatttgattcctttatttctggtgtaggtagaactggttaaaaaactaacttcatattattgtgagatttttttttttattttggcatattggtattgcttgctatttggataatgaaatgtattttttttttcaaaagtatgtattaattttttaacattttgtcatattaactgataattttgtttgattgtcctatttaccctatagtcctagaatatgtgttccttctactttcatgaacatagtgcaaaacatgtatttatgtatataagtttgtggtttgtgaaatcttaggtgatgcaaaatatttgaccattttatttgacaattttgaggaaaaatgccctggaaactagaattgtttactttgatcacttaagtgttattttcttttgatgcaaatggaatttaagctggaaaaaattcaaactaggcaaaatgaaacctgaggatctagtttgaataaaaatggaatatacgttatttctaaaacctatttaaagtaaatgactataggtcaggtgcagtggctcacgtctgtaattccagaactttgggaggtggaggtaggtaggtagattgagcccaggagttcaagaccagcttgggcaacatggcgaaaccttgtctctactcaaaatacaaaagttagccgggcttggtggtgtgctcctgtagtcccagctacttgggaggctgaggtgggaggatcccttaagcatggaaggttgaggctgcagtgagcagtgattgcaccactgcactgcagcctgggttacagagtgagaccccatcgcaaaaacaggtaaatgatttcaacatgaaacatgatgttgagtggacacagaagagcataatactgtataattccttttatagaaaattttaaaacagccacaactaatctttggtgtttgaagtcaggagagagattgccctatgggtacagggaacagaacattaaggggacccccaggttctggccatgttacgttttatggtactggttacatggacttgttctgtgaaaatttactgcattttgcacttctctgtatatgtattacacttcagtaaaagtttgccttaaaagaaaaagtaaagataacatgcaactattttctaaatggaaaatttccattcaatcaagttactgtttaaagtggggagggagtccccgatattttaacaaatggtcctaacatttagctactgcgtcttcactgaggtctgtggaggctgcaagtggtgtcacatccttagttctctgaatcatcgaaagcttctgtaaggcaattaattactcagacaaacatttccttcccaaaataaaacaaaaccaagatgtggtatttggtgttccaggggacacacacacacacacacacacacacacacacacacatacatattttaaatagaagctcatttgatctgtaactttttatctacatctcaatatttagaagaattttaggtattaatagatgtgacatgcaaatgaaggtgtcttcttgaaacattcatattttgtggtggggtagttttattgataatggcaagaatatttttgtgtaacatagcataaaggcatctttaggcagagcttaatgttttttttccgacatgtgacaaattcagttgcacttattagacctattattaatctgcttaaagcttttcagtgtattccctgttcaccagcaggtttgttcccagaacctggcactgtagaccctctgtgacctagttgcctatctgcacaatcatctttaatgttatttaatcaacgttaatcttatttgggaggaaacacaatgtggctgtgtgttagtatgttagggatgctgtggctgtataacaaatggagtggcttaaacaacagaggtatgttgtcttacagttctggaggccacacatccaacagcaaggtgttggcagggtcgtgttacctctttttcatttctttttgagacagggtcgcccaggatggtgtgctatggcatgatcattgctcactgcagcctcaatctcctgagtagcagggactataggcatgcattaccatgcctggctaattgtattttttgtagagacaaggttttgccatgttgcccaggctgatcttgaactccttggctcacactatccgcccaccttggcctcccaaagtgctgggatttcaggcatgagccactccacccagcctcatgttacctctgaaggcaccagggaaggatctgtttcaagcctctgtccttgcttacagtagtttgctgctttgtggcagcgtagtggtgatctttcatagcattctctttgtgtacatatctctgtgtctatctacatttttcctttttgtaaggatgccagtcatattggattagggctcaccttacttaatgttaactaatcacacctacagtgtaattatattttcatgtgtccttattttagttacattggcaatgatgaccctgttttttttttgtttgtttgtttttttttgagtggcggggaagggtctcactctgttgtccagacaacagtgcagtgacatgaacacggcttactgaagccttgaactcccgagctcaagtggtcctcctgcctcagcctctcaagtagctggaactacaggtgcacggcactgtgcccagctagtttctaatttttttttagagaagggatcttgttttgttgtctaggctggtcttgaactcctggactcaagccaggagtcttgcctcagcatctcaaagtgttgagattacgggcatgagccactgtgcctggccttacctgttctttaataaggtcacattctgagctattgggagtaaagacttcaacatacgaattttgggaaggacaaactcatcctgtaacaggcaggaagagctttgttgttaggtagactcaggttcaggtgtttcacatttgagtgacatctcctcagttctcttagttgtatgtctttggaacagttgggaaaatgtagttcttattttcagtcacattatagtgaacttttagttatggattacattagttaacttttaatttcttctgtttcttttgaaattttatttcatcttttagttgattgccttttcatgtatattaggaagttattcaaattccacgtatgtgaaagacaattctttagcacataaaaacttattacttcgtgaggatagaggaaagagaaaatactaaagttattctaattagagaaatgggaagtgatatttgagacaaattaatcatatcttttttgattttatagggaaaggatcattaagtatcatgaaacctgtactgtagttgttctctgcaccaagcattggccacagattggcatcccatgggagttggttagaaatgcagaatctcagattccgcccccaatctgctgaatcaaaatccatgttttatataataagatgtccaggtgatttaaacacacgtttagatttgagagtcactaatcactcattagtgcttcccagtctttttcaagctaacgcagatataaaatgagtccattgcatgaggtgagaggattagtacccagcatgcttgtcacttacctgtggcagactacaaattaggcagatcaaaaattagagaaaaaatatgtgatttcatggcttgagattttgacgttaaaatatgatgcatgcagttcaagaagaacagaggtggctgcagaattacattctggccaaattattgggaataatttgcatcttctaaagtgcctgattgcaaagggcactgtgaacttggctgtaaatagtaagggagctacaacatgggtgacaaccagttttaaagcaccttctatctactggatttgctttgagtgtgtaatttctagtccttagaaaattcctatacaacctagacattgtttccctgctgtacagatgaggaaacaaagacatggaggccaaagtcacacagctggtttgtaaaatggtatgggcctgtgagaactggttaaagccaagaatgaacggacatttgcataaaaccctgaagagaatacaaaaaacaaataacctgtgtggaagaaaaaagaagagatagactgatttcttcgaaaatgcaagtgatataattactttgctctttttctcttttctccttttactcctaaaattatttatagctctcctgttgccaaaaattgtatgtctagtcaggcacagtggtgagcatctgtagtcccagctcctcaggagactgagttggcaggatcacttgagcccagaagtttgaggctagcctgggcaacatagtccataaggaaactatgggaagtaagctgagaaggtgagtagtaaattgttcaagaatacataggctaatggtgattactggattttgaaccctaagtaactgaaagagaaatacacatttttctatgatctaataaaaagcaagcatgttgtatgcatgaaaagttttttgatgcaaggtggtgtacattgatcacataacacaaagggcaatgtgttgttagagtggctcacataattacaggcttcccccataatggttgggaagctggaaaaaagcctccaaaacctacttggaacgagagcgttcaggtacttggttggcgggaactactgaccgttccaaccacatgctataactggaatagggcccttcaggatcttcctgtccttgctgtcactcagctcaagattcacagttccaaaagagtaaatatagtatgtctaccttgaattgcatgcacatgtcttgtataaaaaaagacagaaacctggattgattgctttcccaagcctgcacatgatggggctaaagttattccccacaatgagcttgggaagcagtttggtaggggaaatagatgtgggctggccatgagaccttgttattgcatatggatatttagcaatagtttgttttgctttgtgtgtgataggtaagtaaatagaacagtgaggtcaatagaatgtgcactttatgctggttcatgtgcaacttttgctaggcaagaggagtgtgaccagatggaatagaattataatatatactttaatggtataatgtgggattgtattttagcaggaaaggaaaaaaataggtgagaatttaaactttcactctggctgttgcatcagcaggagctttctcatttctattgaaaatgaaatgaaaaatgaacacctgtcccctggggttccctccccagagaggcacacgctaacattatgctctgtggcaggttgccctgtctgctgtgctcaccttcacaaaaacccccagattactgcattgttttggtgccttcaagccagcatctgttgttttcatgtattctcagtatcacctttggcagcgtgcagccactcttgggtaactgcctgggtttcttatttcttaagtattgatttttaacaaaatagccatctgatttcagagttgcatagggtttgagtagtctgctttttaccctgtattttacgtaagtcctttcatttttagtgaacatttttgctgaatatgtggtcttcccagtaacatatattgtgttatagcagaaatatctacataagaagcagtgaaccacagtgtgttcaaaaactgtgttccagaggaaacagaaatgttctttaggtggctgtttaaaaattgggctcaataatgagcaaaaacatgttgaaaggtcaatctttgaaggtatttttatgagcaattaatgatcagattcaggaatgcagcctggtgatgacctactcatggattccactcttctacctcttaactttccaccttcctggggccaattgatccagaaattgtttgagcccactaggattttcaattcttggatccccccacctttcacagtcactcacacccatggcatcttccatttccatttctgttgtgtgtctttttccatgctggttggttccagcaggacagggatctttttccccgatgtatcccaggtacttggaaaagtgtctagcacattctaggcacttactcattccctagatacctattagcgcaggcagagttagctgctagatgtgagtgcttagccctaggtgcctctcttgggtagcattgtctcagctgttcttcctttagcagttgagtaggagacatgtgcacagagcagttgatgggaggactttttgggaagagtccttaagattgatatttatatgcagaaatgactgtccagaaggtttacctaggtttaaaaaaattgatattcaatttgttaaagttgcaaattgaaggacactgttacactttttaaaaaattcagcttataaatctcatttataaattaaacattttaatcacttttaagggattttgaattacaaattagtcttgtttataaactcgttaatatcttcaacatttaagcttgcctttactaatttaatatttggtttctatttttaaaaagtctattaacacaaacctcaagtacttaactcttcttataagttaattagacttacaagtgaaacagccctaaaaaattctcttagatgtttcagtgttgtgcataaacttccttaggtttcatcttgaccacaaatctgaatcagttacacagagggagaaaggacagcataatctagtaccccactgctggtgggttaacgtggagtagaggacagcctctgtgcctttgtcttttcatcaataaaatggggataagagtacctacctccagaattgtgatggggattaaataagtatatacacaagcacataggtgcggaactcagaaagggccagtcctatattaaaatccttgttaagtgttactgttttagattggggttttagattggggttacaaggccagtttctaacagaccaaattctttcaactataaaattatttaaaatataaaatatatcctgattttttgacccccaaaatgttaatacgatacttttgattctgttaaatccttctgcacttttctagatcttcacagagataaaagatgtatattaagttaaggaagtgaactgccaccctagttaatttgattacttaatttttaatcctccttggtttgaaagatagttgctaagtctccattatcaaaactccaaaaggggatggctcctggcctcacgtgatctaattctgaatgaggaaagacagtgaattacttaaggtgtcgccatgataaactagggtaaatcatgaatattttcagagatgttactgcctcacagttgtatgatatgttctgtgagtcttattggttggttgtaaaagcaagctgacagccttcagaagaccttctttgttcagcacagaacctggaggtacttgattaattcagtagtgtgtggagagaaacagtggggcaaggagttctttggtttgactctccaagccagatgctaaaatcagtccggaggactgtgacagagttccaatcacagtgcaacaagatttatatttacctagaatctaattggactgagatttcctgcagttatattaaaatcctctgtccttttttcttagtgagcaagcatttgaactcctaagctctggagatttagctttagctggctcaattaattgttaaatgttccccttattataattatacatagatgccttactttgtagtagctaagaaaattgctgaaagagttgtttaatctgttatactctatcagttttgtaaaaagctctgtttaaagggaaactattttcatttgaagtggcatggtggtatttgagttggataacgtaatttaaatggaaatgcaggaatttggctctttttcttgacagagattggcttgtatttgacattgacccatgtgtttgtcatctttccagatattgccttctatttattctgacagcttcaccagctgagaaaaccagactttccaaaattaaaaatactgtctatgaagatggagcagtgtattttgtttgttaaattactttaaaatgtatgtggacaagagtgatttgttgttttaaaaagttttaaatactgcagaatagatggctgtgcatgaattttactttggagctatgtgaataccctaaatactagaaaaagtgaggataaatgcttcactattttactccttccttagtattagtctgagttttataatgcgtattgtaagtaccagagatagatgggagaaggtaagttagtcacttcattcttttaagtgaatgcttaaatgcctggaaatgggtaaatttctagtcactttaccaagtccattgaattcatacataatgactatttgtcattatatatgcattaaatatccagtacctttaagtctttttcattatttcaccattaaaaatgtactcaagctaattaggcatcatagtatatgttacatatgaaagatactccaccactgttcactcatttaacccctaaatgtgttttctgacttacatctctagatttccctattcagttatgtttgcaaggaatgccttttcagttatgtacagagtgatagtgtaatgtgtaaaatgataaaccaaactttaaaaggcaaaggtacagttttatatccctttgaaggctgcaggcattgttctggctttctttgtgttggacagatgttgatacttgacagatggagtgttagtgtctcactgtagactgatcaatagagattcatatagtttaaaaaaaaaagttgggaggggagctttgattatagttatacctctcttttagaaagggaaagtggagtgagtttatgatacagatttttagcataatttcaatatgttgttttttattcttttttttttctgagacagggtcttactctgtcacccaggttggagtgcaatggtgcaatctctggctcactgtaccctccacctcccaggctcaagcagtcctccccacttcagcctctcaagtagctgggatcacaggtgcatatcaccatgcctagctgtgctttttattcttaattttttcattaacattttaatttgggctctatttgtaaagctctgtataacttggctctaaagcaggctatcattattattagacagtatttagtttttagactttacttgtcctggccatcccattgtgctggtattataaaacatagctactgtgcagttaccaaattgattgtggcaatgttagtaatactgtgtataattataatttttcctttttagtagagggaaaggaaatgtcacaaaaaggtctcacctggtatgctgtatttttacatccttaggaacagtttaactgaaaagtagtagtttaattaccactatttcacagcatagaaatacacataaggttttgaagtttgcatttggtaattactctgttagcactcagacttggggagatgatatttcttccttgcaaggagttatataactcagtttctaactagacaatggagacttgatttccagtttattctctggactggctggaagatatttggttggagaaaaactcggagctatctttcagggttataaaccagaatgattttgaagtctgcagcagctatccccaaaatagatatttggcatcatggagcgcaagctttttaaagattgcagttggcatttaggtcaggattggtggaggctggctgttgtagagaccatcagttttgtcatatgttttacttctattatctcccagttgtcaggattctaagtgctgtggcatctgatacatgaacgtacggatttccagcacccttttcagtgttgtttctctaacttagcttctgtaatgattaagcgtggtccatttttatgttctctcccctgaatttacttactgcttcttcttttgccctttgagtacatttataatatttggctatagacttcaaaaatttttcttggctgggcgcggtggctcacgcctgtaatcccagcactttgggaggccgagatgggaggataatgagatcaggagatcgagaccatcctggccaacatggtgaaaccctgtctctactaaaaatgcaaacaattagccgggcgtgttggcgggtgcctgtagtcccagctactcagaaggctgaggcaagagaatggcatgaacacgggaggcggagcttcgcgccactgcactccagcctaggcgacagcgagactccatctcaaaaaaaaaaaaaaaaaaaaaaaaattttttttcgtctatgagtttccttctgcattttccctttttggtgaacaaataatacattttcaaggaataaaattgaaaaatgtggacaagtaaaagttaaaatagaagctacttaaccactgttaacatttgttgtatggtcagttttcttagtgaacgtatatggagttaagctattcgcagttttgtgatgtggttcttaacatgtcctgaatttatttccatgccagcacttgtaaatctgaactgttctggctgctttgtatgccattcatgctgagattcataacctggggtatatggccaaccaaggcaaatttaagggattgtgaacttgggtgaggaaaaaattgcatctttatttttaccagttcatcaaatgtcaaatgacattcagcattcacttcatttatgaagctaggtgataagcacagcaatactggcagtgcctatgacatcagtataaattataggtattctcctatcacatcacatggaaaaaacatctcaaaataatgtttatattccacattactttgaaagtatggaggttattcagggaatgacctctagtaaatcctgttatttaatgaatcaacaaaaaagtacacatattactatattacaagttttttatattatgataagtatttcaatatatgttgctttcgtacattaaaaaatttatttaagaacaggtatatagaatgctaaagtcatccatggcacaaaaaaatatgacatgctcacacgctaatggctatatgccacagtttaactagttctgtgttgttggacttgatgttttccaaatattctccgttctaaacagcagtgatgaatatcgataaatttatttcagctcactttcctaaggaatggaattactgagttagtatgtctggacatttaaaggtttcacacttctttctaaccagccctagtgtatcgtagggctttggcctataaaagtgactgaatttgtagttttgaaattgaagaaatgtccttatgtaactttaatgtcaacaaaaaagagaaattggagaaatgttgtgtcaatagaacaggagactttgtataatctttgaagggtaaatctttgccaccatgagtggatcagacatatttttgtgctcttcttttggtccccgggttaagggtgtggaaaggaggtagagctgtggtatcacagaggatatcgtccttctaatatgaagtaaaatatagattataatctgagaatttaggatagtatgattttggtcagctttaactcttataaataatacaatgttctagaaaatttgtttgtcggtagtccctatatttttgtggaagaacagtcatgtattctctctcaagtcctgatcaaacctgtacagaagtggagtatgaaagaggggagactgagtagtgccagcagacaccatccacctgccctcacaaagaatgccaggcagtctgcaggagaggttaacatcacttattcctacttgtgcaaccttatagtagagtcgtgctaggaacttgacttcactgtaaagtctcttaggggaggaagttgtgactttgtctgctgctaggggttgattcataatcctaggagaaggtaatagttgaatcaacctattttgatcattctaaattaagagctctgtgttctactttttaatgcatcatctgttcctagctttttctgtttaaaaaaattagaatattttccccaaaatatgtgttctggatgccactagggcatctagaaatttaaatttaatggatgaaatttaaatattttgccgatttaaaaataatttataaaaatatttgagtaaagtggccgaaaatactgaactgtgaatcaggaggtgtggattctcggcttggttcttgagctacaggcaaagcttctgttactccattgtatgtggcctccattctctttgttctcccatgctctatctcctgctccacctccagcccacacatttgccttcagactactaggaagagtaagaagagcaaggcttccacttttcaggattcagtttccagaagttgaaatattataggtctgcttatattttatggctaggactttgttgcatgaccgagttagctgttagagaggctgggaagtgtctttattctgagaggccatgtgtccaactgtgtaccagatgttttttatttttttatattttatttaatattattattgttattattattattgcttctttgtttctgagatgaggattcacactgttgcccaggctggagtgcagtggtcatcatagttcactgcaggctcatactcctgggctcaagagatcctcccacctcagcctcctgagtatgtgggactacaagcatgtgccaccatgcccagccttcttaataaggaagaaggggagaataaatattgggcccagctagcagtccctgtttcagagacaaaaaaaataagtaaccattaaaattattgaagatggccgggtgcggtggcttacgcctgtaatcccagcactttgggaggccgaggtgggtagatcacctgaggttgggagttcaagacctgcctgaccaacaaggtgaaaccctgtctctactaaaaatacaaaattagccgggtgttgtggtgcatgcctgcattcccagctacttgggagactgaggcacgagaatcacttgaacctgggaggcggaggttgcggtgagctgagatcgcgccattgcactccagcctgggcaacaagagtgaaactcagtcttaaaaataaaataaaataaaataaaataagataagataagataagataagataagataaaataaaataataattgaagacatacagttgtttccatgtctacctcttatattagattgtgaacttgtcaagggaaggacagtgtttttttcgccttagcatctccagcacttacgtggcacattagtggtgcccagtcagtttgtgtgtgaatgtttttatgagattatgattcttttccttatagaatccttcatattctttatttttaatgtaaccttgacaagacttgcctataagacaaagggtctttcatatactttgtttagaatggggaagtcttaatttttcctcccaaagttctcatacattttgtcttcgcagatgttcaaaacgtaatttttccaaggtacagattacaaaaggagcatgctaaagcaacactctcattaagtgttatattggcctagagcagctgcactcatttgttgaacgaagtctgttgtgaatacggtttcatatagaaagcatccagagcctcttagggcttgaacaataaacagaagctctcgtctcattttaggaatcaagaagcatttagatactttaaatactatgaccttgctgaaatctgtgctaattttgattatgaaagtgacaggtggacagcagattaccagacaaaatcccttacaaccctagaattctttttatcctgagtatattgtatatttcagaaagcaaaatcactgtatcataaggagatggatgattgcaatcataaggagatagatgattggaaattactgtgtaggtggaattgttttttcaaaatacctgttgaatagttgtaaaatgacatttgtaattcacagtgggctgaagatctttaaaggaaaaatgaggtctcaatatttattgtcataggaaagtgtcttgatgttttaaattattcttaaagtatctttattcaggccaggcgcggtggctcacgcctctaatcccagcactttgagaggctgaggcaggcggatcacgaggtcgggagatcaagaccatcctggctaacacagtgaaacctcatctctactaaaaatacaaaaaattagccgggcgtggtggtgggcacctgtagtcccagctactcatgaggctgaggtaggagaatggcttgaacctgggaggcggagcttgcagtgaaccgagatcgcgccactgcactccagcctgggtgacagagcaagactccgtctctaaataaataagtaaatctttattctttgacttcaattagaagaagtaagacctgcccaaacaacagcaatgacaacaaaaacccgaatgaaaacaacaacgatttaagggagagaaggagtaggtatgggtagatttcgagagtcagggaacaggtttcatttgccctttcaagtttatataaactaaagcaaacaattaaatttgaagcctgctgacactgtaatagatttcaagtaagctggtagaatttaatgaagtgtattagatgtcagctatagtattagtagcattttaacaatcagccaataaaacaagagcacagtcttctgtgcctgcaactttgtagaagatgttttatagtggtatggtactgcaagataaaaaaagtagaaaggattttagcccttgatccttcattttgtggggagaaattgctctcatttagggaagtgatacgttagtaataggcattgagtgggcagataactgaatagaacaggttgtaagttggtggcatttgggtcctgaaggttgagcaggattgtgataggacctggttgggaagagcggttgtagtagcagcagcgtgaggatgggcatggcttggtcttgattgaatgtgtctataggagaggagaaacaaagccaggtgagcagactttgcttgctgaatgaaaagggtgtctctgtttttcctttacttctcatctgtcattgtgtgaccctggtggttatagtttggggcagcaaattctgggtccttaccttattactgtttgggtgttgatttgataagttcatttctcttcctcttttctttctttgacagagtctcactctgttgctcaggctggagtgcagtggcaccatctctgttcactgtagcttctgcctcctgtggtcaagcaatcctcccacctcagcctcctcagtagctgggaccacaggtgcacgccatcacacctgggtaattttttttttctttttgtagagacagagttttgccacgttgcccaggttggtctcgaactcctgggctcacacgatccacctgcctcggcttcccaaagtgctgggattacaggcctgagccaccgtgcgcagccaataagtttcttttaaggtgcatctttgcatgcttttttctgctttaagcatgtcttacacagctgtgtggatgtttcctcttccatgaaagagtaatcactcaagaagaaaaatcactcacgggattgttgtgatttctagtaactaacactcagaagtacatttttgtgtgtgtgtgtgtgtgtgtgtctgtgtgtgtgcgtgcgcacgtgcgtgtttaagagacaggatcttgctttgttccccaggctggcacgcagtggtgctattatagctcactgcagcctcaacctcctgggcttaagtgatcctcccacctcaacctcctaagcagctgggactgcaggtgcctgccaccgtgcccagctatttaaaaaaattttttttgtagagatggagtcttgctatgttgctcaggctggtctcgaacttctgacctgaagtgatcctcctgcctccacctcccaatgtgttgggattataagtgtgagccactaagcttggccataagtaaatttctcttaaacagaatatcaatctcagaagcaattcagtatatattaatatatgccatgtgccttgtttgtatatttaaatccatataggatatttagcctacttttaataaatttcacttaatgttgacattgtaactgatttgaaatatataagaaaatcatccaagagtatgtttttaaaaatgtcttttaatcttgaattttgctaacttaaaaaaatccgtattagtagaacatctttccagaatggcaattaaacttttattttctgacattttggttgtatttaagtcctaactttctagaaagttggaggtaaatatttgaatgggaaagaatattaaatgaatatgtacattagtcttaacaaggaaggcttccaagaaatagaagatgcctgtgaagtacaggaaaataattggtgtgggaaattttgtagcttgatgcttggactgtggaacagttgcatttacaaaactgagaactgcagactacagttaactgtcattaatttctttgaatagaaatatgttccatttactgtacaatcaggagccaggcttgaatgagtttaaatagatgaaatctaaattatactgacagtctattaaacagtagcagaaaacctgtaaagaaaatggattactagtttataataaaatcatttgccaaataagaattataacacacgcattgtgaattgtcctgtgtatttccagtgagccctgtaaattggttgaatcatttattgtaaagcccaggctcctagtgcattgttttctgaaaaggagcaagcagtgttgcttgaaatctgcgctgcaggatgtgacaccagaagatcagacgagcaatttgtttgttgtcagccatacggggagagaagaattttcacccagcctacctgtcactgatgatgttttcctataaatactgggcacaatgttctagaagtgtttggactctttgcattgatttcttgaatgtacattatttcagccatatatcagttctcatcattaagttaaggatctgtcagcatttccattagtaatcatcctctacttaatagggttcagagcatagtttttttgggggaggggatgagtcgttaaattgaggatagaattgtcacctgcatttttaagctttaggaaattagatactctgaagtatcaaggggacagaaagagtgagtgaagcctggaagttctcttcctttgtgtctgtggtgccacaagcactacttcaataggtagatggctgtcactgaattttaaaatagatttccccccttggattacttttattctcttacagcacataagctgtatatgaacacaagttttatactagtatagagatccacatcagttaactggaacttggatgttacattggctaaactcactttcatgatagggactcaaccaacacagctgacaaggggtgctatttaaggaacgttttcagagtaaaataaggagatgagagtgcttacagtgttctttgcttgggtaatataagtgtccaaccatggctaatatttagcatatcagtataactaataagatttctgctactggcaggataattttgctttttcttgttccacagagttcgcaagtttgtatagcatatgattgatttgggaagcgggggtcatgcttcatgctgcagcagttagtccaaaacatccacatcactgttattttttatttttttaagagacaaggtttcatgctgtcacccaggctggagtgtagtggtggtacagtcatagctcattgtaacctcaaactccagggcacaggcagtcctctgcctcggcctcccaaagtgctggaattacaggcatgtgccaccatgcctggcccagcattattttttaaagttgggaagataattatctgagatcagtttttaagttttcaatacattgggagatttcctgacttttaaaggagaaaagagaaatgtaggaattttcaacaaaatcccttttagtttattatgacctgttcccctcaacttgtttgttctcattatttaactgtccttgttagcaatgaggataaagacagatgaatgtttgctagaaatatttagtgttctgtgtttagtgaggctttctttgtagcactacttgggaatctatagacatttcaatacatggaatgtaattattatgtttaaaaaagaggggaacaaagatatatgttatctgggatcttttcccaccaagtttagaatccttaagatgatgcagctgattttgataacagttgataaacagagtaagggtaaggactgggaaggcttcatttatggaggtgcacttttcccaatttttgtttccttttccatgtatgtatgtgtgtatatatgtacgtatgtatgtatgactgagtgacagggtctcactctgtcacctagattggagtacagtggctggatcatagctcactgcagctttgaactccagggctccagtgatgctgtcacctgagcttcctgagcagcagtccttttcccttttaaattctccagtgttacagtcaatatgagtacccctcacagcaaaagattctggcaggaaactaaagtaggttacctggcaatcgagttatttcctaaagaagtattagaatacagcatttgttttgttcatattgatagagcgtagcaactttcttgctaggatctctctcttcttttttttttaaaccatgtctctgtttagtttgtttgttcctcatataatttttgagtgtttactatgaagaacagtgcattgtttatagagttgaggaatggtgatgggtttggctgttttatggtttgggagactagaactgggagggtttgttggaggacatgcagtatgccagagactctggattggaatttgggtaccgggatttcagcgttgtttccagcatgcacacacacataacatatacactctttgtgtgtcttggaaaatggaggacatctgttttaactgtagagagatacttgtggattttttattctgcaatattagaccaacatactgtacctcattgactgttacctccaagcattgagggtggaggagtcatgtagaggagaaacagaaagcagaagagcggtgcagtcctgagagtcaacttcccatttcaccgctgtgccacccagcttggtctctgagaaatctctttgtgagaaagtctttgttcatgcgtgctttttacaatggggttttctattggaaattatatcagagtggcactgccatgctttgcaaagggatgagaaggtatttcaaagattaataggcggagacacattgatggaaaggaaaattctttatgaggtggagcagtggctgagcattgcctatatatgttgtgaccacagttttagtactggcgtgtgtggcactgcttgctaaattagtgggtgaggtaagtgtccactctgctctgtaggaggctgtcagaaaagatgctgacaggttctttgtgtttcataatgacacactgcctaatgcttcagactgagatttttacccttgaggggactgtgcttttgctatatttacataaacctgctgatttgctgagggttgaaaaagcagagagggccttctttgccttgagaatctgccttcacgttttggctgacttccttccccagcttagcaaatgctctgttgtttacagatggcacaatagatctttggacatgaagctatgctgaggttgtgagaaacagccagaaatacctctgttcagtatcattgcccaaattacggattttgttgctccctgttcacaaggatttgaggtcacttaatcctgtgatccattcccagacagaggttaggtgttaagagagtaggtctcaacctagacccatggtttcatttctagacatccctagtaaagacacattagttatcatgtgttgtttggactaattgatattgatggtaatagcctcactcatttttctggcccattacaggcatgctgatttgaagatttaaaaaatatatatacttgccctgccaaaaccgtttgctcaattctggtaaatacgtgtttttacatgggtgattctgaagatgtgcattatgcatttggtggatcacatcagctttgtgcagttctttcagaactgctagctttctaataaaaaaagaagtatatgcagtgcttgggggccgtgggagattttcagattgagaatcattgatcctactgactaaaaccaattttataaccagcttcagacatcccatgcactcataaattgcatgaaaatcttgccaaatcattttggctttaaaagattactgggcatatattccaactgagattttaacattgctcttgactacgttcttatctttcccttttcaaataaagcactttatttttgtgctataaacatttatataaattattttcttaaatagctgcttgattaatgagccaaggggaaatgctttttatatgagaatttggctttaattgaaccttgttttgaatatttttaagagtaatataaagtagaatttttttctgtgagacttgaattctaaattgtgtttattttttgttgggtcatcctaatatttgtcagagggttataaagaaaagtttgactgtacaatagttcgtcatgctttgattttaaaaatgaattagacaaatcaggtcaaagcagtgtatttttttccccattcctatggcaagttttacatagtgtgaaacatttttagttcttattactccagtcttagccattctgtgtttcatgactatgtatgtaaagtttttttttttaacagccaccctccagtggcttacaaaactgtaagttttgtcacttaattttgcagtgagcttctctaactttttcatatatgtgtttcaaagtactgatagagctcacttgatgcactcacccattttacagattattaaccttgtgtattggactgtctgatatgaattcatagctttggatcagtttgagttgccatggtcgttttttaaacaaaaagaggtggcttttaatctaaggaaaagtaacagtggtcattccgtatgtccggttgaggatctctctcatgcttatccctcatggcagcatttctcaggccaggtgtgtgaggcagctccagtacaactgctgagaagtgtttaggcaaacagatgtgcttggctgctcttgacataccggcatgttcctttccttccttctctaacagagctatatcctagtgtatttacaggcacttttcttgaatgtaactttgcagcgggaaatgaaagaacataggttctttttcctttttctggaaagcttttttgtatgtaagttagctttatatctcacagtaagatggtgtgtagtaatgatcctatggattatttaaagtatatataaataaagcttttctttgtgtaaaaagaaaaacatgcgtagtctttgctttccaagtgtctcccatttatttcaggtttttttttttttttgagacagtttcactgtcacccaggctggagtgcagtggcgtgatctcggctcactgctatctccgcctcctgggttcaagcaatcctcctgcctctaagtcctgagtagctgggattacaggtgtgtgccaccacacccagctaatttttgtatttttagtgtagttggggtttcaccatgttggtcaggctggtcttgaactgacctcaggtgatccacctgacttggccttattttttattttttattttttttaacccccacactaatggcagacattagtccttggtgagtacggggaaggtagaattgagtacatttctctgagcctacaagattgatagtaattgttagtggacagtgcagaccaccttactgccaaataacttgacaaggaatgtaaattgttaatgttatgtaaaagaagggaggtgttgccatttagttacagaggagccatgaggagttactccatatggaactgataactaattctaaggttggtgtgatcaggggctagtagaaggagagaagaagagttttgcagactgggagcagagttggggtttcttgtagtgaatgcagcctaggggaagatggggtgtggagtgagaccagaccattgaatgcagtaagtttgtcacttgagccttaagaaggtagaagcaattaattagaaagggacctattagttctgaagccagtgagtagtagctgtaagagttaaagaatgaggaaagaaatgcgaaaagtggcttaacagtcaaagacaggctcattttggagaataaaccggagaggggcttctggctgattttggtcaggagcactgtctattacagaccaagagtattacttaaggatttagggcaggagagcttatcacaggcttggaatgtttctgtgtggaggagaagtttattgtggggttggaatgttttggggctgacatctctccagccagaggggacgttatctctgggctggcatgtctgtggtcagagaggggtttatcttaggattggaatgtttgtggttggagatgtcatttgtggtttatggtcatgatgtcattagccattaggctgatgccctttgggttggatttaggcagtttttgatcaaggggaacttgaaaatggtggtgcttgtccaagatggtgatgctcctgctctgtcagtagctaggctatgatggtgttaatgtcatgaaatgtggtatgtaggaagcaacagaaaggagagggcatgttgagttgagtaaggtgagtaaataattgataactagagatctgaaatgctggcagtgggtataacagggactgaaacacaggaaactaagaactttgggttgttccaaaattgtgtaatttggagctacagtttttatctagggaattgagtttcttctgtttttacttgaataccaaggtaggagtatgaaagaatgatctactgtggtgggaagaattctcttgcttgtcccttaagatgattagcatgttaagttgatgttgcctgaatgctgaagcacagttatttagcatctgggaccttggaacaagatagggaaagcttagtcaacagttcattcctgagctactgttttacgtggattcagggattaaatctctgttgagtccatctttgagtagagaaatcagttggggaattctgaatgcctaaatagttggcattgagatttcttctttttctagagtgccttttgggtaggtacaaagatcctgatgttctgcagaaagtttcttggaatgtactcatttgtgaggactttcttcctgatcatcttagttggtctgttggggtttgtgatgactcccaattgctacttctgtgctttttcttcgctctcaacacataagacaaatgagacaatagaggaagttgccagtgttgtcaagcatctgaattattgtaagatacactcattctgaagggtccagaggaagtataaaatgaatggcattatgggctggccatggtggtttatgcatgtaatcacagcactttgggaggccgaggcagggggatagcttcagcccaagagtttgagactagcctgggcaacatagtgaggccctgtctatgcaaaatgaatgaatgaatgaggcattatggtcactattcctagatttcattgactgtgcctttacttttcagtaaataatacgtagactttcctgacctaagctttatgatgatcttaggttgtgatatgggggtaggaggaggttaactctctctatagccactgctttccttaaaatcattgctttttatttaagtgtcttaacatggcattttaaaaagcaaccttggccaagcgtggtggctcatgcctgtaatcctgacacttcgggtggctgaggtgggaggattgcttgagcccaggagttggagaggagaccagccaaaacaaaacaaaacaaaacaaacaaacaaacaaacaaaagcaacgctttacactccagtcattgagagcatcaaaaattattttccaaccactgccatgtcaaatgtaatttaagaaagcacccttcttccctgaagaaaatgcaatttggtttactttattccatctctgattagtggcattggttttgtttacagttagaaaataaaatgtgtttagggtacaatgtaatggcaaattgtctgtaagagattagttttctttctctttttgattagttgaaaaggtcattgtaatagcatgttcaagctagtcatctttgcgtatttcatttatttcctcacaaaatatttattacaaatatagtagcacgtggcaaagccgtttctctttttcgaagacatgtgaacatgtatctgaataagatactcaagatttcatcttgatgtgtgatcttgagcaagcggtttcttttatctaaatgtcttcatctgaatatggataatcccttggactcctccccttcttcttcagggactctgaagaaaataatttaggcttcatcagattctttaaattattagaaaaataatcagaaagaaccaaagggcagttttcctttagcctaaagatatttgcaatttaatatcatcttttggaaaaaatttacaataaaagatatgtgctttgtcatttatttatttatgcagtggctttatgggccctgtctttgttccttaaaggtaaatgccattgttttaaaatttctttttcttttaaagactgtgtgtatatcgagagtcggaggccaaacacaccgtatttcatctgtagcattcaagacttcaaactggtaagcgtttttaatgtgctgttcactctgctctgtattctctctttttccagttccattggctatctcttattgttcctccatcgctgttgacgtggttaccagttcaccttttgagtgctaactgcctcgtggcagtagcactgaaatgagggttactagttccatcttttcagctttgtaacacttactctcataatgcttatattgtaaacaatatttctgaagtttttatccctttagtaacttttgacaatttcagatagtcccttgaatttctgaagtagcttgtttcttctcagccattgttaagagcctgaagtaaagtaaattcagtaaattgatgagtaggggaaataatataaacgggtcagagaatagtttccagtggaaacctgtcacttccttcaatatttcggcaggtgtggagtatatgatgttgaaattgttgtgggggtttcccggggtagcggttgaaagaagtctggcttgggcgtggtaaagttgttatactttctttccagttttagtgcatgtgttgcagaagtaaggacatagctactgtactttctcattaaaaattcttcctgaatatataagtgttgatgttcctcattatgaaatcgcttttttagggccagtggttctcacactttaggctttggatccctggatgtctgcagagatttggcagaggtctgcaaataaacatgctaagcttgatgtaaataaattgatctcacacgtctggacaacgatttttcagcctgttttcagtatgcttttatgatttttaaaaatttcacttatttaaaagcaatacacagttaagaaccactatttgtcgttgttgttgtttgaaacagagtcttgctctgtcacccaggctggagtgcagtggtgcagtcttggctcaccgcagcctctgcctcccggaaacaagtgattctcctgcctcagcctcccgagtagctgggattacaggtgcgtgccagtacaaccggctgattttttttgtatttttagcagagaacagggtttcaccatgttggccaggctggtctccaacttctgacctcaagtgatttgcctgctttggcctcccaaagtgctgggattacaaacgtgagctaccatgccagccgggaaccactgtttgtttgttattttcctcaaacaattggtatttgaaatactactgaagtagtatcatttgggaatcttttgaaacattttgatcttacaagggatcctagtactttgaagattgtgaaccactgtctgtgctcttaggcctagagaattcgtaattccttagctttgtagagatgtgtatcactatctgtgaatgctcttatttccaacaccctttgtaatttgacaatatttgtgttctgacatatgttgtatgtgatatttcagtctaaagaaatgtagtttgaaaagatctttctctgcatctcctttgttttttatcatttttaatggcccaagtaccaaagtagtatattcagtaagaaaaaaaaaaatcacattttatttttctttgttaaaaagttattgcttaagttattgcatgcttactgttttaagatgaagtcaaatgtgctatttacttctaagatggatctattcttgataagcggcttttaactttcctggttgcattgcaaggtggccttgcagtttaatcttgtaaatcaaatgctttctatccagtttttatgtctatatgaatttttaaaaaccatttttagaggtctttgctacttattatatctttccttccaaagtgtgttttttttttttttttttttttttttaacagatacagcactgacacctgaaatacgggtgtagccttattcctgaagagttttgttttggtagtggctgctgctactgcccttttcctgcccattgtctttttgtgtgatttttactaaaccaaacatcagtgcaccgtgaaaaatatatagctgtgaaataaaattgtaaatatttttattttacctattagatcttgagccccctttgtacagtttttgcacattagcaggtgccttcctgtttgaacagcatctcttatgaaatgctgattacaatgtgatagttgctgttctgggcagaggttcctgctgagttacggtaattgctcagggtattaacagcaataaaagctaaagcttctgttgtcagtattggtctaatacaacacattaaagctgtctacaaaaacagtgtgggaagtagggtgcagtatgtttagatacctttttctaaatcacacactgctgtttctcatgtttttgtttgaggttctgtattcagcacatcctcatagttgttgtgtaagaacaacagatgatgaaatatttgctctgggaataaatatagttatttccactttcttattttcttacttctctgtacttattaaaagataatcagatgagaatgatcaagatttttttctccttcagtttactgaagctataagggtaaaagatgagcagaaggaaataagctttgtttctctgcaagattttaagaagaagaagaaattgaatttgattttgctcccagcaaataacatgactagtggagcaatgaaagaaacaaaaacccgatggctttgaaatgttgagtaattaggtattttatctttttaataatcataaaataaaaagttggtttggggttataactgagagatgtgtttcattgtttatactataaatgagaatccctttgccgtggtgaaattttgtgtataaaggatgtttgggcactgtaaaagtaactgggtgaatgcccgttatgatacacattagtaggtacgattacgatgttaaagataacaaaagctaatgaggtgaggcgtggggaggaggagacatctaccgccagtcaccgaggctagaataatggcagtttattgaaccaagggccttgggtcacatttcatgaaatagctctttatgagataaggagaagggtctttgtattttatgtggggacctgggttgtcttctctactctgctgctgcattcccttagaatcgagtctgtggtatagaacacagctgcctctatgtcctgatccctgtctgttgtcctgccagactattaaacagcctcccctttcactctcaaaaatgtcttgagtgtggatgataggttgtgtggttatcttgcctatggggataagatccatggcttctgctttattaatattcaaccatcaaaacacatagggacaccaccgtcctacactggtaggtgtatttcgagcccacacttccacagggtaggtggaggctgtgatagtatcaagcaattaagttcctaactgagctgaggttttaaaggtaggaattatgtattctattaggaagctttcattctcttaggaagtattcatttgattgggcttatttacaaatggagaggtctgattttgtttgaatgcgctgaccaaagtatttatggaagaagtagtcaaaagcaggagctcaggcaagcagaagaggcagggtagaattagggacagcacgtacttagaagcaggagaaagaagtattgttgattaaaaaggtcgcttcgcactgtagatttctgaactaaatagtaaaatagctggcaaagtctttatttagctttttgaaggactagtaatacggaatgacagtctgtgatccttgtggcctggcatgaaaagattaattgagccaaatttcatttttagaatttagagttgagaaactgagagactgaggcagttagtagaggggaaaggtgaatagataattcaagaattacccctaatatatctgtaaaaattaaaaataaaagaattacctgaatgacaagagcaaggttagggctggcataggcaagctcacttgctagggtaggaaactgggaaaagcagaggacaggcaagctgtgggaagagcagcagactgccaagggaagtgtgtgcacagccgtctcttccttgactctcctgggtcccactgcactgatgttcttcccacaggattcttagattatcctgttcgctctgagtaaagagctctcacctggctagcttgagtggctcttcatgaattgcaatggaaagagcctagattaatatctccaacccttctgctgccctcccatagcttttataggtcaccatgtgacttacttacttttagggttttgttctgaatgagtcaatatcattgaggagcattatatcacagagtgcaaatagaaatgttttgagctataatcagggacttccacaggcatttactgaatacctgctttgtgttctttatggaactcagcacctaaagggagactgaagaagtataaaatattgttcattccctcagtgatcttagattctaagtggacagacaacttgtggcattattggatgtcagtcttctttggagaacattctgaataggattgacaagaagggcattcactttagttctaaaagaaatgatttgtttgtttacgaaaaacaataaaatcatatttttatagaaacccaggcattaagaagtataatacaaataatttgccatctggaagtaatcatggagtccgagaatgctaacaaggtcatggagacactaattttcattcagtatagcactgaggagttccttgtatagtaagtagttccttgtagcagttactacctttctttattcacagataagtaagcaaactcagtcctgtaatagtctccatggaaattcagtgtggattcttgcattgctgtcattcatacagtagaggaaaacatgcttttggtttcctaaagttacataggtgtttcagctgttacttataccaaatgagtttctaggtagtatatgtagctataagtactattttgggttaatgatattgattcattttggttccttaactgttttattaaaacttggaaaattgtccttaaagttaagccagatacagagattccttagagttgggggtgatagttagggatgttaaagtgtctcaggtgatggttagctgggctcgacatattgttacggctccacatagatgagaatgccgctgtatcatttgtgtccctaacagcctactttctaaatgctggttctgaatgtggaatagctaaggatgcatactactagttaccttggagaatgcacatttccattattgctgtgaatgtgggggccaagttatttatcgtttaataccatatccctctcgttgtttcattgtcaaatgtgagcagttggaggaaaaacacttggaatttctctcttatgcctggtctgtactcataagttgtttgctactcactaccctttattcatgccttccctgacagtacaacagcagaagggctgcagagaaattaacttcatcttaggttccacttgccattgagattgcccgccctccaccaaatttattttcttaaaaatggattaaaagtaacaagaagctatttctcctcctttgtaataaaaacttactgaggatgagtaattatgtcttattaggaccatagatgatgctgggagatatcatcaggtagcgacttaattacacatactctttgtgcacacattcaagtgtacacacagtgacttaattatcagacttacgcattatcgactgcatttctttagtcccagcttggctgttaccacttagcacagaaggtgtagtgtatggacattcacggaatgggcattcgtttaaaaggaggtaaatcttgcattagagcccttttttggttggggggtgggcaggaaggtgcacataatttgaacatggctaattcagaatttaggatctgttattctgggattgagatgagggatggtagattgcccaggttcagagcgcggactttgacatcaggttgtctgagttcacatactccatccatcagttgccatctttcctgaccttaggaaatacacttaagcctcttaactttctttagttacctgtgaagttgggatataaagtacctaccttgccaagtagattgtttttagattaaaaggtcagacttacaaagtgtccagtgccccatagaatgacactgattgtgatgttgatgtttagttggtaccttaggtttatgctttttattcactgatgtatatattgtgtgcttagcacattggctggctgtaatgtccacagtaagtatttattgaatactgaatgaagtaacatttaactggaataaattcactggataagtatttttaaaaaactttagtagtagttgtttgatacagtgcatacatcaacacaaattaacattctcttaaacaagccaaagaagtctactcaattacctttggttagcctgcagtgtgtaatgtatagaaataataaaactttatttcttttaaaatacttgaagaaaattcagtttcttgttttcttcacgaatttgaatgaatgtagccaaagtcataacattttttaggcatcattatattgttttgagttttccatatgactgactttcagcaaagataaatgagggcctagtatacgtgtgaacctcccagaaaaggccatgtgttatgaaaaatgccttacgctatgatgatttgttcctgtgtgacacatcagttgtttctgtttttgtttttgacagtccttcaaggtaggcctgcaaaattgagtatttctttctatagctccttcttctctttactttcttggcttgtaccatataaaaaggtcagtatcacccagttacacctttgtgacttgttgtgtagtgttggataatgaagtaaaaactttacattaaagttcgttatcaagtattttcagctattatatccaaggaccaagtggccttttcacatacaaatttgtgatttctaattttgtttaattctttaagagttaagaggtaggatggaattcttttttttttttttgagacagagtttcactcttgtcacccaggctggagtgcaatggcacgatctcagctctttccagcctccgcctctgggttcaagcgattctcctgcctcagcctcccaagtagctggaattacagacacctgccaccacccccggctatgtttttgtattcttagtagagacggggtttcactacattggccaggctggtcttgaactcctgaccttgtgatccgcccgcctcggcctcccaaagtgttgggattacaggcatgaaccaccgcatcaagcaagatggaattctttagccctgagtttggtgtactgagtcagaggaggttgtatatctatactcccctcccgccacaattatggagtaatggtgttgaaagttttttgaacgaccacatcctttttgcatgatactgatgtcaacctctagtggacagagtggtattaacataagtggaaatcaaaatgaggccttgggaataaataatcccagcattttgctggccccattttctgagcttgccagcaatttgtcttcactcgtggctgccagtcagggttgggcacttgggattttaagttttagtgtttaactactactgtgaggttgggtaattcattttcttctaatttacttgggtcaagggactctaagaaactattgaaaaagttttgtttaattatatatatttccataaaatatatttctgaaaatgttatttactaaaattgttatctatatgtgaaatttttttcaatgcagaaaactctaggtattctaattttaaaggagcttaagaaaggttgagacaatctgatatttgcagccatctactgtgcaagaatattggtaaagtcttgttcaaacttaattcttttcaattggaaatttgtaatttgtatgtatatatggatgcttgcattaagaaccaactcaatagtccaagaaaaacctgttagaagtactaaaaaaaaattagggaaacagatactgtcaaagttttctcatttcgtatgtgagaacaatgacttgttttgaaaaaatgcctctttaaaatatataaaatgttttaataattacttgaactatttgcatgtttaaaataatgccaaagtgtctggaaatgctttaccaggtgtttttgatttaaaacccttaatttgaatgtaaggatttgagtggtttgggcagtcatattcctagtggaagagattatccagaagtccatttttattttgatgcttctggcaaaaaatattgaatatgctgtacattcaagtgcacaattgaatctttaatttggagtttgcagtgttggtgatggtggggagaaggtgtgtggtgagaaggttgtggctactgacactctgtcagctatactatcactgaggccatgagaatcagagactgactgcacagaaattttagtgtagatcccaggatgtactctagatggtcatctttagaaaaagaaaagaaaatgatcatgataaaacattctgaacattagcttattttcctggtatttgttttgttttgtgtgtgtgtgtgtgtgtctatgtgtagggagcttaagagacttacaaaaatagataatgaaatatattaaaatctttgtttacagaaagttgttaattgctctttgcttttcaaagggaattatgtgtaacaggacaccctaataatgatctaatattaaaaggttgttcatctgtaatttttagacaaccgtaagacaggttcttatataagtattgggattttatggattttttttagttcattcaaaaccacatgaaattggtttaaaaatgttatgtgctgtctaaaatatttgaaaaggaacatactcaaactgttatctgaggtatactgtgctagctttcagaagttgctctatagtcttttttttcctggtttttaaatgttttcaaagttaattttaaaaagacacgtgatacatactaaactagttttgcctataaaaataagtaatgtctttctggaactttatgctctgtgcctattcattatactcaccttgtgggcgtttggagaaaattataactcatgtgaatattgtctttttccctctgttttggggcctttgtctatttactttgccttcagctttatacagttaaacttgaactttgagaaaatggcagggcctttctttggccacccaaatgccctatttccttattaagtacatgtcttatgtctctagcttctgtcattagaaactcttctgaaagctcagtttgtccacttgtgattcattttacggttgtatctgacaccattgcatttctgtttttattataagcatagcatgttgctgttaactgtgctttggcactatctcacatcttaacttggttattttgaggggcacacaccatactgctttatgataggacctggattaaagtgtggagccagaagggtcatacgtttgttcacactgaaataaggtaacagctttgattaatgcaaaaaggttaactttagtggtagaacaaattatctgaggtttcagaggtcatctgctaaagagtttttgcagataccgacttgtgtgctgcgtgcccctaataaccagggcatgatggggcgttgggcacgttaacttaaaactgttttcttttttaggtccacaactcccaggcctgttgcagatctccaactcctgctttgtgtgaccccccagcatgctctctgccggtggcatcacagccaccacagcatctttctgaagccgggagagggcctgtaggggtaaggagaatcccgtttttaaaagctatcagtattttatatcccatagggtataaaataggaatattacctccctccccagagccccttttaaaatgtgctgtattatatgtgtttttaaaggagtaacaagtacatgcacagaggaagcaaaatacgggacttgccttacccctctaggacagttccagaagttagcggggtttggtggaagggtattttggcaccagcagagagcatgctgggctgctgcaaggagcaggagctggcaatcagcagcgagtatggatgttggcaactgaaatggggaaaaaagggggtaagtttgagctcaagtgtggaatgtgcgtttccccaggctcattgggactcatggcccaccaatctaaactattttgggtgttgtcctctcgggtgacattttgtagggtattgctcagaaatagcgaggcttttctccagtgctagatgcagaatatgcccttcaagaggcttgggtcgggctgtagctatacttcttaacggctatcccttggttattcctctgttactagtggtggtcctgagggatgtgtaagaggcagcaggatgaagtatctgtagtgctttatcccttaaaacacagggacccatgtgggtgatcataggggttattatcgtttagtacatctccctttttttaggaaagttcacacttgtcttccttttttttcctgtaatggtaggacttaatggaggatttaatggtagtgttttctgaaagtcgagtatttattattctgaatgactagtgggttaatatgaaagaagtgtagttgcagttacattgacgtcagtgtaaagaagtgactgtggtgccccagttcatactgaattagcaaataatacaagaggatagcaagctctctcacacttagacacacacaatgcaagatactgtcaatatatggtgagttgttcagctgcagtgtagaatattaatatcttgggtcgtagaaaagaaagtgctccagatgggctgtggcacttggggaagttctgtgagggtgggtaggttttgaggagctgggtatgtttttcatacatcaataagaagtggataggcagagtgtaggagccttccaggtgtacatggcagcctgtccttataagcaacgcaggcagtgaggctgacgagtctgggagttgtgagaagatgacccgcaggacgtcactgaagagcacaggttagtggattttgggaggcagatgtggagatataaatggggctagattatagaggatcttcaaagttagcaaagttaagattttgtgtaataggcagtagagagcctgtgtaagcttttttactctaggcaagccatcttgcaggccactgcttaagaagattgactgtagcagtttgcagtgtggaacggggaaagatggtgaaaattccaagtagaaggctagggccgccattcatgggtaagatgaagaggaccaagacagtagagatgatatattgataattgtaaccaaatcaggagtaattgttgcaacagcataacacgtttacatatttgctgatgtaattactcaagggtcataccaaaaaaagggatgggggtttcacattatggaaaccttggaattctctgtcttacagtggaagacagaacccagtgtagtatagataaaagtctaattttaattcccagagaaagactgacatcttacgggacaaattagtagattcccaatgtgactacctacttctaaagcttcagcctttagcaattaccaatatgtcttatttaccgatatgtcttatttccacatatatctaaaaagtaggttttactttcaggctgatattttcttaatcaatgtggatgctattattaatacttttatttactgtaatactcaacaggaattgctgaatggattttaagtcttccccataataacattaatttttttgtaaactttttatattagaattaatgattagtatttattttttagcaataaaaatatttgtgtctactgatgatttaaataagttcatgactggtggagcacttgggtacattatatgtaggtgtaagagattctgtagtgaaaggataaatcttctttcagtcaagatgatgctacataaagctaactgtattgattgttctttaatgatgctttgtgctgccaaagtcatttgagctggatctgaatcagatccagttggcaaagcttccccatatgtggagttctcataaatcctgcaaggcacacagatctaatacagtgtaatgagagagctgctgggagaaaaaattgattacagggttgcagacaatatcattaacatttcttgccatgatacaccagatgtcttccctaatagactatttttgttaatttagtttttataggatagcattgattgcatcataatttaactttctttgcatattcaggtatatgtgatctgtgtttctacactaatgatggaataaacatcagatttaattttgtaagttttaacttatctgttcatttttctatctgctggagaggcaacatttttacttgtactgagaatctgttagcttggatgttttctagtaaaaagtactgtgttcagtggtggggagggagtagtgagggaggtaggaaggcaaagataacattgcccagaacctccctaaactggtcagaaatgattctacccgccagctgatttacatagaaaccacgtggcaccatgacagaggctctagccaaagcaggaaaggtgcaacctttcaaggggacatacgtgcacatttatctccattgtcaagggtgtggctctgcaggagaggactcatgttggctgcacccatcctcttcctcactagaagatcaaggactagtgaggatattagttagttagcattttaattcttttagccatgtctttttgtgtgtttgacctcttttgagtggttaacacacatagtaggacagtattgtaggggtggtttgaactgttttatttgagtagtgtttttttgttgttgttgtttttgttttgagacagagtctcaccctgtcatgcaggctggagtgcagtggcatgatctcggctcactgcaacctccacctcttgggtttaagcgattctcctgcctcagcctcctgagtagctggggttacaggtgtgggctaccacacctggctagttgttgtacttttagtagacagtgttttttgccttattggccaggctggtcttgaactcctgacctcaagtgatcctctcatcttggcttcccaaagtgttgggattacaggtgtgagccactgtacctggctgtgtatgttttgttgttgttgttttttgagacagagtcttgctccgtcacccaggctggagtgcagtggcatgatctcagctcactgcaacctccgcctcccgggttcaagcaattctcctgcctcagcttcccgagtagctgggactacaggtgcattccaccacacctggcaattttttttgtatttttagtagagatggggtttcactgtgttagccggtatgatcttgactgcctgacctcatgatccccccacctaggcctcccaaagtgctgggattacacgtgtgagccaccgtgcccggtgtatggtttttttttttttaaatcattatttttgttttgcattttccattagggaactttttttcttttgacatgtttcttggtaacataggatatgttaattaacctttctaactcttagttttctcacttgtagtatgggtataataataatactatctatgacaaagggttgttgcaaaaattaaataaaataattcattaaatttcttagcaccatacttagcatatagcaagcatacaataagcattgtctattatcctgtaagacttgaattatacaaattctggtcattctttttttatttatttgttttttgagatggagtcttgctctgtcgcccagagcaacgtctggagtgcaatggtgcggtcttggctcattgcacctctgcctcccgggttcaagcgattctcctgcctcagcctctggagtagctgggattacaggcgtccaccaccatgcctggctaagttttgtatttttagtagagatagggtttcactatgttggccaggctggtctcgaactgctgaccttgtgatctgcccgcctcggcctcccaaagtgctgggattacaggcgtgagccactgtgcccggcccaaattctcgtcattcttaatctgaaatccataaagtctcttgaaagttttagagggtctgtgaacatcctgaaactgctggcaaaatcttctatatatgtacatttttctggaaagaggatctttactttttgactatggatgctaatcagtagattgcttaggtgttgaaaataatttaaaagttaagattaaaaacagcgaaggttctgctgtttgtcatttaaaacctcaaatcagcccgggcatgatggctcacgcctgtaatccccagcagtttgggaggctggggcggttcggtcacttgagctcaggagttcaagactggcctggacaacatggtgaaatcccatctctgcgaaaaaatgaaaaattatctgggtgtggtggcatgtgtctgcagttgcagctactcaggaggctgaggtgggaggctcgattgaactcagtcaaaccggtgttaatagagttatttttgctgaagtaaggcacttaccattagtaagtatcacttctaacattagtgctttccatgcttgataccatagtaccatttaagaattaaaaaagaaaatttattataaaatgctcttttggaaatgctgattgtattacgtttgttacctacttgttgcttagaaagaactccaatctggttgcttttttagtggtgcagaagtttagagaggctatattgctttttcattatttactgtggcttccctgctttggcatactccccattaagtatgccaaaaataaccatcgataaagatcatgagagattgctttttatatttgattttagtgaaagatattaagatggctggattttcagaagaattgctaatacaaatgttgggattaatccagctaccctaaatgaaagatgattactagctgtcgacttataatgtaacaaattaagaaagttctgaaagcacccagctgacctataatgccaaggctgactgctactggcatcagagaacccggctgggcctgctttcagctctgttcctttcacctggagcagttgtccccataaaagctaattgtcagttaatttattcctttttttttttttttgggagacagggtcttgctcttttgcccaggctggagagcagtggtgcagtctcaactcactgcagcctccgcctcccgggttcaagcagttctcttgcctcagcctcccgagtagctgagattacaggcgtgtgccaccacacctggctaatttttgtatttttagtagagatagggtttcaccatgttggccaggctgatcttgaactcctgacctcaggtgatctcctgcctcggcctcccaaagtgctgggattacaggaatgagccaccatgcctggcctaatttttgtatttttagtagagacagggtttcaccatgttggccaggctggtctcaaactgacctcaagtgatcttcccgccttgggttcccaaagtgttgggattacaggcgtgagccactgtgcccagtcaatttattcttaagactgtcttttcatcatattcatcatcttttttccaaaaggggcatcaagccgcatttttagatcacaaatatcaataaacctatgcttttataactgcctacgatttaaatgcctttttgtttccataggcatatattagatttaatgatcctttgcaagttttattgagcttcttgttctttcagggatagtgcattgctctttattacttacaggcactgttaggactttcagccctgcctttcttggggtgtttcatgttttggggtttttttgttgattttacagacagggtctcactctgtcacccaggcaggggtgtagtggcaccattctggctcactgcagccccaacctcctgggctcaggtgattctcctttctcagcttctcatgtagctaggactataggtgtatgctacctaaaatttaaaaattttttaaatttttgtagagacagggtctccctatgttgcccaggctggtcttgaactcctggactcaagggatcctcctgtgtcagtaccccaaagtgctaagattacaaagccacttggcacagcccttgttccgtactagttgattgaaaaaatatctgaacagctgggtgtggtggctcatgcctataatcccagcaccttgggaggctgaggagagaggagtgcttgaggccaggagttcaagaccaggttgaactggtcagaccagtctctgaccagaccctgtctctacagaaagtaaaaaaaacaaaaacaaaaacgttaggctgggtgtggtggctcacacctataatcccagcgctttgggaggccgaggtgggtggatcacttgaagtcaggagttcgaggccaacctggccaacatggcaaaaccttgtctctactaaaaatacaaaaattagccaggcgtggtggcgggcgcctgtaatctcagctacttaggaagttgaggcaggagaatcgcttgaactcaggaggaagaggttccagtgagccgagatcacaccactgcactcaagcctgggcaacagagccagactccatctcaaaaaaaaaaaaaaaaaagccagatatggtgttgtgtggctgtgatagtaccaggctctagtaccagctacttgggaggctgaggcaggaggattacttgaactcagaagttcaaggttacagtgagccaagatcacaccactgcactgcagcctcgacgacagagcgagactccgtctcaaaaaaaaaaaaaaaaaaaaaaaaaaaaagaaatatatataaaaacaaatatgcggggcttctcctaggctttatttttagcaatagaattgccaaagacatttcaggccatggaagtaagcttgtggttttacttattctaactttgtttttaggatatcgtagtattttttgatgggaatatcttttttttttttttttggagacagggtatctccctgtgtcacccaggctggagtgcagtggcctgataatggctcactgcagcctcaacctcccagtcgcagatgatcctcctacctcagcctcctgagtagccgggaatacaggcgcctgccaccatacccagctaatttttaaatttttttagagacggggctttgccacattgcccaggctggtctcgaactcttgggctcaaagaattcacctgcctcagtctctgaaagggttagggttacaattgtgagccactgcgtctggccggcaatatcttctataaatatcaaggccttcaatggaagaagagatggtactctttcccaaggatattaaatgtttctaaggactggagtgaagttgaagtaatacacttaaagttaatccttttttagagtctatataaattattatgcctggtgcctggaagttgcattttcagttcttatctttgatctcatgttttacgattagatcgtatcaggtacttttcctatccccttaaaatgaatgtagtttttccctcttgtcccaaaatgtattctctaaatgaaaatttgagaatagaaaatcttagattttcagcctgtaaatagcttttgtgttcttttttaggaactagtaacctattttcaagaaacatgctgtgttaaaggacagaagtgtgtgtcctttaaatcatgctagctgattaaaagtttgttactctattcctcccaccttttggcttttccctcctcatcccattgacattcttaagatggaaggaaaaaggcctattttttagcttgattaaaacttaatagctgaagtaaccaaaacattcataaaatgaggagattgaaactgcttacagatataatttttctctggagcatcctaaatatttattccttggtaatttttttttaaagtatgtatattagtactactagccattagtaaattttagttatagctttcctccctttcacttaaatttcctggaacataaattggaaaatttttaaaatttagaatctgtcttgaattttttgaggtgacagctaggtagacattaaaagtagatagaatttttaaatcttgaaaatagaaattatattaaaaatgttctttgtcacctgtatctggaagtttgaaaggtcgtgtaatttcaaccatattacatggtaattggtggaaaatagttggatactagcttcacctatgtaatgtaaaactttggtattggctgggtgtggtaacccatgcctgtaatctcaacactttgggcggccaagactggaggattgcttgaacctaggggtttgagaccagcctgggcaacaaagaaagaccttgtttctacaaaaaattcaaaagttatctgctacttttagggctgaggtgggaggattgtttgagcccaggaggctgaggctgcagtgtgctataatcatgccactgtattccagcctgggtgacagagtgagacgctgtctcaaaaaaaaaaaaaaaaaaaaagtttggtatttaacacttaaatttgttttctgctgccagtaatggagataatctattatcactttttttaggggttttttttttttttttttttttttggagatggggtcttgctctgttgcccaggatggagtgcaatggcatgattttggcatgatcacctgcctcccggattcaggtgattctcctgcctcagcttcccaagtagctgagattacagtcacgtgccaccacacctggctaatttttgtattttttgtagagatggggttttaccacattggccagggtggtctcgaagtcctgacctcaggtgatccacccgcctcagcctcccaatccaatcaccctgggattacaggggtgagccaccgcacccgtcctttagttacctcttaaagtaagttgggaaggccaggctcagtggctcacatctgtaatcccagcactttgggaggctgaggcaggtggatcacaaggtcaggagattgagaccatactggataacacgatgaaacctcatctctactaaaaatacaaaaaattagcagggcatggtggcatgtgcctgtagtcccagctacttgggaggctgaagcaggagaattgcttgaatcagggaggtggaggttgcagtgagatcatgccatcgcaccccaacctgggcgacagagcgagactccgtcttgcgggaaaaaaaagaaaaaagttgggaaagagttgatttgtcctgtttttcaagggaataactgtagatttcactttactgaaattagttagagacattgttatattgactgacaagagatttcgtggtacaatttcccactgatccattaggattacaaaaaattatcagctgtatgggtggcaaacacttttcttcagatttttcttcagtaagataaacctcaattccaagcatcacagattttcttgaagcagaaactgtgccttacaaaagtttagcacagaagcagatgttttatgtagtagtggaagggtttagaaattgttgtgtggtcagttgtttggacttcagaatgcatttctctataaacataaacaggtttttttttggcaagttcgtaaatgctagtttgaatttgtaatgtagagaaatacagaaagatcgttcctttattgcccaccttacagatatgtggacttccttccttccttccttccttccttccttccttccttccttccttccttcctccctccctccctccctccctcccttccttccttccttccttccttctttttttaaactcctcagcttgctattgactggtacctcctcttcccccacaacaaaacaaaactgaaaaccagccgacctcctctgtgtggagatggagctctgcctctgccctcctttcagaggcctctgcctcatccttttccatttcctatcccacctctacctcttaacacgtctcagcctgctgtctattctttttagtttttgtttttaactttctatttgaaaataatttcagacttacagagaagttgaaagagtagttcagggaactgcagtatacccttcccccagatcatggaggtagttaaaaaacctcacgtttttactgttaaaatcatagtatcggtttgaatcatgttggttacccattgactagttgtacgatcaggtgacttaatctttcagagtcccactgtcttcacatgtaagatgagaatactgattcatttgttccagagtcaaacccaggaatccatactcctttgaagcacttctcaggagattctgatggatggccagcattagcaaatgaaggcttgtccccaactccagtaactagtgtaaaagtagatctgatcttgtcctttgcagcatgtggaacttcttcttttttcttttctttttttttttttgagacagggtctcgctttgtcacccacctagagtacagtggcatgttcagggctcactacagcctcggcctctctgtctcaacctcctgagtagctgggactacaggcacgggccaccatgccctgctaattttaaaattttttgtaaagacagggtctcctccttatgttgcttacgttgaggatgtggaacttctgatgcagttccagggtctttcatgtttttgaaacttgagtatgtttacttcaaaaatagtttttgtgttcttctatattacttaatttcctcccttccccaatacacaaattaggtataatttgtgtgcttatatccctaatgcagctataaaaggcagtttataaattaatttcaaaccaaactacaaaaccaataaagttctgactaccaacattaatttaatagactgggcgatgatgttgtgaaataagtagccgcttgtgatgtaactgttactgcttccttatggcccatgttcttggatgctgggatggtgcctggtttgtgtagacggctggattccttgtaatgactcggttttcctgttgcttttctttcagttattgccactcagaaaccatcagtgtaaatacagcttgccatgaagtgactttgcctttgtttggcataaatgtgcccttggcacattgaggccatcttgtttatttaccagcttgtgataattatggtagtactacttagttatatgtaaacttagagccaaaatcttgtgcctctgaactctattaatgaagttgtaaaacatgtaattccaaaaatggatgttaaaaatattaaggtatacattgaaatgaaaaataaaagtgagcctctcctctccacctcccacttccagtcatctctcgcttctgcctgagaggcactgtcagccagcatcattctcacatcatgcctctgtacgtgtctgtcctcttagctagattaagagaaggggctgtgtttcattcacctttttgtccccagtgtctggaacagctcctggttcagagaaattgccccctatccattgtattgatagtttgttttaattacaagacagaaaagtcagattgattttttttttaatcagatgaagaaatatttcttttaaaccaataaattaaatgcatgggactgttaacacaaaggatagcacttaatactgtcaagagaaagattggccaatactagccagaaaaatctgctgtgtgtaagttttttggttttgtttttgttttttaaaacggaagtgactgttgggtgtctctccaccttgctttctacctcccttgtaaaggagaggggcacgaaaccaaacaagtattcctggctatagttttagtaattttagtgggtagacatcggtatatagctcaagtttagtttttttttttttctttttttttcccctgaactattggaattcttatgggcttctataacttataaaacatatacatgcatataaattttccagtgaacatagcgtgaggctgttttattatgttttcttttcctttttttttttttgagatggagtctaactcttgtcaccaggctggagtgcagtggcgcagtctcagctcactgcagcgttcacctcccaggttcaagtgattctcctgcctcagcctcccgagtagctgggactacaggcgcccgccaccacgcctggctgatttttttgtatttttagtagagacggggtttcaccatgttggccaggatggtctcgatcgcttgaccttgtaatccacccacttcggcctcccaaagtgttgggattacaggcatgagccaccgcacccagactgcttttcatttctttatgtttggccattatgtaatgctgatttttggcctttcgaatttttattagagagaagggtactgtgcttttacaacaggtaaatgattgccacacaaagggtgcacttttgttgtgaggctgctgcccttggttgcagcctacagacagtgaagtttctcttcgatgcctgattagaatggagagcgctgctgcactgccatagggccttgttaacgatggatagtttggatggaaaggcagaaggacctaaaaaggcagctgtcaaatgccttcggttctctctaatagaagatgtgtgtctgtgtgtgtgtttgtgtgtgtgtgtgtgtgtgtgtgtgtgtgtgtgttgaccttggacatgatggcagttgggattaaggtatctcaatccaaaggatcatggaaggaagatgtgtgtgtgtgtgtgtgtgtgtgtgtgtgtgtgtgtgtgtgtgtgtgtgtggtgaccttggacatgaaggcagttgggattaaggtatctcaatccaaaggatcatggaaggatgtttgggaataacatcttaaggcaaattaccagcataaatgattgctcccacctcccactctcaaacagtcttgtcaccacagtgacacccactgtcacgtggtctgtaccccccactccctggaagggggtactaattattcacagcaacagtgataatggatagtagggtagtgtaactggattggggaacattcctctcagtgatgtagtttgatttgtacttgaattaaaaagtattggcttggccaggcatggtggctcatccctgtaatcccagcactttgggaggctgaggagggtgggtcactggaggtcaggagttggaaaccagcctggcccacatggtgaaaccccatctctactaaaaatacaaaacagccgggcatggtggcgcacgctagtaatcccagcaacttgggaggctgaggcaggagaactgcttgaacccagaaggtggaggttgcagcaagccaagatcacaccactgcactccaacctggctgacatagcaagactctgtctcaaaaaaaaaaaaaaaaaaaagtttgggagaccgaggcaggcggatcacaaggtcaggagatagagaccatcttggctaacacggtgaaaccccgtctctactaaaaatacaaaaaattagccgggcatggtggcgggcacctgtagtcccagctactcgggaggctgaggcaggagaatggtgtgaaccctggaggcggagcttgcagtgagccgagattgcaccactgcactccagcctgggtgacacagcaagactctgtctcaaaaaaaaaaaaaaaaaagtattggcttgttttcagtgtaattttttctgtgttttgagtacttttttagtatttaaagatgcagggacacttttgaattaatattactgctaactttagtatttggttaattttctctggaaggtgggggactttctgatcttcctatgtcaggataaggaaataatgactgatttcgctatcacttccccctggctttttcttttgttactggcattgtcttggatatattacaaatatccacagatgtccagagaattggcacagctattattatgattttcaatctgctcttaagatactgagcagatttcttaacaaacaagttggaaatgcacaaagatatctgatgaattgttaaaaaattcttaaagaaaaacagctggcaaatggtaattgatagatagatgtgtttaatctgtaggacttgaagtgctgctatggtgtattagtctgttctcaggccactaattaagacatacggagactgggtgatttttataaaggaaagaggtttaatggactctcacagttccatgtggctgggtaggcctcacaatcatggtggaaggcaaaggagaagcaaaggcacatcttaaatggtggcagacaagagagtttgtgcagggaaactcccatttatgaaaccatcagatgttgtgagacgtattctctaccatgagaacagtgtgagggaaaccgccgccgtgatccatttatctccacccagcccccgtccttggcacgtgggcattattacagttcaaagtcagatttgggtgggacacagccaaccatataatatggttactgtggtttaagtaggcagacacatctgtgagaccaggagtttctctacaaatggatgaggaatggcacagaatcctaggtgacagtttaaggattgcatggcagaaaaggctctgtgattaaattctctgatgttgtcactgagctgtaaggctggagataagactgtctccttctgctgaaaataagaatcaatactcactccttgatgggctaaactattaaaaagagcccttcttacaatgtttcattatctgggatttgcctcagctggtgatttgttggtggcacagggagatttgtgaggcatttcatattaaaattagtcagtagccggtgaatccctttagataattctcttccgttttacagtgctcctgaatagatttgtgatttatttttgcctaagtagctttgtgtttttttggaattattaaaagagggttggacatctatacactttttttaaccttgtttttcctcatattctctgtgtttaacagtttagtattggccttagcaaaaaacatcaaatatatttgcgtggtacattgacctgacacttgattaacacacgttgaacttgatgtttttcccgtatgaaggaagttatacaagaagttggccttgcttttttcgttgattttaaccgtggacagggttggggttgttaattgttaggtggctggtaggatttcagctcctcgattgaaaaagaaaaacagcccatctcgtgaacctcagtgaccaaaagaaatggtcactgtgtcatttgggtgcttgttgtgtctcatcccagtgtagtgtgatggctagggagcaaagagaaggcgagcctctgagggtgacccctgccccgctgtccgccaggctgggagaagttctgcaggaggtcctgtcatgggcagtgcttactgggcttgtcagttggaacagcacaattgcagtctgctgggggatgtttgcagccttctgccttctgtctaaggagagttaagactctctacttcagtgttttgaagtcagtgctgtggtatatttacattctgctggtggagacagtactgttcatgaaagattttttggttcagcctcaggaagagtatgggcaaagctgtgttagaagacgttgatctctgtagcaaaaccatgaggtgaggctaaagaacagtgtaatctcacatttctgcttccctgaaaaactcatcagatttaaaaatccttttctctggcatggaggggagagggttgagtgggaagggagactgattaacaaaggacagagagagacagaggtctttgaaatccagatggtcgacttctagtaacagagcattggatgtggtttctgtgtgtggaatccagccctggtgggtgtccagctgccatgagaggctgtggagtgagggaggaccgtcctggaagaaacagagtcaggtctggttcctgtgtgagagtcattggagagacccgtgctgcctcagaacggtgcaacccacccagcacccagctccgtgacgttgcttctgctggagggccgggaatgcccttcacatcccacctgtcacctgctggaatcagcgccatcttctcataggtggttaactgttttctcttctctccagtgtgttcctggttggatgtttcctgtttcccctaccagattcacagctcgtatgttcgttcctgcttagtccatgggagggagtctgggagcaagagcgaggtggcagtacagcaggctggcttgctgtacgctttataattccagcgaggaaatctttcgaatacacacttgcattctgtcacagtaatgtggagaacacatctagggttttcagcttgttttattcagctgcctggagtagttaaaatttttctgagcatattgcttcccccaaccccatgaggcgggaaagagatgtttagagacatatttctcttttaggaagaaatgcagaaccactgagacctggacaactgttggtcttattttctgcttggatgagataccttcctgctatttcttaaggaaatatagttatccatcctcacagtcacagctgaataccaggcagttggttgagtagtgagttcttctggaagatggacgggaaaactgtcaacaggattgatcattaaaaaaaaaaatccagtgaaatgtttatttaaaaaattaattgaactcccttgcttttagagacttgactattgtccagatcagatcttgtttcgagtgtgcacattcatatataacagggctgtgaatcagactgggaaagcctgtgctgcagacattcttccctccccatgacagcaaacacaggacagggggttcttagcacgttgtcagataaattcttttctatctgcgtgttttaattatggaattttaatgttgattttcattctgttttccaatcccatatattttttccttctcattggcttattgtgtgggttatcatttcagtgacctggtttgacaagaggcaacacaaatttctttgagaattcaaatgtccatttaaaaattagcatcaggggctgggcacagtggctcacacctgtaatcctggcactttgggaggctgaggcagcgggtggattgcttgagttcaggagttcgagaccagcctgggcaacatggcaaaaccccgtcactataaataatataaaaattagctgggcatggtggcacacacctctagtcccagctgcttaggaggctgaggccagagggatcagttgaacctgggatgctgaggctgcagtgagccacgatcacgccactgcactctggcctgggtgacaaaggaagtccctgtctcaaaaaaaaaaaaaaaatcagcatcagtacaaattaaatgattaagcatttgctgttttaactacatatgagagagataacccagttaacttttccttttattggctcgtgccctgggcatctgtcatgttaatgcttttgacctttcttaaagattattaaaggtgaaatttcttgcaggtcagggggatttgtacttgaacaccaccaggtaccttgtggcagcgctgtttccaaagatagacacgctgtgtggtaaatcttttcagttaattcattagagaaaattgttttctggccaggtgtgttagctcacacctataatcccagcactttggggagttggagatgggaggatcacttgaggccaggagtttgagaccagccctggcaacttagcaagaccttgtctctaccagaaaaaaaaaaaaaaaaaagccagacatggtagcttgtggctatagtcccaactacttgggaggccacagacaagagaattgcttgagcataggaggtccaggttatagtgagcttatgattgtactactataccccagcctgggtaacagagcaagacccttagttaaattaaaagagagagagaaagagtaatttattttcctacagactaggtttgtctgtaagagaaaatatcagtgcaattcactggattttaatgtcatattctgacttgtgtctgagaaactgattggagatggtttgtatttgggtcaactttttaaaagacaaatcttatgtctcatgaattaagactacatgtgtatacacagcaaagtgtttatgaggcagaaagcttgctcctaccagtttctagaggagagctatcctgttttttgctgctgctcagccagctgattctgaacattcttactattggttatttttgtactcagggacagcaagcttttcctattaggggccagatagttttttcagttttattttctgtatggcaactactcaacttagccatagacaatttgtaaacaaatgagcatgactgtgtagccgtgtttcagtgaaactttattttactgaatcactttatttctagtggatcagtagagtccaggtggtgtctggacatggcctgtgggcctgtagtttgctgaagcctgagctggtataaacttttggggattagtgccctgaaggagtcactccaaaacttacttgctttcttcattgtagccttgtgcctgtgtaaggtttgagggtcatttgcagagttagtgggaattgcatttcttctttcctatattatttgagttgatgcatccttttttaaaatatatctatatctctaccaatacatccctctaaccactcctccttccattaattgttttttgtatagtgtactagtggataggtattgtaagaactcatttttactaatgatctttaaggatttttataacatgtttaaatgctaggagcaattaaatattgcttaaacatgctttttcatcttttttctttggcagtttgtttctgaagggaaaatatgacaggaaaatatgtacataataaaatacaattaaaataatacattaaaataaatacataaaatacataaatacataaaaataaatacattaaaataatacataaaaataaaacattaataataaaatacattaaagtttgtctgaatttttcttgtgtgtgtgtactttttttaatgttgtaacaaaatattcaggacaacagaaaagtttttattggtatttaatgataaatataacttttctgtttaatatttaacagttaagtatggatatggacaaatgctttagcattttttttttcagatgaaataaaatggttgatacccacataggcaaagaaattttacccaaagaaaagttagtccacagtcacagataacatggtagatccaaaccagcagctttttttttttttttttggacacggtcttgctctgtcacctaggctggaatgagtggtgtgatcatagagcactgcagccttaagctcctgggctcaagcgatcctcctgcctcagccttttgagtagctgggaccacacaagcacatgccaccacacctggctaattttgtaatgttttgtagagatgaagtctcactatgttgcccaggctggtatcaggctcctggcctcaaatgatcctcctgccttggcctcccaaggcactgggattaacaggtgtgagccactgtgcctggcccccgcagctttttaataatatgcttttgctcatcagggcctcctggaagtgagtggggatggctctctgccaaccttctttaccatcaaaagaatggttcagagcgcatctgattgccagtgattctcagaagtcttatttatgctaaaggataatatgttactattaaccatgacattattattcaaactgtcttaaacattattatttattaatagattgtatttacatctagtattagttgagactatatgttatatgtagaggctcaaatgttgagactatattgtagtatttgctcatagttcacttgctatattgctggctaaattattataaaaattgtctgtggtttctgcgcctctgtctactttcacagatgctttgttaccactgtaaaatgcagtacattctcactgtagccattaaatctgattttatattaactagttgactgtgacatttttgttgtatctttctacccagtggcatacacattttatgtagtttgttgtaagtacacacctctgatcatttacagcgtattttatgtacagtcgtgatgagatgatttcacttcatggagaggtgagttgttttggaaagggtacctagctggcttttgtttgcgggtctatacttgctggctgtgttactttagacaagctatttaaccttttaggacattagtttccatagctgtcaaaccaaaataatacccatgctacatgcttcatagggttattctcatgtgagaataaaaagcgataatgtagtgctgtgacatttttgtagtggtctgcaaaatgggagcgtcagttgttgttcggattggctgtttattatataaccccaaatcgtagttgtttaagataaacatctatgttctcatataaaatgaggtgttttcagggtgtgctgccccgggttggtagagtgacctaaacctcaggtatctagtctcctcctgtctgccccggtgcatggttttcttctcaaggtctcgccatggtcccagatggtggctggagccacagcccctaaagtccatgctctagaccagtgctattcaaatggtggctcaccaataggactgtttgctaccagtccaccaggagatgaatagagaagctgaaagtatctgtttagaaacttttctagccgtttaacattgtaaaaatcactgctctgcagtggattgtgggacactggtcctccatcccagccaggcagctgaaggagggtgtattagtctgttctcatgctgctaataaagccatacctgagactgggtcatttataaaggaaagaggtttaattggctcacagttgcacatggctggggaggcctcacaatcatggcaaataaggaggcaaataaggagcaaagtcatgttttacatggtggcaggcaagagaacgtgtgcaggggaactcccctttataaaacaatcagatctcatgagacgtattcactatcacaagaacagcacacgaaagacccacccccatgattcagtcacctcccactggctctttcccacaacacatgggaattatgggagctacaattcaagatgagatttgggtggggacacagctgacccttatcagaggggcacacagcaaaagctattttaggcccattccagagcttttccagtagccgtgcctaacaactttggtttactgtgctccagtaacgtaggtgctctgttattatggaaaatggggagaatggacgttgaatggggaacaagcactctctgccacagttggacatgtctgaaaccagtcgcaccattcagcacagaatgagatccacaaacagcccagttcctgagtagtaatgaccccaaggttgtagccatttcttgggattaggagaactattgcatatctcagatggaaaaacatgtgaagaataccaaaacagagtagaatgatagaagagattacatggcgattgtaggtaagaacagtttcaacacgttttacatgtatttgtattttaatgatttagaactaaatttatgaattgaatttctgttcattttcttaaacaaacatggattatctccacgcaaatatgattaagtttgattctcctaggatagggtgtaaaagtagaactctgcgcaaagatgacttttttcttttgagatgggatctcactatgtttcccaggctagtcttgaattcctggccacaagcattcttctcacttaggcctcccaaagtgctggaattactggcgtgaaccactgcaccagccaaagatggcttttaaaagatttttttttaggctggatgcagtggctcatgcctgtaatcccagcactttgggaggccgaagcgggtggatcactagagcccaggagtttaagataagcctgggcaacgtggtgaaacccgatctctacaaaaaagtacaaaaattagccgggcatggtggtatgcacctgtagtcccagatacttgggaggaagaggtaggaggattgcttgagcctggggaggtcgagactgcagtgagccaagattacagcattgcactccatccagcctgggtgacagacagagacggtgtctttaaaaaagaaaaaaaaagtaccttttgctggtttggaagggcaggagcctgttatgtcttgcatgtaaatgcatttagggtggaagtgtagtagggagggttttaaagacaagttgctaaacatgaaatggcctgtgatttagttaaattgttgatgttttcagttgtatttctttgttccttttcattgaggagggaagtactgtaaaatgtctttactgtgaaggtactacttcacattagcattacagtgttttttccttctataaaaatctttgtttcctttcagtgtgttaagccaaagtttattaaaccctcaccttacgtatcattttatagtaggcacctttagaggaagggattaaatgaatggtagcagcatctttaagacaggatctgagttctttccctcagcatgtgcagatttctgtgggaagggcaggacatacgttagatgtgtttcacaagaaagcagtgcatttggcatagtaagtgtgaactgcgaaggaagcatgcgtgatggaacctgtcagttgataatgctaaggaggagaatttggagtgaatttggagttggcttagacaggtttgaaaaggagagaaaagtggattctaggtgtagaaactagtactcctaagtcttcttggtttagccaggaggcaactgcttcctggagttgtcgtcctgtggataatttccagtcactaactggatttggattgtgggaacatgttagggcagggttcattaggtggctatatagacagtttgcattttgcattgaaaataggtgatgatacttggattttcatctaatggcataaattggcttttcttttcttttttttttttttaaagcaaaaagagtgctgatggccatttgcaattcactgtcaatgggtggtcaaaaacagccagtggcttctgggagggtcaagatttttcttgcttttacaccatctttctcttgaccattctttttgtacaatatataacttttctacttgttttatcccagaaaagcctcttcacatcagtaagttatttatagagaaaggcgttccttatctggcagctcaggtggtttgatctttactttcttgttgccccgtggaggctgggacatgatgtagtagatctgatgtcagcgccacagaaatctcttgcagccttctcttcagagtctcagttggaagaggtctgctggctttcctctttatagtgaacacacatttgggaagcttgtgctcagttcttaacatctgatatagccaagtaacttttcagttgctccacacactgatggaataatacagtgcagtcgggatagtttgcagactctttctactcagcagttcttcagctgtttctagaaaaagaaactgctagaggattctgggtgagagcaggcgtgtggtccctcagagggaagcagcagctgtgaatcagcgtggctgagaaggctgcaagagtgggaagaagtcaaggaacctcacaggtaagtgaaggaaatgcaattcaaggactagattttccagaacagcaaacagacagtgtgcctggaagccttcgtatttcgtaagtgtggactaattaagatttttaaaatttcaggttccaatttggaaagcttaaaggcatagtttgtatactatttccagcagcataggtaccagaatgagaataccagaggcactaacttggcctttgagggaacatgaccggtgggccgcactgcatttccatttgttcccagggcatctctggccttcagctgaagtctctgcagtttcataaaatttgtttcctgagttaatttacctccccaaatggaatttaagcctcttgagggagaaaacagttttaaacatttctgacattctctgtggtccatagtactgttgagtgtggattgtggactctttttgatttgatggctttgtgctgtatccctgagtggttgactcattttttgtcaggtgttcgaatggcacctattctgggaggtttttcttaccattttattcaggccccaccccttttccttcttagtcattttctaagatactgctcagttttcatatctttattgtttttatggcactgattatcatctgaaattaccttgttggtttgtttacttgttctgtctggccagctctcagatggatttaccccaaaagcaatggtggtaggagtgttcctgcaagggactgacttagtcctgaggtggtgctgattaggattccaaagaaagaagcactaaacagcagggcaaaaaaagcatttattaggggaacttacacacagagggctgtaccacacttgcgatagacattgagacaagagatgttctacctagatgtgtctatgaggaggggtcaggttatagagtttatatgagggtttgaggaattcgattcgtggtcggaaccagtttctgtgagttttgccacatttggtcttgcagtatttcagcagtgcctgggaatggctaagccctcagcttgggctcaagccttcaaggcaaaacttgcagctgtccaggtcacagaactgtgaaggcaccctgtgtttctcagcacaaagaaagaaagtgggaggaactagggggcaaactcttgtttgcctttctccaataaaataaatttgagagcaagacctaatctgtcttattctgtgactatcacaggacctagcacttagttagatattcaataaatagggcgccaaatgaatgcataaaaaataaataaaaatgtgagtaaatacttggaatttagcaagctgattatttggtttttatctattacttggtcagtagtgtttgtttgtttgtttttgagacagggtctcactcagtttcccatgctggagtgcagtggcttgatcttgactcactgcaacctccacctcccagattcaactgattcttctgcctcagcctcccaagtagctgggattacaggcatgcaccaccatacctgaatacattttttatttttagtagagaccaggtttcaccatgttggccaggctggtctagaactcctgacctcaggtgatctgcccacctcagccttccaaagttctgagattacaggtgtgagccaccacgcctggccttgtcagtagtttttgtttgtttgtttgttttttgggacagagtcctgctcagttgcccaggctggagtgtagtggcaccatctcagctcactgcaacctccgcctccccagttgaagtgattctcctgcctcatcctcccaagtagctgggattacaggtgcctgccaccacacccagctgatgtttgtatttttagtagagatggggtttcaccatgttggccaggctggtcttgaactcctcacctcaagtgatctgcctgccttggcttcctgaagtgctgggattacaggcatgagccactgtgcccagcctcagtcagtagtttcttaagccatgttttaaggtggtacattttgggggatcactatggaagatgtccaaagggaggttctgtgagagaagctctgggctcctgtttctacttgagggatgatttagcagataagttcatgatcaaaagtatttcataaagattttgtttggcatcttgcatccttatttcttctttcctgatattacttagttaccattatttcaagttactgacagaatttgggccagcttatctttttatcctgtaatgtatgtgtttttgtctgctcaagatttggctgccttttgggtcagggggtcactcctcatagagtcagtgggatgccctaggccagagttacataaaaccaagcatggccacccagagagactggacgaggcgacgacccttcgatgaggggtttgggaagggtaggccttgggacttctccagcccaggcactttgagggacttttgatgaatttaaaaagtcagacgtgtttctgaaaaagagaaggcctgctagaatatgttaaatttgcagattagaatataaatgagagttttcaatgatttactttaaatttccccattgtgttaattggtcttttgaaatgtttttattaaattcagccagcatttattaaataaatactgcatgaagaacagtccattgcgcaggagggaaaagaaatgaattagtctgcctatcaagaatggccagctccatgaagggagagacatctgcttgttttgtttactgctgtggcttcaggctttacagtgcatggcacatagtgggaacttaatgtgtgtttgttgaatgtaagaatatgagtaagatacggcatctgcacgcagagtgtttcaaagcgagtaacactaatgaaacatgtctttcagggtcccaacataccctgcagagaacagagcttggggaagtgtgagagtggtttctgagggaaggacttagtcaaagtacgagcttttaaggtgggactcacaaggttggaaagaatttgactggagaatagaaaaactttttagacaaagaatagaggcagaatatttttgttgaatgttggagtccagcttggtttggtaaagagagtggtgggggatagaactggaaaggtgtgctgagctctgaaagctgagaaactagattttatttgttggtcactggggagccaagatcgtgttttagcagatgagtatgtgatcagaattcctctttaagaaagattagagatagagcaaattgggaagctactgagacagttcacatgaactgtatgaggggtctgacccagaatgctgttagagttagtggtggaggggagggatgtgaagttaacaagcagtgtttatctgctttgcaacaaaaatgtgtctttgctgtcagtgatttgtattgtagatagggaacagttagaattcagtggaataatttgaggtaattattagatgcactggggctggaaggaactccttgtagtgttcccttgtaagggtcaatggaaatgattctggttttgcagattgggaatagaggctcagagatgttcagtaattttcctaatgtcacatagtatgagagccagatttcgaacccaagtctccataattttaaagcctgtgcttaaacttttcctatgtaattttctatagaggacaattgaagacttcctggttttcgacttgctgtttgatgtgtgaaagaggagggaaatgaggactcctttaaggcttttcagacctagaggctgggaaggggcttgttctatcagaagctttatgtctgtggcatttattatgagttaatgcaagttctcccataaatgttttttgctttttatatttccgaattattcttaaattttagtttcctgggctgcattcttaatccaaggatgtcattctgatcactccagactgggaagggattatctattatgtgttaagcagctattcttccttttgtgggatcctgtgacaattccagctgctttctcatattgtgtttctattttcttaacatacattttctaatttagttcttttggtttggatgctattttgtctttcagctagaaaccacataattatggaatgtttaagtttgtgagcattggttaaaatccatcttttatctgctcatatagtgcatctgtggcatctggtctccagctgaagtctgtctgagtcaggaagttcacctttatcctgatgggacttgtcttttagattcgcttcccttctcctgagtttctttctgtggttgccatagctttagttgatgcatttttctaagcagaatacaggtgagctgtgctattagtgttttctttttaaaatccttttgattgtagaataaaacacagatacatacagccacacaaaacatatgtatagcttaatgaattataatgtgtaattacctcccaggtcaagaaacaggacgtggccagccatcttcgaggtcctctgcaatgacaattccttctttccctaaggaattcatcactatcttgatatacagtaattatattccattatagttttgtcacccaggtgtagatgtctgtacactatagtttagttatgcatatgatatgtcttctgaatctattataaaatactctgcagatctctcgctgcgttgctttactttcctaaattttgtttgttgttgattccaagtcatttgacctagataatctactgcaatctggattttattgattgtgtagtacagttaaagatgtgcctctgacccctgcatttcttgtgtattagtagctggatccagaggtttgatgagactcaggtctgttccatttgggcaagattacaggtggtgtaggatatttttatcaggaagtgtataatgtctgatttttgttagcctgtatccattaattccttgagattttcaaaattgtaagattttaattatatgatttcagtttcatttattagctagaataattttatatggtagtgttgtctgtcatctactgtcttgttacccagttgcacaatttatataggaaagacagaataaaggtttggttgcttccgtttatttacccagttttcaaataatacattggagtattcttaaacctatttgatggatttcagctaattgcaattcctaatccttattgaagccagattgtcccatttttggttagtaggaacctcttattggctcctgagtccttctgacatgatcctgggaatctttgatagtttccttactatctctatgccaaggtgttccatcctcatcttgtacatgtcttgcagcagacacataattagcatctcttctcaaatccctggtttcttttagtgagagatgttatcgcaagagcataatctagaacatttgagtctcattgctgctgggctgtttattatttctgggcctcttgatttatatactaatgatgttaaaatatctataattggagtggacagagctgggaaatattatatatgatgtcttacaatttatactgatacaacacgctgtctcatttaaatccaggattacagagtttttatttaacgtcagctatttccatctctatctcttttctttcagacagatttctggttctcaaggacacaaggggtgacagaattagactatcccgtaattacttctttttttttttttttttgagatggagtcttgctccgttgcccaggctggagtgcagtggcatgatcttggctcactgcaaccttgcctccctggttcaagtgatcctcctacctcagcctcccagtagctgggaccacaggcatatgccaccacacctggctaatttttttgtacttttagtagagacggggtttcaccacgttggccaagctggtcttggactcctgactaaagtgatccacccgccttggcctccttaagtgctgggattacaagggtgagccactgggcctggactcataattacttctttatctcatctacctatacagtagtttcagagtaacaatactagtactgacaccaccaattatgatttctggaaacagtaaaataaaaaatttttgtttgcactctcccttttctccttctgtgtgttaaatgataatagaatgtctgcatttttagattacacactatagtctttttaaccctcatttagtcttagttcttcaagtcactatatacttcatcttcaccactagtccttatgtagctgtctctgtagtcatttttgtttgtggtctgaagtttgttctctaatggattcctttgagacagggtttctcattctgtcacccaggctggaataccgtggcaggatcatagctcactgtaacctcaaattcctgtgcttatgtgattttcctgcctcatactccctagtagctgggactacaggcctacaccatcatgcccagataatttttttttatttttcgttgagatagggtcttgctctgctgccaaggctggtctcgaactcctgtcctcctgcctgagcctcccaaagcattgggattacaggtgtaagtcaccatgcccagtgcctatttttaatatttgttactttctccttagtccttttcatattttttatttcttttgacttttaaatgtttatttctttctgacttctctttttcttaagacattgccagctgtgttcactcacttttatattgcttcgggtttagtcttaatttttgaaattatttatgtctgtcacttcatttctgaattttcttgtttctgatttttgttactgtctaatatctggtataatttatttaataatatctttagcatgttttgaagtagtacattatagttttttgttttttatgagcccagttgttgtactgtccttgtctgtaggggtgttattctgttctgtattctctttttaaaatagtaacattatatgaggtttgtataatgtactttgcttttgcttgtttttatgcgaatttaattttcctgaatttttaactttacggagctcccccttctgttgtttttatgcagtgttaaaaaaatggcagcttgctgtgattttctgactctgttcctctccttcactttcatttggatcttcttttttctttaatttatttaaattatttaattaatttaaattattttgtattttttgcagaatttatattccattactggtagtttctcccctgccttggctccttgtgccggcagggagctatggtgggccagttttgaagagttcaaaagtgtctagatgacttcagcccctttagccctgcaaggtctctgggggttctgacctgctgtcggcatgggcaaccccaccaggcttcagctgctcttcacacattggccttcctcattgcctggtagctattttacggtcctcctgatcttagctgtatcccatatctcattgattgattctgttttctctcgtgcagatgctcatatccagagatcttatggctgatggtagtttatcccttccaacctgcttatattttgcggtttgtagagatgccttatttctgaattttgttgtgtgtcagcaggaatttgctttgactctctaatctgtttttgtgtggggattaagggacatttgtaaactatgctgccaatgctaccatccttctagtacttctagtatgttagtttttattgaaccagagttttactaagccccaggaccgcagacacttgagttcttaaatcttaacccattatctctcatggctgccaccattcctgtataaaccatgagggagaaatagatactgaagacaagatcagacagaggaatcgttttatcctttgctagttggcttttgtccccaacccccattgatatgatctagtctgtgtcagaggtacaagcatgtaagttttttctaggatttttcctaggccaggctcagatctatgtaaaagagaccctggtcctatcatcttaaatcagtaccctaattggcctgtgaaatttcacctttgatggtgagaatatgctgttctctataccgtgaccactacccctgcccggtatcagtgttagagatttcagggtgtatgtgtgtgtgttttgtttgtttgtttttgagatggagtttcactcttgtttcccaggctggagtgcagtggcacagtctcagctcactgcaacctctgcctcccaggttcaacaattctcctgcttcagcctccccagtagctggcattacaggtgcccaccaccacacccagctaattttcctatggtttagaaagtaacccttaaaatataatagccaagtgtggtggagcatgcctgtaatcccagtattttgggaggtagaggccaggagtttgagaccagcctgggtgacacagtgagaccctgtctctaccccccaaaaaaaaaaaaagaaaaaaagtttttaaagaaagagagagaaaaaaaaaaaagcaggcacagtgatacacacctatagtcccagtcattaatacttgggaggctgaggcggtaggattgcttgaacccaggagtttaaggctattgtgtgctgtgatcagccctgtggatagccactgcgctgcagcctgggtaacacagcaagaccctctctctttaaaataataacttaaaatatattaacttttgaggaaaattttacattgaaccagaggagcaactgtgtggtagctgaggttggagatttgaggaaacggtgttattttatatgattatttttgttatatacattttatctgatattatataccagcaagcaattatattaatagctgaaaatttacatattttataaacatgaacattagccattaaaagtgtcacaacagttccagtgtatatgcatacatattaaataataatatatttaagaagtgtaattgcataactcaaatggaaaaaaaatctctatgtacctattacaccaatattttgtttcatgtaaatatgaggtatattaatattaggaaatgatgctttccaatattggtaatactatacaaagtaagattaaaatgccagtgatcctgtggactgagatgtgctttatatctcttgaatgcaaaattaaatgaatccacacatatatgatcaaattattttcagtgggaaaaaaatcttttcaataaatgggctggaacaactggataatccctatgtgaaaaacaggatataacccaacctcataccatacattaatttgagatggatcattgatctaaatataatctcaaacctataaaaacttgtagaagaaatcaggagagtgtgtttactttcatttaggcaatgatttcttaatgaggggatagaaagtactaaccacaaatgaaaaaaattggaattcatcaaaagacattgttatgaaaatagggcagcttcagactgtaagaaaatatttgtcactcatatgtctgagaaagcaattggatgcagaatacatttaaaaaaataccttccaacaaacaacactcttataggataagaccaaatcagtgttttaaaattgacagagtcttaaacagagacacattaatggcagataagcccatgaaaaagtgcccatcattattggtcatcagggaaatgcaaattaagtcacaataagatccccaaaacagcctctagaatggctaaattgaagagatggataaccctgaatgttagcaaggttgtcaggaatgcaagttctcatacattgttggtggcaatgaagatggtacaaccacttgaatagtttgacaatttcttaaaaagttaaatatgaatctgccctatgattaatctgtgatggaaatcagagtagtagcaggatctggttgctcacacctgtaatcccagcactttgggagcctgagatgggaggaggatcccttgagcccaggaattcgagatcagtcttggcaacatagtgaaatgacacctcttctctacaaaaacaaaaataaaaaaattagctgagcatggtggcacacgactcaagtgggaggatcacttgagcctgggaggtggagcttgcagtgagccgagatcacaccacactgtactccagtctgagcgacacagtgagaccctgtctccaaaaatagctagctagctagctagatcgaggttttctatgggtagggtgaggattgactgggaaagtgcttgagagaactttctggagtgatagaactgttttgagttgagcctttataaaaactaaatagtgtatctaaaaatctctgcatttcacatgtaaagtataactaaaaaagtccaatgcatattagaaaacattttctgtattttagtaagtgaaaatcttataatgcaatttaatgaaattatagtttttggatttaatccacattttagttgtgtgtgtttttaaattttattatgcagtacattagaactgaaataaaagctttcacatttgctttcactcgtctagcacgttcagagttccagtgtatatggaccagttatgtggtaaatgcaattaaactggttatgctgtggactctgaatcacctcagttattattcatgaattttctctagatatttaagttgtttaatgatagcttatagtaatggaattctttcttcatgtaagtttgcctactttatccgctactaggagctgtatacataggctcacatgatgggatggtgaatttcaaagaagagatgatgtcaaattacttgacgttgtctataatgtcagttaattttctaagtgtccttcgattttactgttgatacttggttaggttttaagcatcctttatcttgtgttttttctttttgtcttttttgagatggagtcttgctctctctctcccaggctggatcccagacgcgatctcagttcactgcaacctccacctcccagggtcaagcagttctcctgtctcagcctcccatgtagctgggattacaggcatgcgccaccacgcccaactaatttttgtatttttagtagagacggggttttaccatgttggccaggccggtctcgaactcctgacctccggtgagccacctgccttggcctcccagagtgttgggattacaggcgtgagccactgtgccccgccttaggcagtagtttgcatggcatgcagatttcagatggggtagttgtagcaaaagttaagaaccattgttctagagcctgatttgagttatagttaccagataatgatttctttattaatgcagaggcagtagtctctataaattccctaggcctggttccactatcttttcttctgtgtggtcagattgaattttcttgggcgttgtttcattttatgttccaataattatttactgccatttagaactctaacagtttttcttgttagcctatctgacataacattgatggtagagctagaaaatgatttcctacaattccctctatagctaatttttaccctccaattatagaatacggtaatattgttaataggttagtggtggctctattatgtgttaattaccaagagtcagctattaaagttttcttttgacagtaaaagcttttctgaacacagaggattaggaacgttttcttgattcttgttttaaagatcatcatgtgatggtagtaggcagagagctggaatgtgcatttctacgtagccatgaaatttaacttgtgctaatcgtggtggttctgcgtgagtaacagacatggacacagacagcggaacacagtggggcatagctttgtgcttgatggctgctttaactttggggctccaagcaaggatttcaagaaacatttctttggtcttaaaaactgggaaattaatagatcttctggacaggagggctccctaatttctgtggggcatgtgcctaaacaagggctccttagatattaacataacttctttgttagtaaccttgacaaaagctcaatttttacatgtatttatttttcatataaaggatcttttactgttttgtgttttaacacaaggggcagatgtctctagctctgagctgtgctttacagcatgtcttgtcttttgaatgtttctttcaactggagcagcttcctttgttaaaaggccaacaaccccctaagtgagatgttcttggaaagaccccttgacacttgaaaggtgagaaatccatttaaaccatgtgatgccttccactgctctactgctgggttctgcttgttttaatattagtgatagatgctctggctggtgtattcagtaattggaagtgaactatataatataaatgacatttcatggcatatgtgagggcacagtggatgacacttgatttcagtgttgcctgcctttaggtttaaagttagaaaccataatggaatttaattatcagcatatattcaaagattagttcaatgcgtttgtaatacccttagttgttaggtaactgtttgattattgggcatgatgctgagtgtgtgtgatttataataccagagtgtgcagtgcagcaatagaaatgctaataggctttgtgtaaggaggtctgccatcaatactttgtcagcactttgctgccaaatagtcttcttggaaagacataatctgtaatcaaagaggagtttgtggaaatacgaaacatagacaaaatatgttatgataaaaagaggtgctcattgctttctttcaggacaggtttcagttacaccttattaatgatttcctctcccccccgcccttttttttttctttcccggacggagtcctgctctgtcatccaggctggagtgcaatggcgcaaactcggctcactgcaacctctgcctcccaggttcaagccattctcctgcctcagcttcctgagcagctgggactacaggcgcccgccaccgcacctggcttttttgtatttttggtagagacagggttttgccatgttggccaggctggtttcaaactcctgacgtcaggtgatcgcccatctcggcctcccaagtgctgggattaaaggcatgagccactgcacccggctcctctttcccttttaaagtgcatgtccagcctcagcggtatatctcacaatgaataagatgtagtgataagctattttgattctagggcttgttttataaggtagcattgagtggaatatcttatattcagtgagatactctagatctcatatttgaaggctctgtgcctattcactttcagaaacattgtgagcatttttaagctcaagtgatctgtgtcagcatgatgagtatggggggccaaggagtatgtgattttcttctacaggcagttgaaaacgtgtaacttctttaagttttaagtgtaaaagattggtcaccagactgttggcatgaccaactgtaattatacaggcttgtttctgttccgttttattctcttaacagtatatggctgatgcaggttccaattctgttggtcagacaccatctatccactggaaggctagctacataaaaaagaaagagcagcaatatactaggatagaaagagaggggagagagagagagcaaaggcctatgacataaacaaacaccctgtgagtttttaaaaatagtttttgaataggtaatacatttatataatttaaaaaaacaaaaaaattcaaaagtcatatgaaatttctttctttcatctttttttttttttgagtctctctctgtcgcccaggctggagtgcagtggcgccatcttggctcactgcaacctccgcctcccgggttcacgccattctcctgcctcagcctcccaagtagctgggactacaggcgccgccaccacgcccagctaatttttttgtatttttagtagagacggggtttcaccgtgttagccaggatggtctccatctcctgaccttgtgatctgcctgcctcggcctcccacagtgctgggattacaggcatgagccaccgtgcccagcacaaatgtatctttagaataaatttcaataagtgctggagaaacagatgaatatgtttgtaattttggtagatgttgcccagttactctttctataacacaattgtgccagcttatgtttctgtaaaacataatgacaacccttttcccataacctggccagcagagtgttatcaacttggatatttgccagtatgagcaatatattcttcatataagtttaatttgcatttttttattatggttttattctttacatttcaatctttgacccatttagactcatttcagatcattttgaatcatacagtatgaggtatagatacaacttaattttttttagatgactttctaggaatctctacaaactcattaaatagttcatctttccctgctattctgtaatttaatctttattatggactaaattcctgaaactaatttttaactggctggcattaacatgcttttatccttacagttacatgtaactttcttcttatttactgagttttaactctgattgtttgtcaaaatggcttttagtgaccactgcctatggttacatatttttataattggcactaaaatttatttctccagtcttttatctaacccaccccatgcctatagaaaaggtgcaggtacaacacagagaactttttttttttttccctagaaccactggagaataagttgccaaataaatacccctttacacactgatacataatggatgtgtgtttcttacaaggacattttctgatgtagccctcaagtcaacaatcaaacctaaaaattaacattaataacattattactgtctaatcctcagaccctgtacacattttggcttttgtttcaatgccctgtgtagggaatggatctaatcagaattataggttatatacttagttatgtttctttaatcctcttcattttagaacagttcttcagtcttcccctgattttcatgaccttgacacttttgaatattgcagttcagttacattgtagaatgtttctcagttttcatttgtatcgtatttcttcattattagattcaggtttgggatcttttccttgtaccctgccaagtagggcacaattttggttccttctgttactggcattcactttgatcacttaagattgggtttacaaggcccaaaagttaattataaagttatttctttgaggtgggcacaatggcccaagtctaatcccagcacttttggaggccgaggttgggggattgcttgagccagcagttagcgaccagcctgggcaacatagtgagacactgtctctgccaaaaaaaaaaaaaaaatatatatatatatatatatatattaaattagccaggtgtggtggcacaggcctgtagtcctagctacttgggagtctgagagtgggatgttgaggctgcagtgaactgtgattgcaccagtgcactccagcctggacaacagcaaaacagtgtctttaaaaaaaaaaaaaaaaaggttacttttttcatcctttgttatcagttaatattttatggaaaggtgccctgtgactctgaaagtgtccggttatttagcaactattcactttattcatttacctatatcagcaaggatgcacgatttctggttttctttgtagtttctactctattactaacattatgtgttgattctcaagttgttctagcagaactagtccagcaggtctgtcctttcaggctgagtttcgcgtgtctttcacattctttgagcactttcttactttttggtataagttgttttagggttctcctcctcagaggcaacaattgttgccagcttcttgtatctttccagagatacttcatgtgcatacgtgttaatgtgtatatgtgtatgtaaattttagcatttgcgaattagacttttaattttagaaagatgttaatttttaatttcataaattagacttaattgaagtctaatatatattcatgaaagaacattctaaatagaaagctcagtgaattttcatatagtgaacacatctgtctaacttctggtatcaagaaataaaatgtgtgcactccagaggttaccctcgtgccctctcctagccactaactgcgtaactactgctgtgagctctgccatcacagattagttatgtctgtcttcgtacttcgtatatgaagggaatgaaatgcaatatatatttgttcgtgtctgatttttttggcttagcatgtttgtgaaattcatgtttttgtaagttgcagtattttcatttctatataatattgcaggtggatcatgaggtcaggagattgagaccgtcctggctaacatgatgaaaccctatctctactaaaaatacaaaaatatattagccgggcgtggtggcgggcgcctgtagtcccagctactcgggaggctgaggcaggagaatggcatgaacccgagaggcggagcttgcagtgagccgagatcgtgccactgcactccagtctgggcgacagagcgagactgcgtctcaaaaaaaaaaaaaaaaaaaaaagactatatatagatcatagtcttaacatatttcagagcattgaaatcatacagaacatgttctgtgaccatagtgctactaagctaggaatcaagaccaaaaggagtacctgggaaatacacagatgtgtagaaggaacccagattcttctaaatagtctgtgggtcaaataagaaatcacagtggaaattagaaaatattttgcagtgaattattaatggaaatacaacacattggttgggcacggtggctcatgtctataatcccagcactttgggaggctgaggagggaggattgcttgagcccaggagtttaagaccagcctgggcaacatggtgaaaccccatctctataaaaagtacaaaaattagctgggcgtggtggcatttgcttggagtcccagctactcaggaggctgaggtaggaggagagcttgagcccaggaggtcaaggctgcagtgacctgtgattgggccactgcactgcagcctgggtgagagtgagactgtctccagaaataaaaggcaacacatcacagttaatggctttatctaaaaccatgcttagacataaacttttttagcctttaatatatatttaaattacttagtaagacactgtgaacaacattttaccaataccaaaatttgaacacttagctgtgataccaaacattcagagtaatcgaaataatttgaatagaaaagttttatgtgtgaaaacatatataggaatacttattacaaccaaggttgtaatggtggaaaactggaaatgacccaaatgtctactatcaggaaaatgtatgaacacattgtgatgtgctgtatatgaaggtaatacatgtcacttaaaataagtgaactagggcgtggatggatcatgtaagtgtaatgctgaaagaacaaagcatattatagaagaactcaaagagtctagtgtcatttatgtacagtataaaaacatgcaaaataataccttatgtatttttagttatatatatatattaagtaaaagcatgaagtactggatgggaatgatcagtgaattcaaggtggtggttacctctgggctgtaggcaggttccacaggcagcttctttaggttcgataatgtttttgttgctttaggtatgtttggtacagatggttctgttatttttatacctttctgcctgtcaaatatttcataataaaactttaaaaagaaaaataagaaagataaagcaagaaagtagagccacctttgggagttttcatgaacacgctcaggatagcaagcaagcaagacatttaggtttcctcctaggtcctgtaggtagagaaactggtgtatggaatcattagggttatttaaacctgtctctgtatatgacatatcaggtcacaatacagtttttcctgctatcctgaagtacttttgagaagaccactaattttaaggaaaataatatccaaagagattaaataacagtgtaaataaatgttacttgcctaggatttatggttactaagtggcagatttcattcatcataactttctaaaagcacttaaccgttattggacattttagaggagagggttgggggaattggtaaggggtcttctcctccattggaatggaagttctaccaggactgggacttcctgtttttcccacttctatatactcagcaaccatctccagaacagtgtctggtgcctagcagatgcccaataaatattccttatatagtttgaggaaagtatatctcagatctaatttgaaattatttttgtttatttttatatcacttgtcactaaaactgttgtatgttctaggaatttcctgagaccatattacctcttagcccagaagttttatctagccgattacttgatttaaagatcatgggattcctgtctgtagtattctctagcaatagatagaagagtcacagcagactctgaattgtttttctccatattaacttctctgtgtgctaaaatggaggaaggaagttagattagaatgttgcttttctggcaacactggcacccaaagccttttcatcacagcaaatgttgattctgtaatggaagttggtctttttgtggtaatgggaatgttgcctatcttgattttggtggaggttacacaactctatacatttgtcaaaactagtagaaacaaaataagttaattttattgtgtgtatgtaaattatacctcaataattaagataaactgaaataagaaacaaagcccaaaagttggaacttgtttttgaaaaaagatgacaagagattttaaaggaaggggtcttactgcagaagatatgaacatttccgtatgttgttgttggtgcttgaacgtgatgcagaatctttttgacaaaaattaccctattttaaaatgaattgtggctccagtcacatgctctttgattttctttctttcttttttaaagcagcattttcccagctcagctcacacttgactgaatacactgatcgattatttggagattaactaaggcttctcatttcctgctttccatttctcctctccagcaggccagtgggcctttgttgtctggcatgtgcaccaagataagctatcagggcatgtttgtattagaaaaatgtttgtagatggaacggttataaatagactaactagtattaaaggttaccgtctttgttttggtttaagttaaaggaagagaagaaataattaagatatttaagataagacagactgatttacgtaaaccaggaaaatataattttttagtgttcctgctgattttcccttttcttatccaactatttgaatttgtttattggtaagttgctggctgtacttggattcctattatgcaggccaacttttgagtcagtaatttctaaaactgtgtctctagtgcttcttaaaagtgcaaatatttgtgttgctaaaaattactttactgtgttaccaactctacactcagggtttaattcagacagcagtggtacaaaaagcatatcaccaggagagggcggaatattgctagattcacataaattaggtatattagtcattataaaagatatgattcagttaacattgtaagctaatatctttctttttcttaaaggttttgtttaatgatgccagttttctcaggtaggaagcagtatcatttttgaaatggccagaaagttgcctggaatagcggaaattatctaggttattattttctgcatgctttcagcttcaagggttcaccgttgttttaaagtagtatacctttttaatgtagacaaatacttgtttgaatcaagctttaaatatttcttttatatcctgagctcagtttttggaaagataccttaaatttgacaatgagagcttcctatttagatttttcttcttgtgtaacttctgctctctactggaatgtctggagtgtttggttgtataaataataatgaaatcttttttaatagtatctgacatctaaatgaatttgtgccttaaaatctctagtcattgtgctgtttcgggagcatactttttatttaaatgattgtgtctaaaagagagggcacctggagccatctgtgcagcttgtcgacttcatctcagagaccagccattcttaactatggtccaggggtctgtagggttgaactgttttcataatgataccaagacgtcatttgctttttttcactgtcattctctcaggagtgtacagtgcattccacaaaaggctaaatgatgtgtgatatagctcaacagattgaatacagaagcagaagtagatatgggaatctgttttcttattaagccagaagtaaaagagatttgcagaaataaaagtgttactcatttcctacattatgttcgttctaaaaattatagttatttgttataattatttatgttaacacgagcatgtagtgggtttattactgttattaatgaattcataaattacaaaaaaatttatttttttatttttattattattattttttgagatggagtctcactctgtcgccaggctggagtgcagtggcgcaatttcactttcacctccacttccccggttcaagcaattctcctgcctcagcctcctgagtagctgggactacaggcacgagccaccatgcccagctaatttttgtatttttagtagagacggggtttcaccatgttggccaggatggtctcgatctcttgacctcgtgatccgcccgcctcagtctcccaaagtgctgggattacaggcatgagccaccgcacccagccagaaatttttttatttttaaatacagtaagtactgataagctataacccatgttctttgactctttaataatttttaagaatctaaggaatcttgaagcttaagatgtttgagaggtccttctgtaaaaagtgtattgagtcaataaaatattttctttttttttaagacagggtctagctctgtcacccaggctggagtgtggcagtgccatcatagcttattgcagcctttagctgttgggctcaggagatcctaccgcctcagtctccagaataactgggactacaagagcatgacaccatgcctgtctaatgtttaaattttttgtaaaggcagagtctgactttgttgtccaagttagtctcaaactactgggctcaagcggtcttcatgcctctgccttccaaagtgctggaattacagatgtgagccactgtgcccaacctcaaggaaatattatcatggtagctcatcatcggtttttaattgtaaaatctctgccatgtatctttaatcataagttggtaagtcttacttataaaataatgtgatgttaaataatgtgagaaattccccaccctttctttgacatcctgctcattaccgcaaagtctgaccccaccattgatgtgtggttgagctctgtaacttttctggctatgtcatgtgtaagaagtcattaattccctccaaatgaataatatcactgccatcaccgccgtcaccaaacaacaaccaaagtattattacaaaaatgtcaaattttgtgatatttgtactctttttttttttttttttgcttttaaagaaatttaatggactgtttaaagctttagtagggattaagggggaatttgacaatttcttattacactctctacgaatagctatttttttcttcctttatgggagaaatcctttggaccaaagagaaaatttgtgcttcagaatgttgatctgataaaaccagagctgctgggagaatactgtttagaatgggattcatttttgtgtttggtcagcagattttggaggtccaagggtaggattttaatttatctgcgaaatttcgtcttgccaaattgacccttcaaaactgaacttttaaagctgaatctgacatttagtatttgtcagtgtattagtcagggttctccagagagacagaaccaattggctggctggctggctggatagaaagatagacagatggatagacagacagatgagaggggatttattaagggaataataaatctcactccatcatagaagctaagtcccatgatagccatgtcttagtctttttttctgaatacctgagactgggtaatttataaagaaaataaatttattatagttctggaggctgtgaagtcccaggtcaaggggctgcatctggttggcctctggggagggctttgtgctgtgccataatgtggtagaaggcatccaggacagtagggctcacaagagagagccaacctggtttttataagagactcactcttgtgataagtcgttaacccatgaatgcatcaatgaattaatgagttatcaggctccttgtgatctaatcacctcttaaaggcctcacttgttaatactgttacattggggattaagtttcagaatgagtttctgagggtgacaaacatttagaccatcgcaggccatctgcaagctggagatgcggggaagctgatagtatggctcagttcaagttcaaaagcctcagaaccaaaggaacctatagtacaactctgtctgaggctgaaggccagagagcctggggggccgctggtgtgagtcctcagtccaaaggctggaggacctagagttctgatgtccaaaggtaggagaagaaaggtgtcttagctcttggagagagagcaaagtctccttttccctgcttttttttgttctgttctggaccccagccgattagatgctgtcccacctacattgagggcagatcttcccacacaggctaccatctgacacaccagtctcctctaggaacacctgtacagacacacccagaaataatgctttaccaactatctagatgtcccttaatccagttcagacacctgatattaaccccacagtcaggttgaagtacattgtgggatacttttggggagctacagaagtgctctttagtttgctatgtctgtccctatctgctaagtccccttgacgtacagtttatctctgtgtgtgtgtgatattaaggacaacagaggtcatctagttacccagccttgtagtttacagatgagggcaagaagtacaaatattcccaaggttttacctgtgcttagttttggcctctctgctacaaacaaatacaagaatgaattgtctgaaaatttcagtgttcatacacaatataatcctaagtagaaaatccttaatgagttttgactccttagctagcatttcagagatgatttagttttcatgcactgttttagttcctaccaaaatattggttgatttttctccatattaaagtgtaaaaataatttaacagcggcagaagtttaacaaacaaggcatcatcaagaaacagtggttttgaaattattgcccatcatctgagcctgtgcttcagtacattcatagttacatcatctttctgagtgtttgtatgtagccagttatttgtatatcttgattgtaaacactgtgaatagtcatctgccttcctaccattcccccttcatgcttcaacatctgatagaaggtgatttaaatcctttcacacagacccagatgctgatgttatctcttgacaacagtcttttgaattgaataccactcataggttttgaaaatgagcctctaaccttgatcctagtgcctacaagcagtaagcagcctagtcagatggatgtggccatggtcttctatttctttcatctacttaacttctctttaaaaattcattatgctagttctggccgggtgcggtgcctcacaccagaaatcccagcactttgggaggccgagtcaggcggatcacgaggtctggagatcaagaccatcctggctaacacgatgaaaccccatttctactaaaaatacaaaaaattagctgggtgtggtggcacatgctgtagtcccagctactcagaatgctaaggcaggagaattgctggaaccctggaggcggaggttgcagtgagccgagatcgcaccactgcactccaacctgggtgacagagtgagactccgtctcaaaaaaaaaaaaaaaattactattccagttgtgagcagatccctccagaagtctgctatatattggatgtaccagtagttccaggtatacccatttggaaatgctaataaatgtgatgttaccaccaacaggattctgtgtcccatttaatttttgttttcaggtttttttttgtttgttttttgttttggagacagagtcttgctctgttgcccaggctggagtgcagtggtgccatctcagttcactgcaacttccgcctcctgggttcaagcaattctctgcctcagcctcccaagtagctgggattacaggcggtcgccaccacacccggctaatttttgtatttttagtagagacggggtttcatcatcttggccaggctggtcttgaactcctgaacttgtgatccacctgccttggcctcccaaagtgctgggattacaggtgtgagccaccacacccagcccaggtattttattttgttttatttttcctctacctgccccttgttttaaggtattttagaaatgggagttgtgtggccacctgaggggagctgtgccacagccgtggtccttccataggtggattcaggccccactgagagtggatgcagaagacgaccctgtggatttttaggtctgttcagttccagcgctacactaaaatacaccaaggttgggagaaggtgttccaggatcaaacaagagtggatactttatcaatggcaataagaaatttacttgcgaggcctcactctgccctctcaaaatgaaacaaaatgtttaatgactcagtgcatttgggagatgtgtataggatggtgtaattataaagtatattcagtcctttctttctcctgagaagagtctgtggagtcagtatttcagtttttccccttacccactggtccccatgtcagagcagaaccctgggatacatgaaccttgatggcctgaggcctggtggtatactctgctttaggtttttctatacctctttcctggcgttttgagctgtaatggctgtaaagttatatggataatatatatagatatgtaaaattcttagatcctttttgtttgtttggttttgagacagagttgcgctcttgttgcccaggctggagtgcagtggcacgatctccgctcactgcaacctccaccttctgggttcaagccattctactgcctcactcagcctcccgagtagctgggattataggcacccaccaccacacccaactaatttttgtatttttagtagagacagggtttcaccatgttggccaggctggtcatgaactcctgacctcaggtgatccacctgcctctgcctcccaaagtgctgggattccaggcatgcgccacggtgcccgggcattcttagagtcttatgttaaatagggtagaggcttgaaatattacaagatatttcctatctaatttcatttttaaaatttcattttgttgtaagctgacaacttataattgtatatatgtatggagtacaaaatgatgtatgattcattaatacaatgtagaataattcaagctaattatcattttttatgatggcaacatttgaaatttactctcttaccaattttgaaatgtacaatacactgttattaactatattaatcatgttgtgcagtcgatcatttaaaaaacccagttattcttctttactgagattttgtaccctttgagcattagctccccattccccccactgcccagcctctgtaaccacttctcttcacttctgtgagttgggttgtttgagtccacatgtaataagcacatgtggtatttgtctttcaattcctggcttatttaacttagcataatattctccagttcaattcatgttgttgcagatgacaggagtcttctttttaaagactgaatagtagttttatatatatatatacacacacacacacacacacacacacacacacacacacatacacatatacacacacatacatacacacacaccacattttctgtctccattcattgttgataggcactgaggttgattccctaacttgtttattgtgaatagtactgtgataaacttgggagtgcaggcttctctttgacaaactgattttaaatattttggtaaattcacagaagtgggattcctggatctaatttcattttaattgaattaaatttaatttcagatatttatccatgaagttgggtaactatgactggtacagaaagcttatctttagttttgatttacctgtgtaaataaatacaggttgggcatctctaatttgaaaatccataactttttgagtgctgacatgatgcagtaagtagaaaattccacatctgacctttgtgacaggctgcatatattattaaaatgttttatataattaccctcaggctatgtgtatgaggtttatatgaaacataaataaattttgtgtttagacttgggtcccatccccaagatatctcattatgtatacccaaagattccaaaatctagaaaattctgaaatcagaaacacctctggtcccaggtattttggataagaggttactcagtctgtatctggagttagctttgatctttgaagaatagtgatctttgaccccattgtctgtccctacccttctcccttgaagtcaggaatgatcaaagccattatgactgtgtccccaaggtcttagctaaggtgacacgtctaacagtcattgtcctgtaagtggaggtgggctcaactggcagagttaatgcctctttaaactggttggtgagcacacttgaagggagatagtgatgtctctgggagacggtgttcccccctctgtatgcttaattagtgtctgactaccaattaaaagttttatgtatacatttctgaattatacagtaaacctctaatgttcagacaactcttaaccttattatcaccatgttgtggaaatgcatgaaaagtttcttcagaaagtatctttttaagccatacagtatacacatgttagccacttcatcccaaatttctggagaaacttggttggctatattggcttatagagtaagaattttgatctgatttcacttggttctgaatcaagagcccccatgactaagcagttaaatatatgcaggaggttactcctcttctctccagcagattgttttgacttggcaaagttatttatttgctaatatccatctttgtactctgttgaggctgtctttggccttgatatctctgtcacatttgataacacagagggacaggagtggtctgttttggaggctttggggacctgataatccctgctgtgagctggtggcaggtatcatcagctggtgatcagtgggacaaagaagctctttcctctgtatcgtaggtgaatttacagttgttctgtctggcttgcaggccacctctgtgtgaaggactctctctctctctctgccctagtcctattggtatttatgaactatccagataccccctcgattattattactatttttatgttgtggaaaaacattgccctgaggctgatattaagactgtttctaggaaagactcaggctatttaaattgataaaacactaaattaataatcatgaaagatctctaggaaaggaagtttccatctcaacgttagaccctgtgtctgtgtttgggcagactgtgttgtgtgttgctgatgacaacacagttgcccttcaacagcaactttttcttggccttgcctgtttccattgccttccttttcccctagtctaccgcttgtcagttatctagttctgagtgtttcatttcagttattttaaatttgttaaatctcaacagactattgtctgttattcaaagatgtgtagaaatctttgctattctgctcccagatagctaccataaggatcttttttctaagcccagatttgggggatggattttgtcctctattaatctccttaaatcgacatatgttcttcatttcaagagaaatccagccagggtctataatttagcccagaaacaactccccctccccttttttttgcccagagtcccgaaactttattgttaagcagattggatgtgctcctgtttagtggcttaaaacatagcaagatgtccacctctacaaaaaaattttaaaaattagctgggtgcctgtgttcctacttactcaggaggctgaggcgggaggatcacttgagcctgggaggtcgaggctgcagtgagccatgatggtgccattgcactccagcctgggtaacagagtgagaccttgtctctaaacaaacaaacaaacaaacaaactggtgagaagttatttacttcccagtggtctcctcttactattcagaagtacaccctagggtgctttcacacaggaagcttcacttccctctttattctgcattctgtttgaaatatattatttataaacattttgacatttatgccattgttaaattatattggtagtaaaaaatgaggcttatttgttgagaaattcttgacaagcttctagaattgttggaaaaatgaagacattttcctcttaatttgctgtatgacactattactaacataattttgaatcttagaaaagcaaaaactttaagggacctcttttctctctatctttgctgctctctttttctgtaaaacaatgatagtaatatctgacattttttgagctcatccacttgctttatattaatttatttaatcctcacaaccaaataaggtagaaacttggttttctcccattttgtatatgagagcattgaggcttggagaagttacttgcccaaagtcacatagcttagtaagttgcagagccaggattcaaacttagacagttttgcttgaatcgcatgatctctaaattcacgtctggctttaattttctgtgattttgaacaaaattcttcaactagtgagtagtaggaattacataattacctgtgtctaactttctagcaatacttttgtgtctgaggtagctctgggaacacttactcagggaggggatgctctcttcttccctcagtattatagcagtggccagcttccactgaaggtgacattttaatttgtaaacctttaggatggcaccgttagccagtgccattgcacagatacagagaaaaaattagagattctcccacagcatcattttatctacttggttttgtttgaggaggaaatctagatataaacatgtaagaatggaaagagagcatagaaacaattttgttccatcccttcacttttcatagggttgggggactccactcaggttgcaactagcagttgcagactgaactgtaatcctagattacctaattgtaatctagtactgctgaaaccacacactgcctccctttatggacttttcatttttaattaagttaccggcctatttagaaagattgtggatattacagctacttaaatttgtttcaaattgttgtttacttccagtctacctttgtgtgttttatctgtggaattgattgtgaagtcttttcagcacaatgctgccactccctggttattgcatagtactgcattggggaatccaatagttccttcactgccattgtaaagtataatattaggagtcatacatctaggtacaaataaaccaaagcagttaatttatttgtgtgtgtaatcagtaggtattcctacaccataagataacatagatattgtacttcagaagatcaccagtatccctggcttggttctgaaagatagacattgtacaaatttgagttactgtatctaaaaggtatttctgttgcccttcaggttttcagatgtcttaaatgtgttgcagaaatacatagatggtagattttaaaagattgttgttaggagtgctagtagatctggactcctgtatgctcagtgaagtaatacatttctgtgagcactgaagcatgtattagtagctcagtgactagagatcactatcatcccttgtaggaaaccaagttctggtgaagaagtaactcccacacttctcggcacagttcttcagatttttctgtgaactattggttacaatcacctaccaatagaggaaacaatattcattgagcacctactcagttctagatgctttctgtcttttctattctttcagtaattattttaggtagatttcagtatctcctttttacagaaaaggggagattgggagaatctcggtaatgtgccccaagtcacatacatgggaagtcatggaattgagattggagggggccacaggccttcccatcttctttccagtaggccatcttccctaccctgtagtgctcgaaccaggttttatttttgccattctgattttgttttccttaaaaaacaaaacaaaatgaattactagaccagtgatttctcaactagggacaattttgtccccacaggggagatttagcaatgtttagagacagttttggttgtcagaactggacgatgggtgctactggcaattagtggttagaagccggggatgtcataagcatctaacagtgcacaggcagatccccacaacaaagaatcctctggcccaaatgtcagtagtgctgaggttgagcaagtccttattatagacagcgtattttaactgaatgcatccccaagcactgccaaacaggtgctgcttcttcccctggtttatatatattttttctataatgagtaatcttatcctggtcctgctttttattatcctgccgagggaagaaactaagttttcttggagacaaaatataatttttcctctacccctcttaagttcttggctaaataatccttgtgccagagagcatattttgaggtggtatatcctgatctcctacactttctagctgctctcccatgtcctggcgatttgtcccttgctgcctgtgtatttggtcagcaatagagttagaaaactccagttgtcctgtaagctcactaaaggccagacagagtcaggactcaggttcttctccatatttccccagaatggcttcgttgatgcatgcagatggactgtggggtctggatatgttcagtagtttgtctatctttatttcaatgaaaaaattcattgaaatctctcccattttttctcaagtcagatgttagcacatccataatcccctgctgaaagtaattatttctctaaactgctacatgtaacatttattctatttatttaacatactggtatgtcctctttttcccatctgaagcataaacagtgtagaaagttttttttgccatcagaaattttaatataaaggcataaaatgcataaatattaaagagtactcatcatgtaggattattctatgtataaagggtaattaaaccagtgatgatgccgtatttttgtaggcatgtgtatttggcacagttaaaagcaaaaaaaaaatcttgggaattatgttatttaccttgggtttttggtttggtttggtccggtttttttttttttttttttttttttttttttttttgagctggagttttgctcttgttgcccaggctggagtgcaatggcacgatcttggctcacctcaacttccgcctcccaggttcaagcaattctcctgcctcagcctcctgagtagctgggattataggcatgccccaccatacccggctaatttttgtatttactttaaaacagcacattttcggccggcgtggtggctcatgcttgaaatcccagcagattgggaggccgaggtgggtggatggatcacctgaggtcaggagttcccgaccagtctggccaacattgtcaaaacatgtctctactaaaaatacaaaaaatagctgggcatggtggcacacacctataatcccagctacttgggaggctgaggcaggagaatcgtttgaacctaggaggtggaggttgcagtgagccgagatcacgccactgcactccagcctgggcgacacagtgaggctccttctcaaaaaaaaaaaaaagaaaaggaaaaaaaaaagaaataacacatcttcacatttgagttctgttgaaacttgtggcaattgtcatctttctgattctttaaatggcttttaagtgttttttagcaaaggttttttggaaccttcctggtgttttagtgttggctatatttgtgacttgctcgttaaagcaggaagcatcttccttcattaatgagggctcttttatcatattttaggatttaggcatcccctttataaacatgaggcatttcttgaattttagctctcattcattactgaccaacgggcctgtgatgagaacgtagaggctgctgaaaggcatgatactgcattcaccttggagaagcctgttaaggccgcacatgggttggaaaagtattttaggaggccgcagggaacctcagtgcactccctgttgagctatttcttgaccagccacagagatgatcttttgcaagctgcagccccataacttgctaatggaagggcaatatttgatcctttattctctgaacaaactgggaacaaaattaacttttagggataacatagtgcagtgtcctacaaacatttacaggatcatttatgtgataatcataaaattcttcattattcacaaataattttatacaagatgttctattatctggagattcggaaataaatgagatgaggtctctggactcatagtaccttcatcaccacccattcttcgctatattcatttggcacttaacaataactgtggctaaacagtggaaggagaatctgatttagtctgggtaataggcaaaccttggagaagagattattttgtgccaggccttgtggggtaagttctttctagccttattgcccttaatgagccttgacagtcagctaacactgactctaaatatttaccaaaatgattaaagattaaaatagaaggatatattaatgtagtattgtatagttaatgttaaataaaaatgtaattttgaatggattagttaaactggggagataaacagattcaagactggtctccttttgtttcctgaaataagcagtttagaggggtaaggtgagagggatctattgatgggtgtttttaaaaaacaaaacttgacctcataactgacttatgtattgttgtggtcctgatggtaattgtgtctctccctatctacgtgtccacccgtttacaggggcttttggtcatgggtatgatatgcacttgtggccacctgaaatcctgttcctaatgctgttagattttccttttcagagtaagagggaccatctcctcatgaacgtcaaatggtactaccgtcaatctgaggttccagattctgtgtatcagcatttggttcaggatcgacataatgaaaatggtaaatatgtccttgtggtttgatttgtgtgtttcttagctttgggcaaagttctttctaaagacatttcattaaatgaagataactttttgaaaaatggattttggagtgttggtaggccttatgcttgatgattcacattggctaccagttagtcacgtgaggtgggtctgtccctctctagttccagatgaggaaactgaggttgagagatgctaaggacgttgctggggccatgcattgtctaagtggcagtgctggcgctggcatcaaactttgcctggccctgatcctgctccacttttctcacagtcaacaaaccaatgaaaaacagcttggaagaatgatgttctttttttatctttctgttttttttttttccttctttgaaactataaaaaaacctctgttaaagcgtgtaaattatagttccttgttaaaaatattcttatcaatggaaactgtgtaagttcactccattttgtaatatttagcaagaaaaataagacaggatcactaagtattttggtagttgaaggaggtgctaggataagatagttgtttttcttctttttccatttgtgcttaatccattttggcaaaatatagggtcttactaaggggtataaaacatagccaagaagatactttgttgacaaaaactgtacattctgttattgttattcttgcaatttatgattcctcttctctattttgcatacttaacgatgctaaccaggcccggttatttagtgggtggtaaacgtgaaagaaaagttttacaaattttttttacttgttttgggaaactcagttttaatgtcgtcttaattaattttttgacagactctggaagagaacttgtcattacagacccagttatcaagaaccgagagctcttcatttctgattacgttgacacttaccatgctgctgcccttaggtaagtactggagacgtgctcttccatgtgaaggaggagtcactgagtgcaggaggtggagagtaatttctcctgatcttttagtagtcactgtattaatcagactcctcttttggcctcagtgaacatgccagtgtccgctctggattgttgagattgcagaggttctccgtgtcttcactaatctagctttacttctctctctcttttttttttttgataatttactttttaatgctgtttctatattattgtatcttcatttccttggaaattattatcctggtattgtttgctgaagtatgtgggtgaaatgttccgatgggccaggtgtggtggctcacatctgtaatcctggcattttgggaagctgaggtgggaaaaagtgttctgatggtctgcagtttactttctaaagatttaattcctgccactagaaaagacagagaaatggatgaagcagatatggcagcgtgtaattacttgagaacccaggcaaaatttatagagattttcattgaactattcttccattttctgtatgtctgaaaaatttcctactatacagcttcattggcagggggaggagatgggtagaaagatattgaagatttcattctgaggcagaaggtaacattccagccagtcataatgtcttcagaaattatgtcaaaaaaatgaccatgacatttgcatctttgggtattttctgtctctttcaagaaaaggatgcccataatggctcattttgtgtgtgtatggctgactttgtgccttttaagtggtataggaagtaagactactgatattcttaaaaccctttcctcactggaaataaagtggtgaaagactactttttttttgttaagtactgtaatatggttttaacaaaatactaggattttggtagcttttatcttaaaactacaatgagttacaataatttctccattctggtgctcagatggtattcaggaaaaccacctggagtcttttttgcaaagctacatagctaaagtcagttatttcaaggtaaattagtagcaactttagggcaggctttggcaagcttttcgggtcagctgatgtttcacatggtatctgttgcagtgactcagctcagccattgtggcataaaagcaatagacaacatggaaataaatgaagtggctgggctgcagtaaaacttgatggatattgaaatttgagtttcatttaattttcatgtgtcaggaaatattcttcttttgctttctttttcagccatttaaaaatgggaaaactcttctctcaggccacaggaagcaggcggtgtgccagatatggcttttctggccatagtttgccaactctgctgtggggtatggcatggatgtagttaggtttgacttcttacaggaatttagatgaatttagagagtttctcagtgttttataaacttcttgtgaacttccacaagctttgtgtgacttttaagattggctttccaagcttaagctcacttgctgaacaaaggaagttaatgcagggttgattatattgatggaacagttaaattgttacctgggaccagtgacttaatcctggaatattgttagctgggaccagtgacttaatcctggaatattgttagctgggactggtgacttaatcctggaatattgttagctgggaccggtgacttaatcctggaatattgttacctgggaccggtgacttaatcctggaatattgttagctgggaccgatgacttaatcctggaatatttcttgtcttttttttttttttttttttgagacaggatctcgctctgttgtccagcctggagtgcagtggtgagattatggctcactgcagcctcaaactcctgggctcaggcaatcctacctccccaagtagctgggactacaggtgtgcaccaccacacctggctaatttttgtatttttcatagagatgaggttttaccatcttgcccaggctggtcttgaactcctaaacttaagcaatccacccactttgacctcccaaagtgctgggattgcaagtgtgaaccaccgcactcagccaaatcctggaatacttcttacactggtttgcatactctttccttcctgtttccgtcttgtctcacgggttgagggaaaagattttaatcgatttagagtttcagttgaacaaatatgtgagatatgtaactgtattcaacatgttttgacataaatgcttaaaatcaacatatttgagtacttatcattggtattgagatttgtagaatctttttttctgagacggggtgttgctctgtcacccaggctggagctcagtggcttgatcttggctcactttactgcaacctccgcctcctgggttcaagtgattcattctcctacctcagtctcccgagtagctgggactacaggcatgtgccacgatgcccagctaatttttgtatttttagtagagacagggtttcaccatcttggccaggctggtcttgaactcctgacctcaagtgatcacccacctcagcctcccaaagtgctgggattacaggcatgagccaccacgtctggcccatttttatctttagcatttttagaagaacaagttatcctaaataattccatctgatttccatgaatttactgtagctaagtttacaatcagatgtttcttggagatgtgtaaatgtgtaagtcactgtcctttcactggccaccacagctggagtgctacagtggtaatactttatcttcttttcactgggtatataattataatcctcattaattagtttttttttctcctgtggtgttttctttaaagtggtcataaaaagtggtagctgctttataaaacttttaccttgaatttgattttgtaagtgtcaaatacaacatccttttgtgacttggatttttttcaaagacatcagatgacaggtggttgtttggtcactgaacaagctggcctaatggtgcagtgtcgcgtgagtgtgtggatgtgctgatccagtggtgcagtgtcacgtgtgtgtggacacgctggctttgtggtgcagtgtctcgtgcatgtggacgcgctggcctaatggtgcaattttacgtgtgtttgtggatgtgctggcctagtggtgcaattttgcatgagtgtgtggacgtgccggcctagtagtgtagtgtcacgtgtgtgtggacgcactggcttaatggtgcagtgtctcatatgcatgtggacatgctggcctaatggtgcaattttgcacgtgtgtgtggacgcactggcctagtggtgtgtcgcacacgcatgtgtggatgcactggcctacttgtgtggtgtcacgattgtttgtggatgtactggcctagtggtgctgtgttgcacgcgtatatgtggacacactggcctactggtgtgtcacgtgtgtgtggacatgctggcctagtggtgcagtgttgcacacatgtgtgtggacgagctggcctactggtgtggtgtcatgagtgtttgtggacttgctggcctagtggtgtggtgtcacgtgtgtgtgaacgcactggcctagtggtgcagttttgtgtgtgtgtggacgtgctggcccagtggtgcagggtcacacgtgtgtgtggacgcacttccctaatggtgcagggtcgcgttgctgtcacttagtgatccggcctcgctcttggcagcagcgctcactgtgaaagaagctttgcctgtcccattactcccataaaacagaatgggatggcagtgccccccagcagtctctgtttgttctctttctcttcacgaaggtagattagcttaaaaaatgtttggggtgtatttggtgggggatggttaaagttaagctttaccttttttttccaattttcttctcatagtttattcacagaaataatttattctttctccatagttataaaccagtactactaaaaataaattcaattttgagagagatacaaataaaatagtctgtgggcacatgaaaagggatcaaacaaatgtaatgaaaaaaaccatggggaacaaaaaagaaaaaagaaaaagactgatcatgttagtgcttagcaccattcttcttgaagatcaaagggctcggttgtgtggtttcatccggtcacagtaactctgagggggctcttgccattccattcactcaggaggaaactgatgtataaggtttgctttcaagctggtgctagagttgggttataaaggaggagagagagctttatcctttagccatggtgaatcaaaaggaaaacaaaatgccctgtagtttctttgtaaattgtgagattatagctttttcctaccagagtttcttcctataagaaaatctgagcccttcgcagttgtagaaatgtgtgttgaagttcagcattactgcattgctgttagttttgaattgttgaccttagctatcccttatctctacctttcaaggtaagtttctacagctgctgatcttatttcatcacactttatccataaccaccatagagtaaagttagcattttgaatattttttgagttctgtttattcccgggtaagaatttttggctggcattgtggtataatagactgaagttagaggacttgtgtttgagtcctggctctgctgtagccttgtggccagtgtcacgttttttaacgtttgagctaacctttgacaaacttgttcaaggtcacatgactaatgacagaatcctgaaccaaacacacacatctggttccacatccagtatggtaaggagtgtgaaagtccctcaaagagcatctcaggccctagtaacatgtgtagtacactccatagctcattgaatttctgctgagttcttaaaagtataagtggaagaaaagaaaaagtgaaattaagtgtaattttgtactgagttaatgatggtgtaatcactcagcatacacttattttactatttctctgtggcctgttggcggaggagggattagatatttagattccttcaggtatatggagaagagttcagcttagggagctatctcaacacactccaagaacgagcagataaacttgtaacttgtaatttgttttctgtgctactttttctcccctaaggataatgttttattaaggatccaaggatctggagtgattgctttgtgattggactgaggacatgtgacctggggaacattcttgggtttattgtgtactcgcatcagtgcattctccagtattgattgtggagggcagcacaggagatcgtaagtgtcttgctgactgaggactgttttccagctttctgattacctgcttcctatttggaggagtcacttggggaaagaaatatcctactgcaggtcaggttataggctgtcattttacccaggggctcctattataggaagatgctttaggatgaattttctggaagaccagggccaaggagccctaaattagctgtttgaggcttccagtctgtttcttttcattataaattaatttatctccctactttgttatgagcaactaggttcatgtatatgtttagggcttgaaacagattagtcacatctgtggacagtttcccaaccattccttaaaacatttaaaaatcctttagtggccgggcacggtggctcacgcctgtaatcccagcactttgggaggccaaggtgggcagatcacctgaggtcaggagttcaagaccagcctggccaacatggcaaaaccccgtctctactaaaaatacaaaaaattagccgagtgtggtggctggtgcctgtagtcccaggtactagggagactgaggcaggagaatcgctttaacctgggaggcagaggttgcagtgagccaagatcgtgccactgcactccagcctgggtgacagagcgagactctgtctcaaaaaaaacaaaaaacaacaacaacaacaacaacaaaaaacaccctttagctcctgcaagttctgtaaggagtttcatggtgtctcagagctcttagttttgcagtttaagaatccttatctggctttaatctacagttgtttttatatgtgaaataactttgacctacagcatttttattgttttgtctatacatgcttagtacttcattagacatcataacctgtcaattgctttatttattcattcatcatttaacactttttattaatctactagtagatgaagggctctatatttggtgatgggaacctacccagtaagatattccgtctgcccttgagtacttcatagtatttgaaaaactttcttttatttggagctatttttagacacacagcaaagttacaagtactcaggttcaatatatccctcccctaacctcccacaatgtgaacttcttctacaactatagtacagttatcagaaccagggaattaacattgatacaatagcattagactaaagattctctttgattttcagcaatgtcctcgttgttgttctaggatcttatatgggatcccacattgcatttaattatttctccttagtctcctgcagtgtgtaatggttctccagtctttccttaccattcatgaccttccttggtattgtaaatattattgatcaattgttttgtcaaatgtccctcaatttggcttttctgaagttaggcattttgggcaagaaccacagaaattacatgtttctgagtgcatcttatcatgggcttcatgaggttgataatgtctaattactggtgacattgaccttgtccacttgatgaatgtggcttctgccaggtttcttcactgtaaagcagattttcccctgtgcttaattaacctgggagatactttgacactctgcaaatcatttatctccttaaattttcacccagtgattttaagcacctatcagtggatttcacctgtaaaagttacttttgtgaagcttgcctatggtggtttttcatttttttttcttttcttctacacttattaattggaattccactgtagtaaagaaatctcccttttatcccataaatctatttgagtatttacatcagcatgaacttacggatatttattttgttttgttataatttattattttttgttttattgcccagctttggccattaggagctacttcagattggcccctgcactttatcagcaaacttctgtatttttttgagcactttcttatttctagctccacaagatgttctcaggctcgttttttattttctaacttccagcgctggaattagccattctgtgaggaaccggggttccctttagtggagagcagtgtttagaaaccaagatctgggtattaggcatgtgtgttactactggatatcattgtttctagatccagttagcaggcagagctaggatgtgtatgtataccagcctgtgcctattaacttcccctaaccccagacttgtaaggttatattaatttcaattccagtccaacactagaagattttattttattttttttgagacagagtcttgctctgttgcccaggctggagtgcagtggcgtgatctcagctcactgcaacctctgcctcctgggttcatgcaattctctgcttcagcctcccgagtggctgagattacaggcacccacccccacacctggccaatttttttgtatttttagtagagatggggtttcaccatcttggccaggttggtcttgagctcctgacctcctgatccacccgcctcagcctcccgaggtgctgggattacaggcgtgagccactgggcctggcctgaagattttattcttcactttccgttatttataactgctttctccaacacagaagaaactcagttctcattgtctaaaatatacttacttgtttttgtttaattctcaaatgcatacaacttagtttcagaatttgtaacccacgtcttggtgagaaacccgtttattgactctttttgttttcggtcttatagtgccaaatactgcttttcctcttacttaggtcagttctgttctttcttacctccttatgtgcatttgtttatttgtaatacatttaggttcatttgttgctgtttacatcctatttttggtttctccttgttgacctggactgtttattttatgggtgtgtgagagcatgtggactattgctgtggttctaagagtcagggttataagaagatactcttcaaccctgccaccatgttcccatcctctacttctttccctcttcgctcccaccttgctgctctaggttactgatcattttacttgctggatcatccttccagcattttcttttcacaaatcagcagatacatgcctcttttcttaaaaccccgtctttcttatatgaagggtagaatactgtagatggtcttttgtactttgctcttttcacttgatgacagtatattgtgggaattgctcctatcagttcatagaggactttctcattctcttttacttccttatgttgatatactgtagttgatataactgctctcttgtgcatgagcatttacgttgttcctaggattttgcaattataaatgatgctgcaatgaatatctttgtgcatatatattttcttatcattgggaacgtcagggtgcatttataatagtgggattgctgggttgaaaggtttatgcctatgcggtttgttacatattaccaaatttcccttcagctggcatgtaccaatttgtgttccttctgataagtatgaagcagcctgttttcctaatagaatgttttgtctttttaaatttttacaagtctgataggtgagaagtgttatctccatgtttttattttatttcactaacaatgagtttgaacattttttcatatgtttgaaggatatttttgtctcttttttgtaaattgtctgtttatgtattttctattgggttttctttttgttttacttttaaaaagtgctttatacaaccgtggtacatggcaattgttgcaaatatttttctcccacttttgtcagttttcatttaattttatttgttgtattttttattgtgtaaaatgtatttttatctaatcaaatttatcagtcttttattgcctctggattttgagtcatagttagaaagcctttccctacaccatatttaaaaaataattctacccagttgttctaggattacttattaaaatacctatgttgattgtagtggtttgagatgtcaccattgtcttgctttccatatgtattttgtacttgcttttttgttttgttgttctattgtctatgtgtcagcactacactctgaattacagaggctttatagtatgttttaatatatgttcccctcttttttagttatttgtttttccatgtgaagcttaatattttgttttttttttttttaaaaaaagcttgttggtatttgtactgggattgtattggatttattaattaatctgtggagaaatgccagtttgagttttcctatctaagaacatggatgttttaccattgttcatatcctcttttttgtctttcaggagtgtttaaaaatcttccttgttacagattttgtacagttttggactttttccccctaagctaataatcttaattttttttgttttttttttttgttttgttttgagacgaagtcttgctctgtcgcccatccttgtagtggcgccatcttggctcactgcaacctctgcttcccaggttcaaacgattctcctgcctcagcctccaaagtagctggcattacagacgcccaccaccatgcacagctaatctttgtatttttagtagagacaaggtttcactatgttggccaggctggtcttgaactcctgacctcttgtgatctgcccacctcgacctcccaaagtgctggaattacaggtgtaagccaccacacctggcctacagacatactttgaactctatcctgtaataataaagaatacacattgatttgtgtatcttgccaccttctcaaaaattggtcatatattagatcacagaaaaaaaatcattccgattaaaatgcaataaaattgtagtttactaaggaaaacaaagaacagaagaccctttcacctggaaatttaaaacttcctgttaagcaactcctgggcaaaaggggaagtacaaactaaaattatatatatattttttttatttatttttatttttatttatttatttttgtccaggcatggtggcccacacctgtagtcccaacattttgagaggccaagctgggcagattgcttgagcccaggagtctgagaccagcctgggcagtatggtgaaaccccagctctacaaaaaattgttgggtgtggtggcacgcacctgtagtcccagctaccgggaaggctgagctggaagaatcacgtgagcctgggaagttgagtcttcagtgagctgagatcaaaccgctgcacttcagcccaagtgacagagggagaccctatctcaaaaaaaaaaaaaaaaaaaaaaaaagactgggtatggtagcttgcacctgtaatcccagcactttgggaggctgaggcaggcagatcacgaggtcaggagatcaagacaatcctggccaacacagtgaaacctcgtctctactaaaaatataaaaagttagccgggtgtggtggcacgcgtctgtaatcccagctactcgggaggctgaagcaggagaattgcttgaacccgggaggcggaggttgcagtgagtcgagatcacgccattgcactccagtctgggtgtcagagtgagactctgtctcaaaaaaaaaaaaaaaagaattttttattaataatttattttttattattaataattttttattcttaagactccatcttaataatgataataatagctttcaacagatttgctactgtaaacattctgtgtgtgctcgtgcacgttgtcctgagtctttggagtttgcgcatgcctggggatacgggaagaccttcccagttattggtaattttaagagagtgaatttctaggccacagttttcatttgtattgtctccttacttaagaggggctctcttgtctcttcttcatccttttcatatagccacctcctcttggtagccagaagacccttcggatgatgccccaggtgtaaaactctctggggcccgccccactcggaaggattactgaaatgagtcatttccgggacgccttttttactgttgaatgaaaggatgctaacacatggggcttccctgtctttagtcatatttctgttaacagtgaagcattgctttagatacagagtatacaagactttaggaggctctggaactggttatttcagcaaggtggatgtgatggcaattttctcttaacggtccctcctcatctattctgtaaacaatgtcaaataatgtcctacttttgacagagatcatggtgagaagagtgctctgataaaaaacactgaatacttaaaatcatacccatacttctgcacacatatacacacatttttaaaggtaaacactgttcatcacgagttgatttgtaaaatacttcaaatgggtgccacccagtcagagccaatcctggtggccttacctggttatggaaaccctttcttcagctctgctcaatactcagtgtttgagggctggctaactggcaagattatgaatcattaccatatggctacagctatatggtaatgattctcattgttttactttcctctagtagttttttaatatacagtacaatgtagattttaagtgtacattttcagaaatgtgtttgaccctaaacaagacctggcatattcccctcatctcaggaagttccctcaagatccttccctctaaaaacttcccacccaaaatcaccaactgttcaggtttctctcactataaattattttttcctcttctaaagctcatataagtggaatcatgcagtgtatactgtttttgtgtctggcttcttatactcaacatttaatttttgagatttgtccatggtattttatgtatcactagatctttgtgtagtattttattgtacatatatacgatttgtttatttccctgttgctgcacatttgggttgttcctaggctattatgaataaacctttcatgaataatagcaacaataaaaatgtacaaagaaggaaataataaagataaaaacaaatttgggaggaagaaaacttagatgtagttaaccaaattctttttgttttttaaaaatttaataccttgtttaaaaaatacattatgaccagctgggatttattccaggaatgcaaggttggttcaggttttcactctattgatagcatatatcaaactattaactctaaaggaggaaaccagtcaattatttccaatactatgattatggtttgattgtctgtaaagctagtgtcatatttaataggaacacatgagagacatttccactgacatcaggaactagccaaggatgttcactctttccacattgtattagaggtacagtgcaattagaagcataagaaaggataaaaaagtgaaatgtttaaatgtcagtacctttcacatatacaaacagaatcaaatagagaaagggcttgatggtagagaaaaatcccatttacgacaacttcataatcatttatcagatgaaatgcttctattcctgttgcttttggctttctgtaagccagtagtttcttccctcacaggagacatttggcaagtcttgagacattttttgttgtgaggaagaaatgtgtatgggtgcttctaggtagaggccaaggatgctcttaaatatcctacaatgtacaggacagcctctgacaataaataattatttagtacaaactgtcattagtgccaagattgataaaccctgccctaaacatacctgatttctagtggttgtgtttagagttaagggttttctttacctttaattgatacattaattactccagtttaagagtgaaataacgaacaataataaaagaagaatcaatttcctttagtaatgtacaataataggaataacttactttacatagcattgtgtagtagagttttgtaggctttgtctttataagtgcagtaggtgttatctctattttactgctaaaggaacctatttcttctggctttcggggattaaatcaccttgtatggatgagtggtttcaaagtgagctagttgttcatttgtaaaaaagatcatacctgcattttctttcccagaagcttattttagttctagttaaatactagaagaggcagttctgggcctgggaagttgatgcttagtctgtatttttccttgaattggatcttactatctacaaatagtaggtatgaatactatagcacttctaatagaactttctgctgtgatggaaatgtcttataaatctgtgttgttcactatggtagctagtagccatacgtagctatttagatttacataagatcaaataatttatttgttaagatcaaataaaattttaaattcagttctcagttttatcagtgttgtttgaagtgctcagtaaccctggaatactttctattctgtagcttctattctatagaactatagatactttctaatctatagttgccaaagggactttatatcaacagcattgttatttaatttaaaaaatggagatgggggctgggtgcagtggttcacacctataatcccagtgctttgggaggccagggcaggaggatcacttgaagccaggagtttgagaccagcctgggcaacctagtgagactcccatctacaaaaaattttaaaattaaccaggtgtggtgagatggggtctcaactaatgttgcccaagtttttcttgaattcctggcctcaaataatcctcctgtcgtagcctcccaaagtgctgggattacaggtgtgaagtcactgtgcctggctgaccctgctttggttacaggtacttaagcccttaaggtaaagaagaaccttgctttttaatttcttggtaggaagtgaatgaatgaacccacgctgataacccctcagccagcttctcttcctaacactgtggccattagctggtgtgtatgttgttaccgtgcatactcatggagttcttatcacaacagatagcctgctcaagcagtgggaggccacgtcctggaagtatgctgcacggcttttgatatgaaatgggaacttttggtcctccatttccatctaacctcactgtagcctttggcttccacttggcattaaagtgaccaggagggagttagagttcttaagcctcccctgcctctttgggaatcctggagtgagtgtatgtgtgcgtgtgtgtgtttggatttggaagttaggcctcaccacgtgatataatgcttctggcatttacgttgatacttggtgcatggaaacattgcttaagccgttttggagtaagtattgtagggttttcaactacaggttggtttaactttaggtggtaaatgaacctgaaaactttactccactttattttagtatttctatgggaaagtgatttctaaccttatagccatttaaagttaccccaaaatttgaaaactccttgtatattggggcccatgtttatgcaaaaaagttaaaatttctctaggttttaatttccaagtaactttatttgttgcacattgcaggagaagaaaaatgtttattggccagaagctgtattccaaagacatgtcaaatattccacattttagctttaaacagttaaactttctgcctatcataatatagtaggaagaaaggctcatttttttttatgatttagaaaggctttaaactgagtttttcttatattcacaatggttttaatttttctccatttctactttgtttaatattctttctcatagtcctgtctccagtttatctttgttgttttaattaattttactttattagtaaaatggtgatataaaagcagtcagattacacaggtgtacagtgaagcagtcatgaaacagctgaataggtgaaataaagtgtggtgtttgtagccgattctccatgcacatggacttagttcagtgcttcctccacccttccccctccagttttggttagcaaaagcagttgagggtattactaattatttttttctctttttcccagagggaagtgtaacatctcccatttttctgacatatttgctgctagagagtttaaagcccgagtggattcatttttctacatattaggatataaccctgagacaaggtaagtgagtcacttgtgtccattcattgagaactcttttccttttctcatttgtgtgtgtgtgtatgtgtgtgtgtgtgtagtttatgcttctggacatacactagtaacatacttaaaaaaaatgactccagagtccttcagtaaacttctttgggaggagttgtaattaatgtctttgacatctaaagtggctttttgtttgctctttacttttattcagaaaaagaaaaatgagaaaatttgggttgaaagaaggtgggataaagatatacttttagtttatctgtattttgaattaagtattaagaattggtagattatttccctgattcacattctgtcaagccttccataataccatattgaaaaagactaagtaattttggaaagtttgttggttactcatttgttttgttcactcttggtaataaaactccaggaacacacactgaaatatctttagtaagactactagtatgagtcagacacatcaagttctcaaaacatcttggtaagatctatgtaacagtttgaattactatttttttaaaatgagaagcaatagggtcagagtaatttaacaatttttatgtctgtcatagatgctactttaatgtagcacgtggaagaatttttatgagtgtatatattcatacttgccctgtattgatcatgtgactgcatattttattaaggattttaaaaacaggatgttagccactgatcaagtaatatatgctctggacacccaagacatgtttatacatgtgaagatttagaaggaaataaaacatccccggccaggtgcagtggctcatgcctgtaatcctagaaccttaggaggccacagtgggaggattgcttgagcgcttgagcccaggagtttgagaccagcctagctaggcaaaatggtgagacctcttctctcaacaaaatataaaataaaaattaactggacgtggtgggctgcacctgtggtcccaggtactcaggaagctgaggcaggaggattgcttgagcctgggaagtcaaggctgtagtgagctgcgttggcaccactgcactctccagcctgggcgacagagggacaccctgtcttttaaaagaataaaaaataaataaataaataaataataaataatacttggctcaaagaagttagcaaaagaactacattaagtgtaaaggcaaaatgggtatcattttattgagaacatttttctagaggactttcagaaaccgtatgtaaaacttagaatgttgttgagtagtcaacgtaggggtagaagggaacgtgttttttgttgtggttttatgaagctgcccacagctctcttggggctcgcattagtgtatctgtctgtctgtctccctctcttcctctcaatattggatgctattttctagacagcatcagaagctagattctagatagtgcttgatgtatggatagtaatataatgctcatcaaagagtaccttttctcctttagaaaactgtgatgcttggccaggtgtaggtgggtcacgcctgtaatcccagcactttggaggccaaggcgggcggatcgtgaggtcaggagtttaagaccagcctggccaacgtggtgaaaccctatttctactaaaaatacaaaaattagctgggcatggtggcacacacctttaatcccagcttctctggaggctgaggcaggagaattgctttaacccgggaggcggaggttgcagtaagccgagattgccccactgcacttcagcctgggcaacagagcaagactccatctcgagaaaaaaagaaaaaaaaaggaaaagaaagaaaactatgatggttgagtttgtttgtttgttttttcaaaagtatgccgtgttccaatgataaagaagctggtcagtggtaatatttcttaagcatctgatattttgaaatgtttattttacatatgcatttattggctaccttctcatgtcttcctgttgcccaggtaaattgtaaaatgcttgaacttggatttctctctagatacaaaggaattggatgttattttagtgatattgtgcttatttaatcacttgatagttttcctgttgcacaagttatattaattaactaaagtagcttttgtcttttaactcttcaactctcaggtttgtaacaactaaccaaaattattttttacaaatgttagttatacatgttttgctgaatgcttattaaaagtaatatgtaacttacctttgtaaaccaggcactcactcaagttcttttcttatttttcattgtgtgctgctgacagtctttcagggcaatacatcccatcgggtttgttttaaaatatggatgcaataaggaacacagagacatgatgatagcagcacacttacaggatctgcatcctgaatcacttcccttagtgacctttctagtcaccactgattttcttctacacttgtgttccctatgtccaccttctgctttgtgtgttttaagtgcttgagtagtgttggatgacttgaactgaacaaatacttaagtgcccatttataagtaaactttgaggcaaatctcaaacttctcacagttgaagtgtaaaggccgttgtagacatttgcagcagtggagctaatgcagcctactgccttggcttgctggtgttatcccgaacatttccttatatctctgaagtttggggttagggctatagttcccacagctgctcaaatgatccaaaaatgcatctaatttaacagagtgtagaaaaactggctgtgcacagcccagttcttagaattcccagggtgcatacccttgcagaatttacctctgtttctgtctttgtttcacgtttgtgagggaggaggctgtatgataagctggtttcctatatagttttcccccagttttaatgagtaggactagtaagtagtcgtggctacatagtgtactgtatgctgactcttagtgccctgagttatttaggtaagtatgtaagttaatgtagaaaggaaatgtcaaagttcttctgattgtgtaatggtcctgggcaatactgcatataggaaagtccactggaaatttaaggaatagtgattccatgactgcagactttcatgactgttgtctccttaaataatgcaggaactttaagtgagcagttgaaagtgaaccttaagatggaactgtttatttctcagagctgattttccaaaagtagttatacgttgatttatgtaattttccatactttgttagcatattgaacagcactgaaattttggaatttttttcacatttatttgcatagatcctttttaaatttcagtgtacagcttcattttatttttttctctaacctggtcattatatttctgaatgttgtatcttgtcagggatctgattttttttgttcctgatggattaccacttattgaactaataatgtgtgatagtgggaaactgactgactgttctgtactctagaatttgttgcctttaacatttgggaagaatggatttcttggtaattggcatggaattactttgttattattaggtataaacttatatttcattctttttaatctagaatacttattaatactgataaagcatctatagtaatatagatccatactctcttatcttaaattctgaaatatgaaagttctgaagatctaacaaattttatgccaaggttggtgccaaaatgtatttgatggctgaacctaacctgaactgataggaggctatttatattcttaattcagttcactttgtgtgagtttgtgtaagttttactctaaaaatactaatatgatggaatatggattattacatgaacactgctggggtgttacatgctgtgatatatttgctgtagtgctaaaataaaaattctgaattctggtaaacctctcatcctaaggattttagataagggattatgactctgtattagtgctagccatgaaatttaagtaacaaaacttatttttttgtttgttttgagacagggtcacactctattgcctcagctggagtgtagtggcgtgatcagggctcaccacagcctcaacttacctggctcaggtgatcctcctgcctcatcctcccaagtagctgggactgcaggtgtgcgccatcatccctggctcatttttaaaattttttgtctagttgaggtctcactatgttccccaggctggtctctaaatcctgggcttcagtgatcctccctcctcagcttcccaaagtgctgggagtacaggtatgagccgctccactcagcgggaacaaaacttaattgggcaaaaatttagggggcataattttttgcccaagtagaatacaaactactaagagattgtgaaaaatgtgagagccttaaatctaatgttgacctgactttgaaccctgaggtaattgggctttgcttttggagtttgtttttgacatttctgcactcagggagtgttcagttttgtacatgtgaacaagattcatccagatttacttctgtggtgagcatactctgcaagtaatgtcattgtgttctctgtttgtttgaagggtctgatccagagtctgccaagaaacttaataaagtcaataaatttcagctcagaggtcttcataaataaagccagttaggaggccttaggtgcatttggctaaaacaccagcgtcggtggttaaactaaaatataaaatagattggtcttagcttacaaaaagagatgaccatagggacgtggttatatgcctctctttactgtccttagttgcttttttcatttgtctaacaccttctagccatttaatctgacggcttgatccttccagccatctggtaagatctcacctcttggatctgggtggcctgggttctagtcccgtgctgctacttaatcctcgtgtccatgggtaaagcatgcactttctggactctgtttctccatcagtaagatggggatgatgaaagctaccctgcagaaaacttctgtaaactgtcagattttttgtttcttcttgggaattgcagaagtaattacaaattttcttttagagacaagattgaaaaatatctaatttttttttttttttttgagatggagtctcgctctatcgccaggctggagtgcagtggtgtgatctcggctcactgcaacctccacctcccgggttcaagcaattctcctgcctcagcctcccaagtagctgggactacaggcacccgccaccactcccagctaatttttgtatttttagtagagagggggtttcaccatgttggccaggatggtctccatctcttgacctcgtgatctgccctcctcagcctcccaaagtgctgggattacaggcaggggccaccgtgcccggctaaatctcctgcaggctgtccgcttttctcccacctcttctcatccttttctcccttctcctcttcctcttcctagaagtgtagttttgcagcagtgttgaggcttatatgttactatcattatgttcaggagcagtcataaacttgaggcatttacagggactatactttctctctcctagactgacaactgcaataatgttaataatagcaagagttaagagttagtgtggtagttagaatactgtgtgcattttattttgttttaaaacagaatagttccttgtaagtagagtagaagacctttattaactgaatcatttgaaagtatgttgtcaccctgaagctctttcatactccagtattttgtgtagttcctatgaacatgagcattttcttacataaccacaatacagccctcaaaatcaggaaattaacaatgaaaatattattaccatggtattctcaggccctattcaaattttgccggtgttcctaataaaaacctacaacagaaggatcttgtttggcattatggatttagttgtcatatttgtttagtctccctaaatctggaacagtttttcagttgcttcttggcttcatgaccttggaagagaataggccaattattttgtatcctgtccctcagtttgcgttattgttattatttttttaaatagcaatggagtattattatgttgcccaggctagagtgaggtggctattcgtaggtacggtttaagtgcactgcagcctagattaagtgatcctccctcccccctcagtgatcctcccgggctcaagtgatcctcctgcctcagcctccctagtagctgggactactggtgtatgccactgtgcccagctgtccctcagtttgcatttatggtgtttccttattattagagttagatcatgtatcacagaaattttgtgttcttttcttctgtatcctgtcagtatacaattcttatttgtccagttgctggtaatgttcactttgaccagttgctggacgtgatgtctgccaggttttgccattgtacggtgtctctttttccctttttaattaataaccattttgtgggaggttgctttgtgactgtgtagatctcatcttcatcaaactttcgatttattcatttatttagcggaataatggcctcctattttatttaattgtttataacctgctgctgttgttattcattttgaggtcagattgtcccagtgtttggagaatgatattttaaagcctagatttggtgctaagtgtgctcattactttgtgttgctgctctctgaccttctgagaaacagagctagggagtgcgtgtgtttgtatctatcgcatatataatgcacacacttgcacctatagttttgtatttatgtgtgtatattcataagttcatgtgaaattctccaagttcaatccagtactacagaatttctgctagtttattcccttttccttatgtgtaacattcttctttaacattaagaaaccttatttcattatttttaatgtctttatttcttaattttctgtcactttgctctgtgaccttgggaccatttttttcctcaacataaatctttatacttaagtggaaaagttaacaatctaaaacacctgtatttcaactaatttgaatttgagacattctaaaatttacttgcatttgagtaacagttcccttttccactcaccacagctcgtggtctttgtgtagcttttgaagatgagcagctagagctggatacaaattttttcctgtttgcttttatctgccatcacatttgaattctcagaaacatttacctgagatggaaaatattggagatggttgagagtacatgtatttttggaaaacaaagcctactgaagttaagataactttaataaaacaggacaaaagcctgtttttcatttgatcatttgatttgatcatttcaaaaaccctttgatcatttcaaaaaccctttgtcagataacatctaggaatgttacctggagtaatggaataacacataacaaaacttttaactgcggagctgagctccaaagaattaagagaaactgaaaactaaagcagtaagctgatctttcagtagctcatggtgaggctggattgagtttgttaacattttccaacctagaggggagtaacagggaaacccacctgtttagggttgggattctgggcccttcagaatatgagaactctaggataagaaggcaatataaaaagtggtctcatgccagtaaacccttcaagatacctggcagaagcatatgtaaaatgttttttaatgggagacaccctcatccaagatcctgtaggatccccacagataaaatatccttgaatgccaagctcaccgtcagaaatatcggaagaaaccatgtaccattaactgtggtcagatgagacaaacagcaagacacacccgagaacttcaaatactggaagcttcagaaagagactgtgtaaaaggcttaaataaaatatcactttcatttctctctcatgtaagcagagtttgaaaggaagcactcctagactaggacctcacagtcatcaggggtccaccctttactaccttgtctgccactgttctcttgtttcaaggttggcaatgtagtgatggccattacatccagatttccgcctggaagaaagaggaaataggtaaaaactgcataccttctccctttaaaggcagtttttataatttgcattggataatttttttaatctcattagaccgaaaagaaaaataaatcaggctgggtttggtggttcatgcctgtaatcccagcacattgggaggctgaggcggtggatcacttgaggtcaggagtttgagaccagcttgatcaatatggtgaaaccctgtctctactaaaaatacaaaaaaaaagggccaggggcggtggcttatgcctgtaatcccaccactttgggaggccaaggcaggtggatcacccgaggtcaggagttcaagaccagtctggccaacatgggaaaccccgtctctactaataatacaaaaatttagctaggtggggtggcgtgcacctgtaaccccagctactcgggaggctgaggcaggagaattgcttgaacccaggaggcagaggttgcagtgagccgagattgtgccattgtactccagcctgggcaacaagagcaaaattctgtctcaaaaaaaaattaaaaataataatattagctaggcatggtggtgcacacctgtaatcccagctacttgggaggctgaggcaggagaatctattgaacccaggaggtggaggttgcagtgatccaagattgtgccattgcactccagcctgggtaacaagtgaaactctgtctcccccctccccggaccccccccaaataaaagagaaaaagaaaaatgaatcagactcatgctttacaggtgaattctaccagtgttccagagaacagagaaagttgttatgggtcccctgagtcattttatgaagctaataaaacctttattataaaaccaggttaaaaaaataaaatttataggttcaatcttatgaacatgaatgtaaaatgtttaaatgaaatgttaacaaacggagtctagcaaggtaaatatgcatgtccaaatttatagaatataagaatgccttaataatttatctgttagcatatgttgcctcttcgacatatagaagaagaaaacatagacaatcatctttttcttaatttttaatttttgtggatacatagcgtatgtatgtggtacatgagatgttttgatacaggcatacaatgcattatagacacatcatggtaaaatgggttgtccaccccctcaagcatttatcctttgtgttaaaaacaatccaattatactattttagttattttaaaatgtacaattggattattattgactatggtcaccctgtttcacagtcaaatactagaccttattcattcattctttttttgtacccatgcaatcatcttaatgtagaaaaagcacttgataaaattcaacgctctgtaataattggggaggggactcttagaaaaggaaaattaattgtagaatgaatttccttaatctaacagaatacttaccataaacttacagcaagcaccatagttaaaggcagagtgtggaaactttttcctctgaaaccagaaacaatagcaggatttcaatatccattaagacttgaagaagaaaatatgtgagggttggaaatgaaaaaatgaacatttattaataaagtataattttcaccataggaaatctgagaaaacttgtgaaaaaattagttttattgttggtgttggttttgttttgtgttgtgttttttttttttgttgaggtggagtctcgctctgttgcccaggctggagtgcagtggtgcagtctggcctcactacagcttctgcctcccaggctcaagtgatcctcccacttcagactactgagtagctgggactacaggtgcatgccatcacgcctgacttatttttgtatttttagtagaagctgggtttcaccccattggccaggctggtctcaaactcctgacctcaagtcacccaccacttcggcctctcattatatttgtgagcccccgggcccatccaaattgttaaagctaataggtaaatcagcaagcttcctggatggatggatggatggatggatggacagatagatagaaagatggacagatagatagaaagttagatagatagatagatagatagatagatagatagatagatagatagatagatagatagatagaaaactcagttcagttcaggccgggcgcggtggctcacgcctgtaatcccagcactttgggaggccgaggcgggtggatcatgaggtcaggagatcgggaccatcctggctaacaaggtgaaaccccgtctctactaaaaatacaaaaaattagccgggcgcggtggcgggcgcctgtagtcccagctactcgggaggctgaggcaggagaatggcgtgaacccgggaagcggagcttgcagtgagccgagattgcgccactgcagtccgcagtccggcctgggcgacagagcgagactccgtctcaaaaaaaaaaaaaaaaaaaaaaagaaaacgaaaactcagttccatgtctagatatgcggggcaattagtaaatgaaatttaaataaactgcttctgaatacttctcctctcttgatgtgaagttagtactaattagaatatctcttccaaactttttctctagaatttcctgagtgttgcttcccctccccgccccgcctccccattttggctttaaagtttcttgttaatgaatacaacgttgtagacattttttgtttctgggaagtaggaaattctttaagataaaacttaggcaattttcatgttacagcttttacttacctttgatagaggtacataatctactcactacaaatttaagtattatagtggacaaagtggtttttttaattttagaaaaaattgatttgaattgtgtattcttctctcccactcagctctcatttagtctattcagaagtgctaatcctacacctgttgttcacttgggattaataggaggagagaaggatgtctgggatccagagattatagatgtacatggggatcacaggacttctgggaaggccttggcagttggcaacagatggaaatacgagggtgccaggttgcagattgtatgtacatccctgcaggctggcaaacgatgggctagaaaatgtggtggcaggagtgaggtccaggtgggtagtcagcatcagtacacaggcagcccgtgttcaagagaactaggagagaaaacaaggcccctctctgggatgcccttaagcactgagtagggtaccagggtgaactcagtgtaaagcaaggcttgctccatggaatcagagccccatttctaaaattggaatttgtggttgaatgtgacctagtggctaacctaattatggaactgctcggtttcaagactccttgagattctctgaccaggaggaggaggaggaggactgatcctatattcttgagattggagtgagtttggagctgggtgttaattgacttctgtttgggggtgagagcaccatgactgcaggcagggaggcaggtcattcattgccccttgtgtcagctctccagatgccatgagagctgatggttgtggccgggcgtggtggctcacgcctgtaatcccagcagtttgggaggccgaggcgggaggatcacgaggtctggagattgagaccatcctggctaacacggtgaaaccctgtctctgctaaaaaaaaaaaaaaaattaaaaaatttagttgggtgtagtggcgggcacctgtagtcccagctactcgggagactgaggcaggagaatggcgtgaacctaggacccggagcttgcagtgagctgagattgcaccactgcactccagcctgtgcaacagagcgagactccatctcaaaaaaaaaaaaaaaaaaaagaagggagaactgatggttgtggaggctggtggatatattttctgtttgtttaatatatttaaaatttttctgtttggaattttatattcataattcaaagaggagttatgagactagtacaagaaagaacctccatatatcttttactcaattcaccagttgttagtattttgccatatttgctttatatttattttattttattaccttttaaactttattataggtttgctctattataggttgagcatctctaatctgaaaattcgaaatctaaaatgcttcaaaatccagaatgctttgagcaccgaagtgatgccacaagtggaaaattccactcctgacctcctgtgacagatcacaatcaaaacccaatcaaaaccttgtttcatgcacaaaattattagaaatatacactttatgagataacctctatctctttttttgctgtattgctgtctgtgtttaccatctttgctgtctgactctctctgtggtacaggttgaatctgtcccttacctgaaacgcttggggttagaagagtgttttggatttcatgttttggtgggggagggggaattttggaatatttgcttattctatatccttaatccaaaaatctaaaacgttccagtatttcctttgagcatcatgttggtgctcagaaagttgcagattttggaacatttttggtttgggattttgggattaggataactcaacctgtattttcctttcctgaacaatttgggaatgaaatatagacatcacaccctttcccctgaatactttagtgtgtattcccaagaacaagaaaattatcttacataactatggtatgattatcaaaatcagaaaaggtaacattaatacaatatgatatagtccaatatagttcatattcagattttgccagttttttcaacaacggccttcatagtaattttccccatgatcataagcctcatttaattgttgtgtctctttaatatcccttgtctctctttgttttcacaacatgtttcctcaccttttttaaagattttttatgacatcgacctttttgaagagttagaagccagttttgtcaagtgttcttcagtttgagtttgtctgacgtttccccacgattagatctaggttatgtaattttggccagccatactatatgagtgatactgtgccctttccactgcttcagatagagttctttgaggtacaaaataggagagttgggtggttccaataaagatgatttaggtagtgtccttgtccctgaaggacttagaatctaataagagaggtgcagttccccagagaggtacagtgagaggattccgggggctcctgcatttctgagctgctgccaggaaggaagtgtcttcagagtggagctggctggcatggtggtagtgtgggtgacttttccacgggagagagtgtgaaggagaggagatctggggtgtggccgctggggtacgctgcccctgaggggtaacaagagaaagggctgtctgtcttggtggcatggcatgtgaagccaactgtgagatgccagcaccaggaaagacaatgaagaggatatccacaaaggctggcgccaccattggaatccattatcacaggggaaggccattggattttggtaactcagggcatctaatgagaccaaaattagaatccacatttcttaacttgctgttacagtaaccgtttttatagtgtgctctatgtaacagtttcatgggctttcagagactgatgaatttattacatattattttgtgttgatttcttcaagtaaacattttccatatgaaagggttagatagtttgtttttttttaatatatacacttttgggaggaaattctttgctgctcatattcatattatttggctgctaggttctaattccattgcttttgtgtttagaaagtatttttctctagactgttggtagtaacagcagttttgggaatatgttgtctcacataccaataagggaaaatgttcttccagcctgtagatacttgtttcatgtgttaggtcaaaggaaaacgtatttaagtgtacttggcatttcttgtattttctaaattacattatcggcaggataagagtttattgaatcatagtttcagaatttagtttatttcatagcataaacgggagtgctatggaaatggaattgattctgcattcactgtaggaatcttgaggacactgtgtgttcttttcaacaggctttaatttcctgacattccattacatttctgggaaacagaattggcactgccctttcctgccctatcttgtcctttataattttggcgaggttcatggtcttccatttctttttctttttgtaactgattaataatctatagaatcacctcttagtttgtaagtggaaactaagcctgcacatccaaagctaggatttcttatatggatctgccttagtattttgaatcaggacctcaaatgagatttttggatgttcatgtgtttgtggcacgatgttgaatcttgaaccttcctgtctttctaattgttagaattagattcttcaagctagacttgattgggctagtattactttaggaaatgttttaatttattatttggggaatgttttatttattatttttagtttcttatctaaggaagattaagctgtttgcagaaaatacagttttctttagctaccctgctcacaataccatctacactgtgtctgtacctgtgtgacaaggccaagcactccataactttaccctgattgtttggtctttttcaaaatgtttagagtttcaaaaagaaatttgtgaagttgcttctcttaagtagctactactatgtttttaaatgtgttgcagtatttctattagttgatcttgtgtgtagtcattcatatctgtcttttgattctatttcttggtgatcttgctttttaaaatcaccatttaccttaaaaaaaaaaaaaaaagacaaaacttgctgttgtgttgacagagcagagagcatttaactgacgctcctccgtggcttggcttgctgagttcctgacagagcagggcatttaactgaagcctctccatggctgggcttgctcagttccctgctgttggctgtcttggatcccctttctaaggccccacttccctgcacactagcttggtgtgcagggagaagctgcagagtctgttggctgggctttatttacggaaacagcagggttgagattgattgcgtcgtggagagacagtgtgtggatgagggagggtcacagcacatgctcagtcctgtcagagtgaggggaagtttctgcgttctgcgtgaaggcttaggtcatagcacaagctcagtgaaagctctatgaggtctctgagactgcatgtgcctccattttgagttgttagtgtagaaaagggcagagttttagcagaaagtaaaggttcaggaatccagctagactcaccagagcccgtgttagtcatggatgatccattcagcccctgcaggtaggctatcttcccctggcctcaccgaaacagtgatgggttttgctgctctttctcacttctgaaggtgtttatgaatcatttcatcattcatagtgcatgttcctgagagcctttaattcagccctagctggccatgtaggtggtattgtgaagcgtaaaatcagaactaagaatggggactaccggagaggcattcagcagatatagaatgtgaagctttgcgggtccctctgtccctgtcctcttccccttacctcttcggctcgtagtataatcttaacctcagtcgtgctgggtgtgtgttgccaagcttgtttgccttcaagacctgcagagcaagcctgcaggccgcccccttgccttgtggctagtatggaatgcctgggccgcagagcagctctgtttggatgttttaggaaggatggtaggtgggcttctattggttgctttgaaggtgggtggaaccttgttttgattgagagcctgtttgccagagcaaattataatttttgtgatctttttctgaagtctgacatattcagggaacagttgtgaattatgattgcaacaataacaccttaaaattgatttttttaaaaatgaaaggttatgtcacatcagtttttacttagtctcttgccttcaaaaggaagcagactcatcttccttttagagcttatggaaaattctttggcaattaaaaaaagtatgcattgacttttgtgttagaaattgaagtttaggtattttgtttatttttgtatctgttttagaatcggatagcattttttgcatatgtgtatgttgtcatgtgacttggaattctattctcttaaatggagtaaaaagagtagttggtgctgagaaggcagtcattgacaaggcctcatttcgtacccactgcttgatagccagacactagtttcttctacccaggggaagttgtgcttttggggtgtcctgttgcagagcaggttcagacagatggctttcactgtggtttatttagggagccagtcagaataagatttaggacaaattgaattcttacccaagtagatattaaatgaagtttttgaattatactgtttgctcctttttgtttccactcctttttcttctgataaaggttagaaaaaatttgaatgccacctaaattttgtgcatttgtgaggatggaagaaagcatacaatatagaagaatgtgcaactgaaaaaccctcataggaaggagaagaaatttactatgcattgatacaaggagaaattccttgtgtaagctcttagtggtgtagtgtgaatttggagtgttgcatggtcaactctttccagggaggcccttgattttagtggaaagtttttaggaaggctaatgttggtgaattctagtcactgaaaatattactgaagtataatctgtattcttacagattcaattttgggattgcaactaaggagatgaattgtagaaggataatttagggtgtgcgtttattatttttgtgatcaatttttttacccatgtgagggctttcttcccattgtgaccatatttatttgggcattgcactggggagttttggggaggtaccccataccatataatgttgcttctggaactcgccttattttactctgtttaaaagcaccattgctcttccttcctgcttcttttaataaaagtatcccttcaatagacgagaggaactggacactgcaccactttctgtcatgcacttgtgggatctgggcaggactcacatttcatgctcaaggaacaaactcattgtttgagtcaggagaatattgcctttctgttctagatctttacctcttctgaaactttctttacagttaacaaataaaaatgtgaacaggaagctgtgctcacagccgaatcagctctggatcaggttcctgccactggtgtggctggcctgtgtgggcctagtacaaatctgtatttatggagcttggatgccgccatctatttgatggtgaagacttgtggttgctgactgtgatctgtggatattctgttgttaagagtcgaatttgtctatgtttcaaatccaataaagtaactctaattagtgtggtatgtatttcttctatattatcctgtctgggaaaaatattttttggaatgctaaaggcttgcttcagggcttctgtgcttgtctggtggaggaggtgagggaacagcacatgggaagttactctggtggttgatgaagtctttggtctgtgtagcttgaacatggaaaagatgctagtttgtttcattttggcttatggttctgcttctgttgcacttgagaatatcaggaaatgttgggaatgtagcaagtagatgtttcaaaaaatagagaagttcacaaagttaatatcttattagttgttcttatcattgtaatagaatctcgaattcgaatctgagggagcctcacatttaaagcgttcctctgtcaacataagttttgcagtctgtctttggttgaaagctagaatgaacttgattgtgtttaattgacatgtcacttttttttctttttctttttgagataggttctcacgctgtcacccaggctggatggagtgcagtggtgtgatctcagctcactgcagccttgacctccctggggacctccctaggctaaggtgattctcctgcctcagcctcccacatagctgggactacaggtgggcgccaccacacctggctaattttttgtattttctgtagagaagggatttcaccttgttgcccaggttggtcttaaacttctggcctcaagcaatccatgctgccttggcctcccaaagtgccaggattacaggccagcgtgcctggcctgacacttcattctttttttttttttgagacggagtctcgctcttgttgcccaggctggagtatgatggtgtgatctcagctcactgcaacctccgcctcctgggttcaagcgatttgcctgcctcagcctcctgagtagctaggattgcaagcatctgccaccatgcctggctaatttttgtattttttagtagagacggggtttcaccatattggccaggctggtctcaaactcctgaccttgggtgatctgcctgcctcagcctcccaaagtgctgggattataggtgtgagccgccctgcccggctgacacttcattcttaatcttcttttcacttcttccttgactcgtggctactgtgttaatttatgaattagaagactctaatatatctaagaccagatgtctgtgattctctagttgttcttttttcctgattcttttccttctgaatttgttttcttttccattttactttgtgtattcatttattcaacatattcataccaaagacgcatttgccaggtactttttgtttgttactcaaccgagttgtcttccaccagaaaaccgtgtattctaagactgtaacataaatgtctgacaggatgagagagaaggtagaaaataatagctaaaggaatattttagatggtgtgtacattcacaaatcttctcctaaataagcacagataattagttatcatctcttctgagcagtttctgataggggcatgcctgtattcctgcaactgtgggtgataaagcatgagtctgatttatttttctttttggtctaatgagactcatgcttgaatgtacttttaaaacaattctgaaagataactgatctcatattgtatactctatgatactttgagtctaaggtaaaacacttaattcaactgggaaaattagagattatttctatcaaacttctttgagctacacatttatttgtgattatttgatttttttccctattggacatcaagcttttggggcaggggccaagtctattcttacggtctccatttctagtagagtacctggcaaatgggtctttggtatgaatatgttgaataaatgaatgcatcatctgtggtaagaggaaaggctagatttggagccaggtagtgtggttcagattccacctaataagtgacaattgggcaagcggtgacattcgacaggttccttccctcctctgagcttcatttttctcatgggtaatctggaaataaatatttcttacagtttttgtaaagattagatgaaaacaacttggaagtgcttggcacatagttgcttagtacattattgttattaattcgcaggtcaaatgtacagtctcaagctcatgtagatatgattatctcaacaacaacatatatttttaaatttttaattaaaaaaaataggcatgcaggtctcactttgttgcctgggttggtctcgaactcctggcctcaaactatcttcctgtcttggcctcccaaaatagtaggattataggcatgagccactgtgcctggccaacatctttttatttttaatagcctgttcaactaagacaatgctagggattgttttaggaattacactaattattaaccaccagtatgtttaataactatttactgatccactttcttcttactctctttgagtgtttatgtttttctttatacatcttgttcttttttttttttttttttttgaaaaaaataagctctacttccataatttataatattgggtgtgttcagcattaaacatttcctgccactttctcacttacacacactaggtgcatgtgtgtgtgttagttattgcctgtttgtgttctcttccttctatattcataccactgcagcgaggaggaataaggcaattgtcatgtttttttataacatttccctgaggggacaaagaaacctttagacgtgttgtagacatgcttgcttggtccaaagtccctttttttttctgggggtgcttcattcagctttgttatacagtttgatttcaatatgcagaaagctagcaccatcttgggtcaggagagcagcttaatctacagtgactgctgctttgtaagtgggtttcggtcatagtggtttttttttttttttttttttttaaagttttttggctgaatctccatgtgtgtgcaggcagctttgttaggccgcagcccctaaactttgccacaggccattacagtaaagttccctaggagcctgtggtggaatgttgttttatgacgttgccagatacacggtaggttaccacataatggagaagagagagaaggcagataagaaatttagacaacggagcaaagtcactatagcactttgaaactggatctttctcacctgttaaatttttttgaccagtttttttcctgacattactcatacattattgtgtgtggaggccatatttactgcatcttaccagcatggaaattcttattattcttcaggcaatgccaaatttctagttctggaccctgaattatatttaggaggaccctgtgggagagctgccggtgtggcctggagtcttcttcagtaattaactcagtgtgaccccttaaaagagcacttttctttcctcaggccttgatttcttctattaagctagaagattggatcaatggcctctcaggaactttccacagagaaaatttagaattttatgattttggattttggacaagttcttgtgttggcctttgtatttatttgtgtgtgaatatggaagtggtaactttaagttgactaaatctctttgttttttcatttgtatttgtttttagttttatttttgattgaataatgaattttgttcctgttaggcagtttaatcaaacctacgtttaagttaattttgcttggagggctggctttctgtcacggggacttcactagctaagctttgcagcagagcccttgcttgctgtctgtggctaagcagtagttgagttagaatattggagtcatttatttattaaaaatgtatctagtaagagccagtgagttctgcattatggtgaccaaaaccagttttagttcttacccgcatgtacttccagtctagagggcaagacagccattcaaagaaataactacaaaaaataaatataaaatcctgactgtgatatgggtggaaggagaggtaagtggtacttcgggaactcataatagcaggattagcttccattctcacttattgccagtatatagagtttaataatattaatgacccctaagcaataggtactatgtctagttctttccataaatcatcttttatttttatagcaaccttgcataataacattatcaacttcatatcatagatgaggaaactaaggaattagatttaattgtgtcctcaaaatcacagagcaaacaaaacctgggtactgaaacttatttttaaaattttattagcgacagggtcttgctctgttgcccaggctggagtgcagtggcgtgatcatagctcactgcaacctcaaaactcctgggctcaagtgatcctcttgtgtcagcctcccaactagctgggactgcaggtgcattttaccatgcctggctaatttttaatttttgttgtttttgttgtttggttggttggttgggttttttgtttgtttgtttgtttgcagagactaggtcttgctatgttgcctaggctggtcctgaactcctgggcacaagggacccacccaccttggccacccaaagtgctgggattacacacatgagccagccaccatgcctggcctgatactaaaattttaattcaggttcatttaattctgaagaccatgctctttccctgcttttgaacatctagactcaggtgtgggtgtgacagtgtcatgggagatcctaataggaagtacaatgatgtttcttttaatgtttgtttgtttatttgtttatttatttattgctgtttcttaaggagcagggctaacccacagaaagtgtgcccagagtcggccagcacaatgattttattcagatttatggaaatttttctctaaaaatgaatgggaatatatgatgggatagaatacaacattcgcatggctttttaagatactatgttagattttaaaaagaaatttcagacttgttcagggcagctttgaagtatgtgttcatgctggggaaaattgagaaacccagcatattgcactagtcttccttcttaatcctcgctttcactcctacctcacaatccatctaaaaaagtgattctgataaattgccttttggttttcttaaaatgtagtgtattttgttctggacccacagacttcttctgtggtcattttctaaatgtgtactaagtagcgtttctaagatcttcattctgttgatgccatgtcagtcttcctgctcaacttaataccctgtggaaaagataagaatgtctgctgtgtgatatttaccatctgaaggacagggagagagatttctcagtgatctcattcatacatgacgccagccacagaacaagggtctgacttgagccttttctgtcccagcaccttgggaatgggccacaggctacacgactgttaggacccaaggcttggggaggggctgaatgagggggtcagctcttgcccttagttgcttcatggtggtgccttctgttcatgtgttcttcccatatctctatcctcctccctcatcttcccttgtagaatcaagtgcctatcttaagcagtcaccgtgatcacatagagatctttgggcgtctttggtgaatgttcacagaacattgccttcctgccccttcccctttcttcagggtgaagaagtggccgcatcatgttctgggccaagcctctgggttgggctgggatcctgcatctagcaggcatgctcttctcacagaccctccctttgcctgccatcgccacctccatctcctctgcaaagatgcttctccctttttgatattcatttacaggctccctgctcctttctgtccattccctgtttacttcttagaataaaacgtttccatggtaacaggttacttttcaaagggaacatcttgtcattttatttaatccactgcagttgaagaggactgaaatattaagttgtagttgctatggatactgctttgttacactggggtttttttgtatcagatttcatatacaatgactttctgtttttttaatacttcaggaataaaaacaacaacttaccattattgttgtaatttggcttctggaactatttttttcatattctaaaacaaagatttgtagaataatgtaggctgaacttaagttgttttgaaaaacatattatttacattagctacacagagaaattccttcttttgctggggatgatagtgacacttcttaattcggtttttgtaatatgattcacagtataaagatgtctccaagatgatgaatccacagcagaaatccttagtaaacataaggaaaaaataaatatgtcacttggagttaatttcttgaatctcattgctaataagctgtggccctctttcttcagttactggttcagctgtgtacagtgtaatttgaggttgatctgtttgtcctttaatcagcttttctcatgtctggtgttctttctgatttcccatctgcctgtagtatatcccccccttcatttgacttttttaaaactttaaattttttggattcacaggaagttgcaaagataccacagagtggtctcatcttttgtaactgtaatacgataccaaaaccaggaaactggcattagtagattgtgtgcgtgtagttctgtgccattttatcacatggatagctttgtgtaaccaccacaacaatgaagagacagagctatccatcactacaaagctctccctttgtggtcgcaccctccgcctccctccctctccccaccatctctaacacctggcaatcacgaatgtgtctccatttctgtaattttgtcatttcaagagtattatatacattgacctctaactttgataggtttttctctttcatcatgactttcaaacttaaaaaaattcttttgatcattttgtcttgcttgggtgtttgaaataaacatagaaccaaaatagggaaagggatatggattctcatcattctgtttgtaattaattgtgtgattttggttcagtaacttaatcattctgccatatgggagtgtgattgagagctctgactttggagtcagctgaccttgagtaggattcctgatttctccacttatttgctgtttaatcttgggcaactgcgtaacgtctcttggcttcagtgacctgacctgtacacttactacaatagcacctatcttacagggtcgcctgtaagattagataagaaaataaatggaaattgcttaccttgcaatgcctggtacatagtaaatgttcaatggatatattagttgctttattaatgttaaaattagtattgttattattattacctatggagatactgcctcatagagttgtcgtggaataatgaaataatatgtgcccagcatagaaagcacttagtaattgatagctagtattattattttgcttgtgtttgttatgtaactataatacacctagatttttttttttttttttttttttttcctctgagagagtcttgctccgtcccccaggctggagtacactggcgggatctcggctctctgcagcctccatctcctgggtttgagcaatttttctgcctcagcatcttaagtagccgggattataggtgcccactactgcacccactaccacgcttggctaattttgtatttttaggggtggggcttctccatattggccaggctgttttggaactcctgacctcgggtaacctgcccacctcagcctcccaaagtgctgggattacaggcacgagccaccgcacccggcctacacctagatttaagataacgtatgtgaaaactcttaagatgaggataaagatagatgtgtgtgtatgttgcattattctggatattacttgcatctttggtttcttaattcatacagtagtatcctttatatgtcttggctaggattcatactgcctttggtctggatttttcttccgaagttgatgaccaccctggctttgactagacctactttgttaattcagcagcattgtacatccaagcagaaacctctttagtagctatgttttgttgttgttgttgttgttgtttgtttgttttttgagacagtcttgctctgtcactcaggctggggtgtagtagcatgatcttggctcactgcaaccgctgcctcccagactcaagcaattctcctgcctcagcctcctgagtagctgggactacaggcgcctgccaccacgcccggctaagttttgtatttttagtagtgtggggtttcaccatgttgtccaggctggtcttgaactcctgacgtcaggtgacctgcctgcctcaggtgagccaccacgcccggcctgtttgtttttttaaagacagtctagctctgttttgcccaggctggagtgcagtggtgtgatcatagctcactgcagcctcaaactccagagctcaagtgattctcctggctcagcctcctgagtaggtgggattataggtgcgtgccaccgtgaccagctaattaaaaaaacattttttataaagcctgttgcccaggctggtctcaaactcctgagctcaagctgtcctcttgcctcagcgtcccagagtgctgggattccaggtgtgcaccaccacgtgtagtgctgtgttgctttgaacacaggatagaaagacacctgaatttctgtgaatagcaatactaacatgtctgttaatatcaaaacatgaattaaatgccttaatacctagaaatgagataatactgtagagcacctaggacagatagtaagtgctgaaatgttagctactgttgttattcatcaaagaagaaagctggagtcttctagatgaattttagcctccagcacttgctgaagttcagaatgtgccataatcagtgcttctcagagcatagcttgtggacctcattattattattattatttctcttttcttttcttgtcttgtcttttctttcttttcttttctttctttttttttgaggcggagtttcattctttttttgcccaggctggagtgcaatggtgtgacctcagctcactgtaacctctgcctcccgggttcaagcagttctcctgcctgagcctcccgagtagctaggattcaggcacacaccacccggtatggctaattttgtgtttttagtagggatggggtttcaccatgttgactaggctggtttcgaactcctgacctcaggtgatccacctgcctcggcctcccaaaatgctgtgattacaggcgtgagccacctcgcccagcctattagtattttttaatcccaagacttggcttcccgacttaaaagtcttctgccctataccaaaagacagtgattgtcttgaggagaagccttggttccgtcgagacatttgagttagaagcgaagctagccacttttttcatggaatatcagttactctttgaaagaacaactgacagacaaactgtggtcattcagacgtgggcatttggcagaaactttcttgaagatgaattaagtgagcttgttatttcaaggaaaacactgatactatttgacaaggctaagatttgaactttcaagtaaaaattagaatttcgaaaagcttgtactcaccactctgagcctgacagcttctctacactgaaaggcatttcttatgagatagatgatattaatatgatttttaaaaaatgctgtataaagaactggttgatatttgaaagatctgcagaactgagtaaactgacattctctataaaaccaatgcatgacattacaaaatcacatctgagtagaagatccattcattcaaaggcaagacagaccaatggatttcagagtagcacagtcaaaagactattgataggcttttagactcaccttgtgtacacatctttaagaaatgattacttgttgagtttttgttttgttttgttttgtttttgagacagagtttcgctcttgttgcccaggctggagtacaatggcacgatgttggctcactgcaacctctgcctcccaggttcaagcaattctgctgcctcaggctcctgagtatctgggattgcaagcatgcaacaccacacccggctaattttttgtatttttagtcgagacagggtttcactatgttggccaggctagtctcgaactcttgacctcaagtgatcctcccacctcggccccccagagtgccgggaacttgttgagtttttggtgtagtatcaaaaaggctatattcttcccttttctagttacatcactgtgttaggctgtattatcttcatataatttaaccacaacaatatattggagcagattgaattcaaaagtagataggagaatctagctgtcttttctattaagtcaaatattaatgagatttgcaaaaacataaaataatgcctcactttttactaaaggtttctgcttaaatgcaattactttttataagaatatgtatattgttatgtaatgggcttattgctatttttaaatcaatattttgaaagttttcaaaaatttagatttcttgggatgttcagtaatttttatttttattttttgtaataagctttatttctgttttgtccacggcttgggagaggggtccagggtagtggctggaggcgctgcttaggcagtagccctgaactttgagaggggctcctaaaagtttgctgggctctgtaggctcctcgtggtgcttgagggtgagtcttttggaagaaacatttacccagcccagcctggggaggttggtctggtagtcgccgatcttgttgttgagtttcacctcctcatctaggaagtggctctccggaagtcacagaagatgggggtctgtgcaggcagaacccagggcctaaagatcgaggatctggttcaggttcttccccagagccatggtggcttccatggaacccagggtttttacccccactcattttgagatggcttctccacatcctggaaatgggtgccgctgccacacacacatcttcaagagacactcagtgccctgaatcttcttggccgattcgtggaagaagtcactcatgcctcccagagcttgcggggttgaggagctaaccacaaaaacagtggtggctggtcccagaagcaggatatggccgagaagaagggtgctggaggttgcaaatggaggggagattggagggcagttggaggctggaacagatggagtcccaggatatgtgctgttcagacattgttgaaacaagagacagattctgggaccaccaagacacactccagtaattattaagagtgtaaaagggtacagagacctaaaagtttgagaaatgttaagtaaaagacaaaatgtagtcattgcatcaagattgcaattgatgattaagagtgtttcctggccgggcgcggtggctcacgcctgtaatcccagcactttgggaggccgaggcgggtggatcatgaggtcaggagatcgagaccatcctggctaacaaggtgaaaccccgtctctactaaaaatacaaaaaattagccgggcgcggtggcgggcgcctgtagtcccagctactcgggaggctgaggcaggagaatggcgtgaacccgggaagcggagcttgcagtgagccgagattgcgccactgcagtctgcagtccggcctgggcgacagagcgagactccgtctcaaaaaaaaaaaaaaaaaaaaaaaaaaaaaagagtgtttcctacaagctgttgatactgtcatgtttaaatatcattaatgagtgaggtgtgaaccacaaaggtgcattcaagaagggagcagttcacagactcactttgcacctggctgcagcctcatgggggtgctttttccatgtgccagggaaacattctggggtgttgtggctgcctgacctatcaagggtgatgcagctgtctggggatacaggataaaaaaaaaaaaaagaaaaagaaaaaagagaggagagcagtgcggcagcaggggagggatacttagttcagtaaggaggattctgattgctcggtggatccagatacagctggatgctggcacttccccaccatgtgtacttcttgtctttcaccttcagctcatattctgacagtttttctgtcagctgcatcaagctttgtctaaggtggtgtgttgctatctacctctttatatcttggacctaaaaagtacttttgccatttattctatattctgtaactcttgcatatagtaggctaatgccattgtctgcacctcagatcctacctgctcaaaaagaactttgttgtatttcttgctatagaaccctgatatttaaaagttacatacaatttaaaaatacttttgttgcaaagagggatttttaaataagcttttaagaagtttccttattttatcttggttttcatgttatagcctacttattagtactcttccctgttataaacttaaacaattttcaagtctcttaagatggcccaatacatttttttgtctcatttgtattattagtttaataataattatctgcatcctatttttatggaaatacgtgagatataagtagttctagtcaacagggtatttgggagtttgtttcattaccatggtacattgggtttttttaagctaaatatgatgataaattggcttattaaaataaaaatggggttgggcggtgagtgcggtggctcatgtctgtaattccagcgctttgggaggctgaggtgggggtccctttgagcccagggttttgagaacagaccgggcaacatagcaagacctcatctccaaaataaaataaaaatcaagcaggaatgttttttctggaattatcaaggacttaacagtgtagccatgatatggaaatgatatccaaccactggagaactccagagtaacagaccttctggaagaacccaaaggttgagctgcaggcagaagttactgaatggcggctgtggctgaaggtttctgaaatgatacattctggctagacctacttgtaggcaagaaagcatttggaaagtatttagagcttttggcagcttgttttgctcacagctagttagaaaatagaaaaggacaagttggaagggaaatagtggtaacgctgactgcttgcttgtttttcttaaagaagcgcttgtgattaaaataacttgtggctgatttgattcctttacatacctcctaaaacagcttcttccatttcctgcataaacctatgagaacaatccatcttttagcttcgtttttccacataccattctcctaatgaagaaatgaagatgacttgtatgatgaagtcagcccacatgcaagcatttccctgtcaccgcccctccctttcagcctgccacctctgcatgctttcatttctacttggaaagtcctctttttttttcctgctgctaggcctattatctccttctgtgtcttctcttgaagccgcctcattttggtacctccccttcacatttttgtactgtgtcttttgaagtgtcttatgttgatgaatacgggcatcggcctgttctggtgttttggtacagatgctgcctcgccagctggaggcttgtaagattcttgatgactgggccaccacatttcttcttcttcctcttcttcgtcttctcctcctcctccttgtcttcctcctccctttctccccttcttcctcctcttctttttttcttcctttgtcacatttaccaccacctttgcccaagcaagattcttcatgagaaaatgattggattaaaagaagaaagtactgggcccaggtgccctaaaggaaacgatagctttccaaaatgtatttttaacaatttcaaacacagtgggtatgggtatcagatccatgagagaaaaacaagagcatatgcctccttttaggccatcttctttgacactgttatgtttgttgccttttttatagacagggtcatgctctgttgcccaggttggagtgcagtggtgcgaacatggctcactgcagccttgacctcccagctcaagcgatcctcttgagtaactgggtctacaggcgtgcgccaccatgcccagctgatttttaattttcttgtagagatggcgtcactctgtgttgcccaggctggttttaaacttctgggctcaagcgatcctcccgccttagcctcccaaagtgctagaattacaggtgtgagcctctgtacctgtccctgtttgttgctttatccccaacacctaggacaattcctggcttatagtaggtacttaaatatttgttggatggacggacggacggatggatggatggatggatggatggatgctcagtatatgtcctaggataagttttcttatttgtattttataaggcttatggtagggcaccctgagatgttttgaacggaagaaatgtctgactggaattgtactacaggaatgtccatctctctgaggcatgaaagaatgatggtataggggccaggtgtggtggctcgtgcttgtaatcccagtactttgggaagccgaggcaggcggatcccttgagggtcaggagttcgagaccagcctggctgaacatgatgaaaacccaaattattaaaattacaaaatttactgaaatttactactaaaattacaaaaattagccgggcgtggtggtaggcacctgaaatcctagctactctggaggctgaggcaggagaatcaattgaacccaagaggcggaggttgcagtgagccgagattgtgccactgcactccagcctgggcgacagagtgagactctgtctcaaaaaaagaacgatgatgtaggaaggttctcatgaaaggaagctgcagttcttaggattttcaaaggaaaaggttttagaggtgcatgtgtggtggtgggtggtgtatgtatacagaacattagaagtagtggggacgttaattcttcctcagtttttcctcatttatttgaagagaattactttttttgaaaaatgtgtgaatgtttatgtcaaaactgtattgcgctaacttaatctgctctatttctgttccaggaggctgaacagtacccagggggagattcgtgtcggtcctagtcatcaggtgaagttcattttcatagcttccttaataggtttttgtttcttattactctgctggcactttattctgttgcgcagcatcttagaatgtggttattgctatcgggaattttttataaatacagaggttttttttccaccctcctcagatcaccacatacatttaccatctcccatttttaagtgcaaagttcagtagttaagtacattaatattgttgtatagccatcaccgtcatctatctccagaactctttctatcttgcaaaactgaaattctgtacccgtaaacagtaactccatttctcttctgcagcattggcaatcaccattctccttcctctctctgtttttgactgttctgcctcataaaagtacctcatgtgaatggaatcatacagtatttgtctttttgtgcctgatttatttcactcagcataatgtcctcatggttcatccgtgttaatagcatgtgtcagaatttctatcctttttaaggctaaatgacccattgtatgtacgtatcactgtttatctattcatccattgatgaacacttgatcacatatttttatttaaaacatttttaaagccaggcacaatggctcatgcctgtaatcccagcactttggaaggttgaggtgggcagatctcttgaggtcaggagttcgagaccagcctggccaacatggcaaatcccatttctactaaaaatacaaaaattagccgggcgtggtggcaggcgcctataatcccagcttcttgggaggctgtggcaggaaaatcacttgaaccccggaggcggaggttgcagtgagccaagactgtggccactggactccagtctgggcaacagagcaagactctgtctcaaaaaaaaaaaaaaaaaaaaaaaaagataaaagatgtttaaaacctcttttcccggctgggcgtggtggctctcgcctataatcccagtactttgggaggctgaggcaggcggatcacctgagatcgggagtttgagaccagcctggccaacatggtgaaactccatccctactaaaaatagaaaaattagctggtcatggtggtgtgcgcatgtaatcccagctactcaggaggctgaggcaggagaaatcacttgaacccagggggcggaggttgcagtgagccaagattgcgacactgcactccagcctgggcgacagagcgagactgtctgcaaaaaaataaacaacttcttttccttcaggagagtcaagatggttaggacacttttcagtcagagggttgctgtgtcacgactgttgctctttcttatttcattgcatttattacagctctttggtttttgttgttgtttttacgtttttcagagacaggtctcattctgttgccaaggctagagcacagaggcacgatcacggctcacggcagccttgacctcctcctgggctgaagcagtccaacctgcctcagcctctgagtagctgggactaaaggcatgtgccactgggcccggcatattctgttttgatctcagtatcagttaggatgctttcactgacaggactctggctctgtttctgtctcccatgtcatgacatcctggtcaggcaggactggggctctgctgtgcttctctgagactctcttgtacccagctggcctccatggaggtggcgtcatcctcagctcagtttgactaattctaagatacacttttttccttcacatttgctcctatagttgggcttcattgtacattctgtggtgtggttataatttattggctatattttatcctttctcagtgcacataaaataacagtggatcttacaatgaatgaaatttagcaagtgttgagaggaagaaagaattggacttcttttccccttaggagcaaggaaaatttccccagcaggtccccagtagacccacatattgttgccatggattgggtcatgtgtctatttctaaaccatgaggaaagagtttaacatgattagcacttgagttggaatggatgctggggaatccacagctaaggccatcatgtctaaagacatgggatacaggcagcagtgagccttggaagtgcatagagatttcagtcgtctgtctagttattatttctgtctagattttgagcatttctaaattgtgtgtcatttacatttttaaataacctattttaactctgtaatgaaagaacttaagaagtgaaggagttatgaagtgaagtgaacacaaaaactatcagggtcacatagtttatagaagatacttctcatcccagacctggggttataactgatacagactgaaagaagctgcaggaggacagtgtctgcttgttcaagtagagtcttttgttggtgtgttccattaggtgggcctgactgccgcctcggggctgtattttcggtctgggaacctgatactcaacctaatgccactcagtttcgtctcccattctctactttctcttgcactgtattttactacccattttttccctctcactgtgtatttccagtgtcttgagatctttgtaccagacttttattttatagattttttttttcctaccataaaagaaaatgtagttcctaaggaaaagatgcttacattcttggaaaaggagcaaatttactgtgattggatttttgtataccaccatttaaaatcagatgtttggttttttacatcagattttaaatgtattctgtgtgcttcattttcaaaaagaaatgttttggagcaccaaaaataataaaacttttaaaaatgaattggcaacatttacctttttaaaatttttgacttttggctcacgcctgtaatcccagcactttgggaggccaaggtgggtagatcatttcagctcaggaattcgagaccagcctgggcaacatggcaaaaccccatctctacaaaaaatacaaaaattaggtaggcatggtgatgcatgtctgtagtcccagccactcaggaggctgaagtgggaggattgcttgagcctaggcggttgaagcagcactgagccacgatcacaccattgcactccagcctggtgacagaaccagtctttaaaaaaaaaaattaacctttttattaggaaaatattaacatatacaaaagcagggaaagaataatacagtaaagtccttctcttcattactcagcttcctcaagtatcaaatcctagtcaaacccatttcatttattccccctcacacctcttcctgccgttattttaaacgcctcacaaatacatcattttccttgtagatgttccaaaaataagggatttggacacaatcacaatatatcagaacatataaaaattaccaatttcttaatattcaagtgtatacgatgcccagatttccctaattgtctgtctgtatctttctctctttctttatattttcatagttcaaattagaatctaaatgagagccattcattgcagttggttgatacatctcttaaatctctcttaattcccaggtccttcccctagtcccccagtgtatgtggtaaagaagctatttcatcctgtagggtgttctgcagtctagatttggctgattgcattaaatttgttactttgctctttgcatgacttgagaattagtagttaaatctagaggttcggcctcattctagtttggtaccctgccttccagaaaaatgcttcctgggtggtggtaagtgcttctgccaggaggctcatatgtctcttttttaattgtaattagcagccactgatcatttattttttttttttgagacggagtctcactcggtcgcccaggctggagtgcagtggcacaatcttgtctcactgcaacctccgcctcccgggttcaagccattctcctgcctcagcctcctgagtagctgggattataggcgcccgccaccacacctggctacttttttgtatttttagtagagacggggtttcactatgttggccaggctgatctcgaacttctgacctcatgaaacacccgccttggcctcccaaagtgctgggattataggcctgagccaccgcgcctggccaccactgattatttcttagatccattattttattagggatttcaaaacagtgatattctaattctgccatccatttattccttgtacaaataaatgaaacttcacccttatctttccatggttaccagtggattttattttttaatctataatcaactttaatcagttcttattgatgattaaaagatccattttgggccagtaggagcatcttccttcgtatttgtccttttcacttaatcccagtggtttttgtccttttcacttaatcgtttttctctagtaagacatgattttactgcctcaccttatacattgtcttccctagatgtggaattaaacttgtctcagaagagccctcttttattgtagtgggaagtggtatttacatactgggtgctggggtattcattcttactgggttggttgctatttcgaggccttttcagtagacagaataggaaataggtgttttatttccctactttcttaaagataaaatacattctaaatttatgctgatacatccaattcaaattcagatttttctatggcctttatactaattctgtccttcttttatgtatatctttatttttttcccgtgactcaaatcccattttttaatgacaccaacaaaattacttatttgcttcaattccataatacacatataacagcccagaatagcaataatcacatggctacaaacagtatgcttattgaaaacagcttggtattgcattttgttatgtatatcctgccagggctgtataagcaaattaatatatcttagagttacttgaaacagttcctagagtagaaccagctcaattgttgcatttctttccatttggtgtagttttaatgagattattattatttaagcttcttattttcattccctctgccccttcttagataaataataacataatatacatccttttgctacctttcttttaacaatatattcttgtgttctcctcatagcagtatatagagctccttctcattcccttctataatactatttcatagaactccatgtatgaatgtagcagtttattcatctgatccctattaataggcatatgagttgattccagtcatttgccattacatgtaatgctgcagtgaatagcctgtgcatatagattttgatgtttttgccagtgtatcttggggctatatccccagaagcgggatggctgacttagaggacaagtgcatatataattttgggggttttgccacattcccctccacagagattgtatcagtttgtgttgacactagcaactaatatgagtgctaatttttttcgtggctttatgtgttgtcaaacatttggctttatgtcagtatgatagatgcaaaattgaatatgtgccattaatttgcatttctgttgtcagagaggttgactcatcaattcttttttatttatttatttatttatttatttatttatttatttatttttaattgatcattcttgggtgtttctcgcagagggggatttggcagggtcataggacaatagtggagggaaggtcagcagataaacaagtgaacaaaggtctctggttttcctaggcagaggaccctgcggccttccgaagtgtttgtgtccctgggtacttaagattagggagtggtgatgactcttaacgagcacgctgccttcaagcatctgtttaacaaagcacatcttgcaccgcccttaatccatttaaccctgagtggacacagcacatgtttcagagagcacagggttggggataaggtcacagatcaacaggatcccaaggcagaagaatttttcttagtacagaacaaaatgaaaagtctcccatatctacttctatccacacagacccggcaaccatccgatttctcaattttttccccacccttcccgcctttctattccacaaaaccgccattgtcatcatggcccatccccaatnnnnnnnnnnnnnnnnnnnnnnnnnnnnnnnnnnnnnnnnnnnnnnnnnnnnnnnnnnnnnnnnnnnnnnnnnnnnnnnnnnnnnnnnnnnnnnnnnnnnnnnnnnnnnnnnnnnnnnnnnnnnnnnnnnnnnnnnnnnnnnnnnnnnnnnnnnnnnnnnnnnnnnnnnnnnnnnnnnnnnnnnnnnnnnnnnnnnnnnnnnnnnnnnnnnnnnnnnnnnnnnnnnnnnnnnnnnnnnnnnnnnnnnnnnnnnnnnnnnnnnnnnnnnnnnnnnnnnnnnnnnnnnnnnnnnnnnnnnnnnnnnnnnnnnnnnnnnnnnnnnnnnnnnnnnnnnnnnnnnnnnnnnnnnnnnnnnnnnnnnnnnnnnnnnnnnnnnnnnnnnnnnnnnnnnnnnnnnnnnnnnnnnnnnnnnnnnnnnnnnnnnnnnnnnnnnnnnnnnnnnnnnnnnnnnnnnnnnnnnnnnnnnnnnnnnnnnnnnnnnnnnnnnnnnnnnnnnnnnnnnnnnnnnnnnnnnnnnnnnnnnnnnnnnnnnnnnnnnnnnnnnnnnnnnnnnnnnnnnnnnnnnnnnnnnnnnnnnnnnnnnnnnnnnnnnnnnnnnnnnnnnnnnnnnnnnnnnnnnnnnnnnnnnnnnnnnnnnnnnnnnnnnnnnnnnnnnnnnnnnnnnnnnnnnnnnnnnnnnnnnnnnnnnnnnnnnnnnnnnnnnnnnnnnnnnnnnnnnnnnnnnnnnnnnnnnnnnnnnnnnnnnnnnnnnnnnnnnnnnnnnnnnnnnnnnnnnnnnnnnnnnnnnnnnnnnnnnnnnnnnnnnnnnnnnnnnnnnnnnnnnnnnnnnnnnnnnnnnnnnnnnnnnnnnnnnnnnnnnnnnnnnnnnnnnnnnnnnnnnnnnnnnnnnnnnnnnnnnnnnnnnnnnnnnnnnnnnnnnnnnnnnnnnnnnnnnnnnnnnnnnnnnnnnnnnnnnnnnnnnnnnnnnnnnnnnnnnnnnnnnnnnnnnnnnnnnnnnnnnnnnnnnnnnnnnnnnnnnnnnnnnnnnnnnnnnnnnnnnnnnnnnnnnnnnnnnnnnnnnnnnnnnnnnnnnnnnnnnnnnnnnnnnnnnnnnnnnnnnnnnnnnnnnnnnnnnnnnnnnnnnnnnnnnnnnnnnnnnnnnnnnnnnnnnnnnnnnnnnnnnnnnnnnnnnnnnnnnnnnnnnnnnnnnnnnnnnnnnnnnnnnnnnnnnnnnnnnnnnnnnnnnnnnnnnnnnnnnnnnnnnnnnnnnnnnnnnnnnnnnnnnnnnnnnnnnnnnnnnnnnnnnnnnnnnnnnnnnnnnnnnnnnnnnnnnnnnnnnnnnnnnnnnnnnnnnnnnnnnnnnnnnnnnnnnnnnnnnnnnnnnnnnnnnnnnnnnnnnnnnnnnnnnnnnnnnnnnnnnnnnnnnnnnnnnnnnnnnnnnnnnnnnnnnnnnnnnnnnnnnnnnnnnnnnnnnnnnnnnnnnnnnnnnnnnnnnnnnnnnnnnnnnnnnnnnnnnnnnnnnnnnnnnnnnnnnnnnnnnnnnnnnnnnnnnnnnnnnnnnnnnnnnnnnnnnnnnnnnnnnnnnnnnnnnnnnnnnnnnnnnnnnnnnnnnnnnnnnnnnnnnnnnnnnnnnnnnnnnnnnnnnnnnnnnnnnnnnnnnnnnnnnnnnnnnnnnnnnnnnnnnnnnnnnnnnnnnnnnnnnnnnnnnnnnnnnnnnnnnnnnnnnnnnnnnnnnnnnnnnnnnnnnnnnnnnnnnnnnnnnnnnnnnnnnnnnnnnnnnnnnnnnnnnnnnnnnnnnnnnnnnnnnnnnnnnnnnnnnnnnnnnnnnnnnnnnnnnnnnnnnnnnnnnnnnnnnnnnnnnnnnnnnnnnnnnnnnnnnnnnnnnnnnnnnnnnnnnnnnnnnnnnnnnnnnnnnnnnnnnnnnnnnnnnnnnnnnnnnnnnnnnnnnnnnnnnnnnnnnnnnnnnnnnnnnnnnnnnnnnnnnnnnnnnnnnnnnnnnnnnnnnnnnnnnnnnnnnnnnnnnnnnnnnnnnnnnnnnnnnnnnnnnnnnnnnnnnnnnnnnnnnnnnnnnnnnnnnnnnnnnnnnnnnnnnnnnnnnnnnnnnnnnnnnnnnnnnnnnnnnnnnnnnnnnnnnnnnnnnnnnnnnnnnnnnnnnnnnnnnnnnnnnnnnnnnnnnnnnnnnnnnnnnnnnnnnnnnnnnnnnnnnnnnnnnnnnnnnnnnnnnnnnnnnnnnnnnnnnnnnnnnnnnnnnnnnnnnnnnnnnnnnnnnnnnnnnnnnnnnnnnnnnnnnnnnnnnnnnnnnnnnnnnnnnnnnnnnnnnnnnnnnnnnnnnnnnnnnnnnnnnnnnnnnnnnnnnnnnnnnnnnnnnnnnnnnnnnnnnnnnnnnnnnnnnnnnnnnnnnnnnnnnnnnnnnnnnnnnnnnnnnnnnnnnnnnnnnnnngcccagcagaggtgctcctcacatcccagacagggcggcggggcagaggcgctccccacatctcagacgatgggcggcggggaagaggcgctcctcgcttcctagatgggatggcggccgggcagagacgctcctcactttccagactgggcagccaggcagagaggctcctcatatcccagacgatgggcggccaggcagagacgctcctcacttcccagacggggtggcggccgggcagaggctgcaatctcggcactttggggggccagggcaggcggctgggaggtggaggttgtagcgagccgagatcacaccactgcactccagcctgggcaccattgagcactgagtgaacgagactccgtctgcaatcccagcacctcgggaggccgaggctggcggatcactcgcggtcaggagctgagaccagcccggccaacacagcaaaaccccgtctccaactcatcaattcttatgattaagaggcattttcgtttctttttctgtaaactgtctaattatatttctagtccatttttctcaagaatgggggggaggttggtcctgctcacagtaatagtacttttcgattaataacagacattagagaactgctgtacccagtactgtactcggtgctggggaagcagaactcagtactagtgtcaaagaccttttgactccaacatttgttgtgttattgttgttgttattattattgttgttattattttgagacagagtcttgctctgtcacccaagctggagtgcagtggtgcaatctcagctcacgggaacctccgcctcccaggtttcaagcgattctcctgcctcaccctcccaagtagctggcactataggcgtgtgccaccacgcctggctaatttttgtatttttcgtagagacagggtttcaccgtgttggtcagtctggtgtcgaactcctgacctcaggtgatctgcccgcctcggcctctgaaagtgctgggattacaggcgtgagccaccacgccaggcccattgtgttttaattttatcccactattttcactatgtgttaagcagaactaattgtgacactcagttcaatgttagagaagtcaatacttaaccaaagaagaacatccttgcttggagaaagtcagcttgatacacatttagaggcatggaagacagcctgtaaagctgtgtgggtgctgatggctagcctgagagccacatggcctactaatgtgatgttttgctatgcagttgcctcaaaaacttgaataccaacatttaaaaccacaaacttttacataaatgtgaagatttctggaatttggaaaaagatggaggatgtacacacactgggtcccattcctgtgtggcagcattccctggatggggcggttctatctccatttccccgtggtccacttcactcttgagttcttcacacctgcacatccaggtcgggagccactgccacacatagctgttcagcacttggaatatggctagtccagattgggatatggcattttgtttaacgtgactactagaatatttaaaattaaatatataattcttattttatttctgttggatggtgctggcttatattcagcctgctgcattcacttaaattgtttgcccaggcttcatgtcccatggagctctatcagactcatgtgcccatggtcatcatttgacaggatgagaacatgagtatcttgcaaatatctgacttttcacaggtctctgctggttatggtggtcatggcacctgcttgctcttgctctgtcccagcagagtgtgggtgagaaaatgccacaggtatttaaatctgatcacttacagtcttggtggggagcactgttgctcgaatatttttttaaattctttttattgaggtatactctatgtacagcgaattgttcgtatcttatgtatgcttttcaatctgccgtgatgattcgtatcaaggcacagaacatttctgtcatcccagaaaggtccttcctgttcttcacaagcaattccttctttcgtaaagcaatcactgccctgatttctgttaccacaggtcaattcaactacatatgtgtgtgtgtgtgtgtgtgtgtgtgtgtgtgtgtgtgtgtgtgtatatatatttatttttttttttttattttttttttttttgagatggagtcttgctctgtcacctaggctggagtgcagtgacacaatcttggctcactgcaacttctgcctcccgggttcaagcgattctcttgcctcaacctcccaagtagctgggattacaggcacataccaccacgcctggctaatttttgtattattagtagtgacggggttttatcatgttggccaggctggttttgaactcctgacctcaggtgatccacccacctcagcctcccaaagtgctgggattataggcgtgagccaccatgcccagcctcaactatatataaatttttaaaatttaatttagtttaattttattttatttttgagatggaatttcgctctgtctctcccaggctggaatgcagtggcacgatctcagctcactgcaacctctgcctcccgggtttaagcagttctctgcctcagcctcctgagtagctggaattataggcgcccgccaccgtgctcggctactttttgtatttttggtagagacaaggtttcagcatcttggccaggctggtcttgaactcctgaccttgtgatccacccacctcggcctcccaaagtgctgggattacaggcgtgagccaccaggcctggcctcaactatattttttaatgtttacttaatactcatctagttttggtattgaccatgacttatattgctattgactgtcttaagagtaacactattctaataggatagctcacttaattttttagcaaatatccttaggtgaggtatcatttgcatatgtcttctttgtcaacttgttatattggaaatgtatgtgtgtttccttctttatcaatagctgttatcatctaaagacattattttgtttttttgtttattttatgcatatgtgtgtgcttcagttttactcttggtatcatgctggcactggtttactttgacactgttaagcagatattaagcagtctattgtgaaatcttctatggtgaaatgatcctgacatgtgaaataggtcagtttaaatgactcatggttttgttgttatttttctgctgtccaaggaaagaggctcagtaaaacattgtatatgttcctaaagactgcttattgagatagctctttataattaatacatgccttgattgtgacttactcatccctgtcttacaggccaaacttccagatctgcaaccatttccttctccagatggtgatacagtgacccaacatgaggaactggtctggatgcctggagttaacgactgtgacctccttatgtacttgagggcagcaaggtaataggaatctacccccatcctgctttctgaattagaccatctgaactgattataggcagtaaactttgcatttcccctgagattttatttctatattgggcgttctctgactttaagtttggttacaccctctgtaatcgggaccctggctcttcttaccagagaaaaatagtttgaagtaatttttttcatgatgaagtaatgtttttcttcttggtgtttgccccacatcaaattttggaacttttcaagaggaaaacagcttaggccatacatacagttaccaaaacctctcaatccagttgagtacttcagtcattcagctcatctgaaaaccccactacagaggggtgggggtgaggggagggagagcattaggacaaatagctaatgcattcggggcttaaaacctagatgacgggttgataggtgcagcagagcaccacggcacacatatacctaatgtaacaaaccgacacgttctgcacttgtatcctggaccttaaagtaaaatttaaaacaaaaacaaaaccctctacagatttcatgttctgtctctactttgtggctgttcattagtgcctgtcctgaacttgacatttttgtggcttgcctacatgagaatatttatctgtgatcaccctcgtggcagttgcatagaacatacaaatgccttcgatgcagagagaagtgtgaattcgctcctcacacggcacagagcgggcaccacagagcggtcgtcacagagcaggtgtcacagagcaggcaggcagactttgtatgtagtgattctgggtcttggcaacgacaacaaaaacatgaaagcaaggattagggcatctgaattttaaccctggatgggtttgtgggtttcttttttttctttttttcttttttttttggttgttacttgtttcgtttttttgaaacagggtcttgctgtgtcacccaggctggagtacagtggcacaattatagctcactacagccttaacttcctgagctcaagcgatcctcctgcctcagcctcctgagtagctagggttatagacccgtggcaccatgcccggctatttttaattttgtttttggttgagatggggtcctttctgtgttgccccagttacctggctgttttctagtcaacggtgttgtgcatggtggcattcagtagagatgagaatgtgtaagtggagtgaatgactaagaggttttatctctggtttctcacctttttttttttttttttttaagacagggtctcacactggagtgcagtggcataatcatgactcattacagccttaacctcctgggctcaagtcatcctcccacctcgtcctccccagtagctaggactacaggcatgcaccaccatacctggctaatatattttttttctctctctatgttgtcagggctgattttgaactctctggcctcaagcagtcctctggcgtcaggctcccagagtgctgggattacgggcatgagccatcacacccagccatgattttttacttttaattcacctaaaggtagttgatatgcagaatgagaggaattaagtaaaattttagatgacttaatttcacatgttttctggagacttttctttcagaagattgtcatctactgaaatattgtggctcatagatttagattcttcatgctctcaaatctaaaatcttagtactgctaaaacgtgggaagaaacaatacaaatggatctgactaaaagtaacatatgtctttctgcgtgagtgaagaggaacttaaatttatttttggtctgggcgtgatggctcacgcctgtaatcccagcactttaggaggctgaggtgagcagatcacctgaggtcaggagttcgagaccagcccgaccaacactgtgaaaccttgtctctactaaaaatacagaaattagctgggcatggggtgttcctgtaatctcagctactcgggaggccgaggcaggagaatcccttgaatcctggaggtggaggttgcagtgagccaagattgcgccactgtactccagcctggatgacagagtgagactccatctcaaaagaaaaaaaaaaaaaaataggagcagaggcagagctgggaactggttcatcatgcgtgtagtaatggaatttgttctgggctggaaatgtcctctgaaaattgaaggtctaagtctctgtcctgatattactatgtactaataaaggaaaaaccttttcttctgaaggagcatggcggcatttgcaggaatgtgtgatggaggctctacagaggacggctgtgtcgcagcctctcgggatgacaccactctgaatgcactgaacacagtaagtcttttgaagtcaccctgagtgggaagacacttctttttcccctgaactggctgtagggaatgtgtgatgagtgcggagcatgaagtcgcctgtagactcaggagtgagttgtggtcttggctgttgggtgccatgggggctccaggccagtgatgtggcacctgcaggttcatttcctaatctgtgtctgtgctgcaggtttgaggtgactctcaaatgagatcctaataatagcacctgatacttaactgaggcctcacaaagccaagtactgtgcatagaagatcttgcttaatcctcacaaccacctctaggttctatttttatttttatttattttttatttttttgagatggagtctcgctctggcagtggcgcgatctcagctcactgcaagctccgcttcccggcttcacaccgttctcctacctcagcctccggagtagctgggactacagacacccaccacgcccagctaattttttgtatttttagtagagacggggtttcaccatgttagccaggatgatctcaatctcctgaccttgtgatcctcccacctcgacctcccaaagtgttgggattacaggcgtgagccaccacgcccggcctctaggttctattattatcacctttttagacataaggaaataagttgagagagattaagtcacaatttaaggtcatacccccaagattggaatctagaagccgtgtttttgtacttcactgtttctgagaccatgtatttattttaaagcacatggagggatgggaagaagctaaacttttttgcataaacttgttttttataaagtatactttggaacatgttaatattttacatgactataaaaagttttacacgaataatttctaaaaaattaaaagtaaagggaaatgaggctaatgttactgagttggttgcatgacataccatcataattactcatctactttaatcccataataaacacacagcagctcagataacaacacactgctgcaaacaatatgattactgaaaccagttgtctttcgttctttgtttgttgttgttgtttttatttgttttggccttaggctatatcccatggggctgtataggaatattaatgtattttaaagttacatgaaataattcctctctatcattactaatgtgaaaccattaaatctgaagagctaatgatatttatggaatcaatttctgatatattgatagtctgcatcgttgtgtatgtgtatgtaggctgttgagtatgaggctaagcacctcttctgatgattaaccaaatgtcatttaagcacccctttgttctttttcttttttctttttttttaatttcttgagaggtcactatagttagaagagactttcaagatcatctgtcccagtttctaaataggagaatccgaggcggctagatgacttaaatactgacagtcccaaaagttcctaacagagggaagaaagtagtccccattcctgatttagaaatctactgtgcagcttgcttttgaggaaacgtagatatctgcgtgatatggctgatttttattcctagtataattaggtttcttgagtatgatataacatttgagtggttttgctagggatatgccattctgtaaataagagaatgttttttcacattgtcataaatattgtgtgtttgtgtacattgtcactgattcgataggatagttagtggggatttttttgttggttagttttaaatacaaaatctttattttgagcatatgattaagccagaaggggcctttaagattattttacagatgaggaagctgaaactcagaggttgatgatactactgcccagtagaggctgtggtaggttagatatgaatgtctgtgaattcagaataccttaaaagtgtgtgtacaaagagaaagtctttgataggaacttttttctgttgttgttgtttgttgttgttttttcttgaggcaaagtctcgctctgtcacccaggctggagtgcagtggcacagtcacagctcactgcaggctcactgcaggcttgacctcccaggctcaagtgatcctcccacttcagcttcctgagtagctgtagctgggattacaggcatgtgccaccgcactcagctaatttttgtttttgagaccatcttgctctgttgcccagtctggagtacagtgacacagtcttggctcactgcagcctcaacctcccaggctcaagcttttctcccaccttagcttcccaagagctgtagctgatatcatagacgcccaccatcatgcttgactaattaaaaaaaaaatttttttgtcaagatgaggtcccactgtattgcccaggctggtctcggactcctgggctcaagtgatcctcctgcctcggcctcccaaagtgctgggattacaggtgtgtgccactgcacctggcctttttttaagttttattttttttgtagagacatcgtcttactttgttgccagggctgatttcaaactcctggtcttaagtaatcctcctgtctcagactcccaaagtgctaggattacaggcatgggccaccatgtctggccagttgttctctgtataaaagctttgtgaaaaaaatcctgctttcataactgtgctatcagttgaattttgaataatgaagatcttgccatatttaattaaatgtctatttttggcactttcttgaatgtatatgatttattcccctttttattccaaactctcttaagaattctgtagaccatacttcagtatagaaatcattttggctacttttgcccatggttctttgtggcaagctccttctgaaggttttgttagcactcccagagatttttttgttgtacaatttttcatttttatgacactgaaactctttagactagcctgacatggctcaggtgtcttaggttatgtgtacatattttgtgatgaattgaaaagttatgtgctgttttaatttttgtacttcactgttgaactgactccgaaaacttcagttgcaagcattttcctaatgaaaaatgaatgaaaatatcctgtgagagaagttactgggattttttacttccctagagtaatagaagatttgagctgtgttaagtaataagttaaaaagatatatacattgttgtgtggaaagcatttattgttttcttagagtatagcatagatttaaaacaaggttaggcatttatcagtttagaagaaacctgtgagtaattagtgtatatttcctgcttcctagggcaacatagaacttaaatgaaataggctatatggccacattaaagtgtgttgaacatccagtaggagtatttaaatacgagtaaatttaaataaatcgtttcatttttaaaactgcaattggtttagaaaatttttgagctgtcagttcttttttgtttgtttgtttgtttgaggcaggatcttgctctgttgcccaggctggagtgcagtggtggatcacggctcactgcagccttgacctcctgggctcaagcagtcctcccacctcagcctccagagtagctggtaccataggtgtgcactaccatgcccagctgtttttcttgttttgttttgttttttgtttttgttttgagatggagttttgctcttgttgcccaggctggagtgcaatggcgcaatcttggctcaccacaacctcccaggttcaagcgattctcctgcctcagccttccgagtagctgggattgcaggcatgtgccaccaaacccggctaattttgtatttttagtagagacagggtttcgccatgttggtcaggctggtctcgaactcccgatctcaggtgattcacctgccttggcctcccaaagttctgggattacaggcgtgagccactgcgcctggcccagctggttatttttacttgcagagatgatgtctcacaatgttgcccagagctatcagttctttatgacaattatgtggacctatttttgaatctaagctcttagattacttatttttattctgttttttcttcattattaacaaaagagattgctagtgtgtaatttttgaaacaacttattgaggtaagatttatgtataataaactgctctgtttcaaagtaaaaaatttgagggttttcagatatataaatctgtgaaactacttataaatctgtgaaactactataatgtcaagatacaaaacatttccaacacccccaaaagttgcctcatggcctcttataatcattttctgcttccagcctcagatagccattgaagtatcgtgttttcaatgttttttttatttttttaaaatcattttggagtagtttgcatttcgcggaatgttacaggaatggaatcatattgtgtgacttctttgggcataaggattttgagagccagttgtgtttcatgtatcgatagttcatcccctttttattgataagtattcccttgtatggatatgcatattcacaattttttcatattctttaaccttgttaaacaacattctggttgtttataagcttttggccattataaataaaagttttttcaacattgttgtatgagtctttatgttgacatttatcttcagttctctcaggtaaatacttggagtggcaggattgtttgtacgtaggaagctctctcagaaactgtcaaacaggtttcttttcttttcttttcttttttttttttttttgagatgttgcccaggctggagtgcagtggtgcgatctcggctcactgcaacctcctcctcccaggtttaagcagttctcctgcctcagcctcctgagtagctacaggcatgtgccaccacgtccagctaatttttttgtatttttcgtagagacaggatttcaccacgttggccaggatggtcttgacctcttgacctcgtgatccgcccgccttggcctcccaaagtgctgggattacaggcgtgagccactgcgcctgttctgtcaaacaggttttttttttttttttgagacagagtctcgctctgtcgcccaggctagagtgcagtgagtggtgcgatctacgcttactgcgagctctgcctcccgggttcacgccattcttctgcctcagcctcccgagtagctgggactacaggcactcgccaccacgcctggctaattttttgtatttttagtagagatggggtttcactgtgttagccaggatgatctcgatctcctgacctcgtgatcctcccacctgggcctcccgaagtgctgagattacaggcgtgagccactgcgcccggcctacaggtttctaaagtggttccaatttagattcccatcagtagtgtgttataattttacgtctttagcatcttcaccaagacttggtgttgtcagttatttttttttaaattttatccattttaatggatgtgtagtctggtatctcattgaggttttattggaatttcctaatttaatagggttgagcatcttttcctgttttattgcccatttgtttatctttttttgtgaagcctctgttcaaatagtttgtttacttaaaaaaatttgttttacaatttagttataaggattgtttgttaatatttcaggtagaagtcctttgatatatgtattgggaattatttgtcccataccatgactttttttcattcttttaaaaaaatttttttttcctttttctttttttttttaagtctcactctgtcaccaaggctggagtacagtagagtgattatagctcactgtaacctcaaactcctgagctcaagcaatcctcctgcctcaacctcctgagtacctgggactacaggctactacacctgtctaattttttttagagtttttgtttgtttgtttgtttcttctagtgacagggcctcactatgtttcccaggctggtctagaatgcctggcctcaagtgatcttcccacttcagcttcccaaaatgccgggattaagacatgagccactgcacctggcctgactttttttccttaatgttgactttaatatatagttatgctgaagcttaataagtcattattttccttttatggtactatctctgattactccaagattacaaagattgtttctgtgctttattctagaagttttacttcttacatttaggtctttgattcattttgaattgtgatgcgttaattatggagtgaaaattgattttcttccacacagatacctgttgtttgaacaatattggttggaaaaacttttctcatttgactgccttgacattgttattgaaaatcagctgcttttttatgtttggatctttttctggattctattctgtctcattgatcgttattagggcctctgtgttttgaatactgtagctatataggaagtcttgacctcaggggtgtctttctgctttaaatgtgattttaaagattgctttggctatttgaggtaatttccatttccatgtaaattttagaatcagccttccagtttctaatttttaaaaagtcttgcaggcgcagtggctcacacctataatcccagcactttgggaggcagaggtgagcggatcgcctgaggtcaggagtttgagaccagcctggccaacatggtgaaacctcgtctctactaaaaatataaaaattagccgggcatggtggcacgtgcgtgtaatctcagctattcaggaggctgaggcaggagaatcacttgaacccgggaggcggaggttacagtcagccgaaaccgtgccattgcattctagcctgggcaacaagagtgaaactctgtctcaaaaaaataataataataaaaaataaaaagtctgatggaattttaattgggattctattgaatttatggatcagtttgggaaatactgacatcctaacaatattggatcttctaatccataaatacgatatttctctatttttaaagaagttgtctttgattttttttttttttttgattaaaaaaaatttaaagaggtcttgctatgttgttcagtctgggcttgaagtccttggctcacgtgatctcctgcttcagcctcctgagtagctgggactacaagtgcatgccaccatgccccgctttcttttacttcttacaataagattttttgggaatacagatcttacaacattttgttaaatttactcctaagtatttcctgtttgaggattctgttgtaactaaaattttaatttctaaatggtcttcgatagcatagaaacacaatcagtttttatatgttggctttttttggtcctgctaaacatgtcgtgtgcaaatatagttttacctcttcctttatgatctatgtgttttatttcttttttgtgctttattgcacttccttgaacctctgctataatactgaatagaagtgatgagagtggacattatctttctaatcttagaaagttttcagtcatttactattaagtacaatgcagtttttgttgtatttgtttgttttgagaaagggtctattgcccaggctggagtgcagtgtagcaatcttgaatcactgcagccttgacctcccagactcaagtaatcctcctgtctgagcctcccaagtagctaagactacagggtacaccatcatgcccagctaattgtaaaattttttgtagtgacggggtctcactatgttgcccagcctggtctcgaactcctgggcccaagtgatcctcctcagcttccccaaatgctgagattataggtgtaagccactgcacctggcctttctttgtttttttaatcaagttagaatgatctcttatatatccaggttgttgagtttttattgtgaatgggcattgaattttgtcagttgctttgtttttccttctgcatctaatgagattattatatgattgttattctttattttgttaatatagtgaattacattgatttcaaatatgaaggaactgtttgttcctaggatgaatcctgcttggtcactacgtactattggattcaatttgctaataatttgttaaggaattttacatttgtgatcatgagagatactgagttgtagtcttccttctttgtaataaggagtttggtaataagaactttggttttcatatcagagtaatactccctcaaaaaattagttgggaaatcgttcttcctgttctgttttcttaagatgtttatgaaagattgatattactttctacatcaaatgtttgccagaattcacagtttagccatctaaatttttttatatagaaagtgctttttttcttttctttcttttcttttttttttttttttttaagatggactccacgttgccaaggctggtaatttgtttcctcttgatcaatataaagacgtttcaacattattgatctctttagagtttggttttattattttttcccgtttgttttatatttcattggtttctgttcgttattaatttttttctacctatttggggtttaatttgatcattttcctcctagctttctaaagtgggatgttaaatagctgattttaccacaaattttgatttgttgtgatctattattctgttcaaaaatgttttgaattttttggtgatttctttgacccatgaattatttagtactaaattccttaatttccagatacttggggcttctctaagttttattttttggaatgttattgatttctaatttaatttaattcagtggtcaaagagtactcagtaacatttcagtattttgaaatcttttgagccttgtttcttggctgagcatgtgatgtgtcttggttcatgtttcatgtgtacttgccatcaacttgctctctgtagttactgggtgtgctgttatgcagtgtcagtggttgacgttagtattcatatcttctcttatactaattttttttatcacctagttgtatgttactgagagacatgtatgaaagtcttcaatagtgattgtaggccaggcgcggtggcttacgcctgtaattccagcactttgggaggccgaggtgggcgggtcacaaggtcaagagatcgagaacatcctggccaatgtggtgaaaccccgtctctactaaaaatagaaaaattagccgggtgtggtggcgcacacctgtagtcccagctactcagggagcctgaggcaggagaattgcttgaatctgggaggcggagattgcagtgagccaagatcgcgccactgcactccagcctgccaatagagcgagactccatctccaaaaaaaaaaaaaaaaaagtgattgtagagttggttgtttctccttttgattctgttaatttttgcttcatatatttgaagttggttattagacacatgaacacttaaaatatttgtgtctttctctgtcttttgacccttttacctttctgctgtaaccttttttgtgtctactaatattctttgtcttgaagtctgttttgtctaatgttaatacagccactctagttttcttatgcttgttgtctgcatggtacatctctttacaacttcttactttgaatcttgttttttctttgtatttaaggtaacatctcctgtattctttagttgtttcatgcctttttatctagtttggcaagctctgccttttgtttggagtgttgagtctgttttaatttaatgaagatggttttcaggttatataaaactttagccgtatgtcttttttttgagacagagtttcgctgttgttccccaggctggagtgcgatggcacgatctcggctcaccacaacctccgcctcccaggttcaagtgattctcctgcctcagcctcccaagtagctaggattacagacatgcggcaccacgtccagtgaattttgtattcttagtagagacggggtttctccatattggtcaggctggtcttgaactccctacatcaggtgatctgcccaccttggcttcccaaagtgctggggttacaggagtaagccaccggatccggcccacattcttaatagtagaggcctcattgaagaatcacagaggtagttaataaatatcttattttcatggccacatgacttgctacttttggtccaatagtgaactggcagatagttcaggacagttgttctttgtttgttcatttatgttaacatgcatttcttatcttttcatacataagaaacagctttgtaccgctgtagaggaagaagatgtaataaacatgttggtctctctcattaggaaaagagggatttcttagtaacattgggcgtattcctttttgtatgtagcaatgatatgttttattttaatatttcaaatgtgaacacctataaatgtaaaattgttttatttggctgggcacagtggctcacacctgtaatcccagcacattgggaggccaaggtgggtggatcacctgaggctgggagttccataccagcctggctaacatagtgaaacctcatctctactaaaattacaaaaattagctggacgtgatggtggcgcctgtaatcccagctacttgggaggctgaggcaggagaatggtgtggcctggaggcagagcttgcagtgagccgagatggcgctactgcactccagcctgggcgacagagcgagactccatctcaaaaaaaaaaaaaaagttttatttgtatttttatatattaaatataagcttatgttaaatatgaagaagtaatggtgtttccccagaaagatcttgtgtggaaatatttctgtgtgtgtttcctcatacagtgtttgcattaggctcatctgaacacttgcagctgacatataatttgtaaacatcatgctatataacatggagatgatctgtcttatcctaatggggttaatttagccacctttgagtgcttacatttatttggctatttacaaaatagacctttatattcctacttagaaactgcagaaaagccccatcatttgagactaaggttttctagaatatatcttgccaacttatttttactaaactgatattggatttccttctttgggctcaggtatctttcctggtttctaatacaattcaaattattttgctttttctttctcagtaatttattgccattttctcaccaacactaaacataactatatattcactgtgtgtaagtaaaatttataatcatgcaacaaagatttcacctccgcctggacagttttattccctgagatacgggtggcttttagacgtttggattaagctctttatgtattcaagagagtacatgtttgtttgcttatttatttatgcacacccacatctccttcagcaaagaattcaaggctcccagtggcttcatagtttttcatctctggtctataaatatcactatttgttaactgttgagtattaattatttgtgttttctaaccctagtctgatgcctgacacatggtagagagatactaaatggttgttgaatgattgaatagataaatcaagttcaagttcatatcacacttgatcatccagaaattgatgttaggaagttggcatagcagaatatgcagataaccctattctaaggatcattttcatttctcttttattctaaaaaattaagtccatagaatttttgtcagattttttgtttgttcattataaatggccttcactaaagtatctggacctggattagctttgcagtgcttatgacttgaatgtggaatatttctcagctcccaaataaggcattgccgggaggccctttcataagttttccctaagcatgtgagaggagccttctgacattcattccatacccacaccctttacttaaatgtttctatccagatgagtcaacattaaatggttagtgtttgctggcttgggttaaggtaagatgttgggttttcttgtcgttcaggattttttatttgttgttggaaagtctaatgggtaaagctgataggctctatgatttcttattatggaaatccaataaatttcagaacagcacatcatataaatcagccttgacaggcactgttgccagtgttttatttatgtaataacaggatattgaagtcaacagaatgttgtgctgttaatcatagcattagtgaggatgcagaaaaagatcacgcagttgaggttttctggtataaccaagaccttttcagctgattattagcataataatatataattttcaacttttattttttgaaaattttttagttttagaaacattttgagctattgttttgaaaattaagtgtttaggtgttcacctgtgtggcttcctttgggctaagaaattcataaattcccttctaaagttccatgtaacaacattttaacacaaattgcgtgatttaatttttgtcttttttttttttttttttttttttttgcaacagaatctcactctgttgcccaggctcgagtgcagtggcaccatcttggctcactgcaagctccaactcctgggttcacgccattctcctgcctcagcctcccaagtagctgggactacaggcacctgccaccacgcccggctaatttttttttgtatttttagtagacggggtttcaccatgttagccaggatggtcttgatctcctaacctcgtgatccacccgcctcagcctcccaaagtgctgggattacaggcatgaaccaccacacccagcctattttttgtcttgtttgaatgaaatggcttttaaaatttagtactttgtttctttttagataatatgtagctttatttaaagtcaaactttataccccactttcttcttttccctaaacatgagagagagcattacctaaacttctctggggtggatggggagataaaaggccacttacaatccaattaggttctttatttttatttttattgagcagccctaggcaacctctcatctgctttttgtctctatagatatgcctattctggacattgcatataaatggcatcatataataagtggccttttgtgactgctttcttttactgagggggtactgttttcaggcatcatccgtgtggtggtattagccatttttatatattaccattttatttatcctcctggtctgcttcgcctgtcatttaaaatgtggcacctgcactaagcaacactcctcaggtctgaccaacataaggtgacccagggatacccctcagttatcctaaaagctcatctgctcagtgcagtctcagcttataagaatgtctgctcatcacattctttttagtcctgtgttgtaatcttgttatgtttcatttttccttgtatatgtgcttttgataagccatttctttcccaccctgagcttttccactgaattttgagccagtcataggaccttaagttcatcactattaattttattttttaaggtatcaactattggtcagcttcctgattataaaattgaaatgtatttgtggtttgagtatttatatgctaggcaaaagtttaagtgctttttatgaatgaattcatttaatcttcataacaattctatgaggcaagtgtggttatcatctaaaaattaataagcacacttatttatatacacaatatttatatacataactatttaaacttggtttaaattgaggccagtaccttatagcgccttcttgaaatgtctggttaatcgggccgggtgcggtgggtcacgcatgtaatcccagcactttgggaggccaaggcaggcagatcacgaggtcaacagattgagaccattctagccaacatggtgaaaccctgtctctactaaaaatacaaagatagctgggcatggtggtatgctcctgtagtctcagctactcgggaggctgaggcaggagaatcgcttgaacccaggaggtggaggctgcagtgagccgagatcgcgccactgcactccagcctggtgacagagcgagaccccgtctcagaaacagaaagaaatgtctggttaatctgtaatttggaggatttgctgtttagccaatcagaaatccttcatgccacagcttttcctgcatctccttcctgtttcctaggtgctcagcagggactgaggaatgtgatgtgattcagcttttacttttgtttggcataagttagaaagttcatttactcatttaagaaacttctttatcagatgatttttttccatgttaaagagtggtaaaatgttttgagatatatgtggtatttataaaaacatccacttaccgtttgatcagttagaattttaacatatttgagcctatattagtattaataacacaatgtcttcagcaaattgataaaaaaacctttagcctttttacatttaaaaacaggcttaggccggatgcggtggctcgtgcctgtaatcccagcattttgggaggccgaggcgggtggatcaccttaggtcaggagttcaagaccagcctggccaatatggtgaaaccccgtctctactaaaaatacaaaaattagccaagtatggtggtgcatgcctgtaattccagctacttgagagaccgaggcaggagaattgcttgaacctgggaggtggagtttgcagtgagccgagatcatgccactgtactccagcctgggcaacagagcaagccttcgtctaaaaaaaaaaaaaaaatttccgggcctggtggctcaggtctgtaatctcagcattttgggaggccaaggcgggcggatcacgacatcaagagttcaagactagcctgaccaacatggtgaaaccccgtctctactaaaaatacaaaaattagtcgggtgtggtggtgcacacccgtaatctcagccactcaggaggttgaggcaggagaattgcttgaacccgggaggcggaggttgcagtgagccgagatgacatcagtgcactgcagcctgggcaacagagcgagactgtgtctcaaaaaaaaaaaaacaaaaaaaaaaacacaaaaaaaggctttaataaaatcatatattcatttatttatttggtaattaacatgtttgagtttctgcagcccttgtggggagggtgtttgatgagaatctaagtgaacacctcattgttagaacaaatcaggcccatgagtttcagaagggctcatgtattctacagcatactacaaaattctaaaatgtataatatttgccctagtattcatttcctatattttggaaacacctcagaatgcttttttatagctctcttaaataattttttatccccagtttttgaaggttagtgtatttgtttcctgtggctactgtaacaaattacccaaacttggtggcttaaacgacagagaggtgttctctcacagttctggaagccagaaatctgacatcaagttgtcagtggggtacctctccggctcctcctggcagagcccactcttcgcctcttgtagctactggtggctgtttgcacattttggctgtggccccatctttctctgctcatcttcacgctgccttctcttctgtgtgtctgtgtcttctccagtctgggtttcttcaccacctctcttttataagtacttgtcattggagttagggcccacctgagttatctagaatcatctcctttatttcaagatccttagcacatctgcaaagacccttttcccaaataaggtcacattcataggttccagggatttgatgtgtatatcctctggtggtcattttttggcctaccacagttaaaatgactattatataaaatattactaaaatatattacttattttgaaatttaaaaaaaatttaaaaaaaatttaaaaaatagctcattattattatttttgcatctgttgtgacttgcttatttttatttatttaaaaaaatttttttgtagagacagggtctcactgtgttgtccaggctggtctcaaactcttggcctcaagaagtcctcttgccttggcttctgaaagtgctgggattacaggtgtgagccaccttgcccagctgttatgacttatttaaagtgtggagtttctgatattgagaatgtataaaaatatttctagtagtggctatgatatttctgtaatgtgaggacatttgatttataaaatagggagtatttggcttccttatgcaaagaataaggatatttatttagataacaaaattgtcatgtataactaccatattaattgatatgttctgacctcccaggttgtttcttcctcagccactaccctagcccctcaaaactctgggtccagcctgcaccagtcctagcctgggcctgatagagtagggaaggtgttgctcattagtgacccttgtgggcaagttgtgttgttttaaggttggtctttgagctggcctgggataaactcaggcaatccttgaagctgtagctttttcaagtctctggtgtctgttttagcttcagttccacagccctgcccagagcccagccccactggactctgacaacctgtgttgtcctggccagccctgtcctccagaatcttggatgtttcccccttacccagcaactttctggggttcataggtaatgacactggggcgccccactcctgtccttcctgctcccctatttgttgagtggcctgccttctccccacacctggtatttgttgggctgtgtattccagccactgcagcactttggagtactagttatcccagcatttttaggaaaactggctcttctcctccttttcttctttctttactttttttcttccattttagaaatgaggaggaatacattttcatatcttctcaagtcaagtccacctttactcgatgcctctgagtgatcattactggtgtccgttaacaaaagaatgtgcaactgttagagtttgagctctttggtttgcataatagttgctaaatttttgtgtctcccacagtcaggctgtctgctgctgctcttctcttttgaaatcatacagtctttctgattttttcttttgagacctgttattagattgggaaagctagaattgtgaggtaactaagtgtctaaagctcagagtgggagcttcctggctctccagggcctttggcttttggggacactgttttggttgcccagaggctttttgcttatttcttagttactaaagctgtgttcttggctgaagtttttagaaagtacagtcgcttgtatattttcccaactctggagctttatatgcatcagtgtatgcctcttcggtcttcgttgttccataacttcattatcattgccaaaaatattaggtggactgttgtttgcataaccttagaatcactcatcacaaagcactgagattcagactgctgagcccttggattgggggcagttatttctgtacctcaattctactaagtaggatttaaagcagttactgtaaatgtttcttaatactgatgtaactggtcttgattttgtgtttttgtgtgaaagcctttcacatacactttctaggtcaatttagcatgtatgagtaggttcactagtgcctacgtgagatgcttagacctgtggtttttatgtcatcctccagccttctgcccagtttcatgtcacaaatttttttctgttttcaaggctatgaggatgccaggagtaagtgaaaacatattttagtttccatttgtggtcctgaaccatttccacttgtggccagacataggtctttctcagctgacaaataattattgagaaaagcagcataaacagtctaggttcacgaatgtgccaggagcttttctccctgtggccagagttagactcattgtgggtcctcaagctgagtcttcttagtagattattgactgcgtctgtggagtcctcctgccccggcaagcagcctacaccctccgcaccctccctttctactattctgtggctgatctcgcatttataaaaaaagaagtcaggctgtagacatgttaactatgtaaatgattaattatccataattgcatttaaagacctgtggcataaacttcagctttcacagagacttgaaaattaagaggcacaaccttaatccctaaagtgtaagtgaagcctgtgcaggagccattcatttagtgtttggcctggggaatgtggcttaattcaatggttttattgtttttttatttttctaaattaatgtattaacattattaccatttgtttattcctttttagaagaatattctataatattttgcctttgaaaaaatctttgttaagtgaaggaatgttgaatactggaaagttccaaaaatgacctacctcagcctcttctgtgacagcgaaagaagcgaaggacgcaggtccgccctgcctcgtgtagcctgtttttactgcaataatagcactgcttatttctcctagaatagtgttttttatgtggttgttgctgttcataaagcataggcaagttaatcatattatactggttgttgattttcaaaacctcccctgtgaatgcattttagattttccagactgagcaaatgtcatccccatcagctttcatttagcactgtgagtgttttcatggatggggatttttttgttagtttgtttacatgtgtgtctttcctcttttctgagctgctggctccctcctttcctccacccaccctcatcccctagccccaagttaagaaaagacagtgtgcttgctttgtcactgcagcggaaaaagtccccgtacccattgctcccaccagattgcctgtcctaaactgccccagtagcaacattctagggtagggacatcttcctagaacatgggtttatgttagaatcctcatgctgctacttgctagggaagtggcctagagaaacatactgaacctctggatttcatttcctcatttttagtactctggctgtggaagagaggtgtgtggaatgatgaaatcataaagacctaacacagttcctagcacactgtgcactgctcagcaaatgttgcgaccccctcctttcttccatgtgactccagggctggcgcataattcctggaacattgtagtttcagaaagtgatggaaagagggagggaagattggttcaataactatatttccttctgaaaattaactagacctttctctcaagccctaccctctgcagttaaattctttgtcttttccattatccctgaattttgctcccgtaagaccattcagacaaattttagcctctctggtacctaatagcattatttgaaatgataatggccaaataaaaataaatattgtgctcttagtttcaattctagttttttaacatttacgtgtttcatatatattgacttggcactaggttatcgatgatggagatataaatgaaaatgtattgacatttgtgaattatggttataagaaatttttcttttctttttttttttttctcttgagacagagtctcactcttttcgcccaggctagagtgcagtggcgtgatctcggctcactgcaacttccgcctcctgggttcaagagattcttctgcctcagcctcctgagtagctgagattatgggcacacactaccatgcccggctaatttttgtatttctttttagtagagacagggtttcaccatgttggccaggctggtctcaaactcctgacctcaagtgacctgcccaccttggtctctcaaagtgctgggattacaggtgtgagccaccacgcccagccaagaattttttttttttttttaagacagaatctcgctctgtcacccaggctggcgtgcagtggcgcggtctcggctaactgcaacctccgcctcccaggtttaagcgattctcctgcctcagcctcccaagtagctgggattacaggtgcgcgccaccacacccggctaatttttgtgtttttggtagagacagggtttcaccgtgttggccaggctggtcttgaactcctgacctcaagagatctgcccacttcagcctcccaaagttctgggattacaggtgtaagccactgcacgtggctaagaaatttttaaattttgttttgaacatatttcggcaaggtctttctcacttatcttaatagttgaaataattaattaaaactatatgaagaattttaagatttattccaaatacttttttcctttctcagttattttgacagtttcttgtgatgtataaacagatattttgcatagcaaaagactttgatatctaatattgttcttcatggactggaattatttaattagcctgaatgcagtctaacttaagtaggctttttatatagttattataatggctatatttgaaaagtatgctttggcatagtagaaactgccagatgcaatgccatttgatctaaaaaggtcacgggaaaagggacatttaaattaagttataaattacaattgaagaacaatattttgatgtgtgagaccagagatgtcagagcagggagatgtaattcatgggttcattatagaacagaggtgcctgacagctgagccatgccaaaaggaaaatttatttgcaacatcacgcagacagaaaatggtagctaagatgagaagccagaatagaaacttgaaaccttgtggtaatacgcagagtttatgctaataagactgcctgagatccagagatgtttaatgactgctgtaatattaatgaggtgcttggacatgtgcacattttcaatcttataaaaattaaggcctcatccttgctctataaaataacatgctttataaccatgcgttaaggtggattctctcacctctctgtgcaacatacagatttgctggaatttcagaattgtttaggcaagagaattaaagctttaaacaagatttttatccatggtagctttgaggaaggatataatttaatgtttatagcaatccatgagaagttcaatcatgagttaattaaactgtaggcagtcattaagtattatttattctttcgagaagcttgccagtaaagcacttatatatattaaattatagaaagtaagcatggaatgatttgtcaggcagagtgagagtagcagatttaacttgggcaattatgcagaaatgtttttcttgtagcatgatcctttctttctgctaatcaggaggaggtcagaggctgtagtaagacaattgcagatgtgtagtgactaccggcattgttggctctattgaacctcttgtttgaatagtgttaggtaagagccatgtatctaaaatattactccccatgatgataccactgtacagcttacagctattttacatttcagagtgtcttgacacattttgtctcatttagcactttccatttttctgtgacccagctgagggctggtggtgttaggcccatttaacagatgaaaacctcaactcaactggttcgggacagggctattagcaagaatctgtcacttgcctcacatcctgtactattttcagtaggctgcagaaggtattgactagttgttaatttattgtagcacccagagttagttactgagagctttttaggcaactagctaaatatgtctagttattgtggcacagtatggctctgaatgaatcagtacagtggttacttttgttatagtggagccaaattaagtgtttattattcagaagttactattgtttttagcaccaaaatccgcgatgaggtccactttgcatagttcatgcatgcctgtctttgcacaccactgtatccctccccattgctagcaggcagagttgcttggtacctcttggttgaatgaatggaagcaaagagagtatggtgtgagcagcctgcctctgaggctggaatgtcctactgggttcaaggacaccaaggacttctgctgcagaaggtgtggcagaagagggctagacaccacatagggaaagagttcactcacatttgttctttcacaatgaacaaccaaaaacgaaggaaaaaatcacatctcagaggattccatggagcacacccagagaccaaaggccgattgctagaaaacagcaaaacaggcatagttctgagatggaatgacttgaaaggctggtggattgttcaagaaatcagtgttttgttatcagattccctaatcataaatcctaggtcttaacctgtggtttagggaagacaggttttatttgggtagaagtgcagtcatgcagtttagtgatgtggaaaagaggcggaaagatttacaagtaaatgtttccttgatcattggatttagaaaaaaaaaaaaaagcaccactgccacacacctgtggtgatgaatctgaaagtgctttctgctgaatgacatcctgctatagtggttgcgtgggggcagcataagatctaagtgcttctcccctccctagctttcaaagattgtaagctcactgagtcaagatgctttatcttggtccctgctttttgtactgatctttttacagtagctccaaaatgtacagttctctatactctacattaaaattgcatttaatcccagattttaccagcctgacttggctgcaaaatggacagaaaggtttaattattttgctttaattgcttttctgtggctacaaagtgaagctgtaagatgtttgagaggtgtttctttttccccatcttcattgcaatgtattttgcacagccttcttaggaaaacggtagaaaatcttattcacattaaaggacattttaccttagcaatatggggaagcctgtgttaaatttcctgactatagacgtagctgtgtggtcgtgatcaggtgtttagaatttgaaatctacgtaatgtttttcacagtatgaaattatggcaatccttcagaacttgatgttgtattagaggggaatgtttctaatggcaatttttagagatttaagatagccagtgttttgataaatttaccaattctactttatgtaaggaatatagttgaaatatccagtttagctctttattgaacattatcctcatctaaagaaagaaaaactttggctgggtgcagtgactcatgcctgtaatcccaacactttgggaagccgaggtgggcagatcacctgaggtcaggagttcaagaccagcctggccaacatggcaaaacctcatctctactaaaaatacaaaaattagccgggcgtggtgacgtgcgcctgtagtcccagctactctggatgctgaggcagaagaatcacatgaatccgagaggcagaggttgtaatgagccgagatcatgccattgcactccagcctgggcaacaagagtgagactctgtcttaagaagggttatttggggcaggtgcagtggctcatgcctataatcccagcacttcaggaggtctagacaggaagagcacttgaacccaggagtctgagaccgcactaggcagcatagtgagttcctgtctctacaaaaaataaaaaaaattagccaggcatggtggcgcatgcctgtaagctgagctacttgggaggctgcggcaggaggattgcttgagcccaggaattcaggcggaagtgggctgattgtgccattgcactctagctcaggcaacagagtgaaactctttctcaaaaaaaaaaaaaaaagcaaccccgggcagcatggcaaaaccctatttctaccaaaatacaaaagttaggcatggtgcacagctgtcctagtacttgggcggctgaagtgggaggactgcttgagcccaggagattgaggctgcagtgagccatgatcgtgccactgcactccagtgtgggagacagagccaacaccctgtctcaaagagagaaaaaaagaagggctatttgatatatcccagcacctaatagagtgcctggcatagctgagcactcagtaaatgtgtcgaaggaaagaaagatgtcctgatcgccagtaattttccccaaatgttgtaaaggtaagtttccctattatgaagctgttgtagtccataacaacttctagtatgttaaaagtgtatctttaataaaaaggctgggcgctgtggctgacacctgtaatcccaacactttgggaggctgaggcagggggggatcacgaggtcaagagattgagaccatcctggccagcatggtgaaaccccatctctactaaaaatacaaaaattagctgggtgtggtggcgcgcctgtagtcccaggtactcgggaggctgaggcaggagaatcgcttgaacctgggaggtggaggtttcagtgagctgaaattgtgccactgcactccagcctggtgacagagcgagactctgtctcaaaaaaaaaaaaaaaaaaaaaaaaaggtatttctttaaagatgtctcagaattttctcagacaagatttctacaaggtagaagtcaatgtctataacattaagaagatagtgcccctttagaaagagtccccttggttccctaaggaggaaagagtcccttaggtttcctaaggaggagggcacaccagaacagccagttgaccaagttttgaacttgcccctgtgaaacactgatgatagcgcaataatattcttccttcatccattcaagaaatatctctttggggctgggcgtggtgactcatgcctgtaatcccagcactttggaggtgggtggatcacctgaggtcagttcaagaccagcctggccaacttggcgaaaccccatctctactaaaaatacaaaaaattagccgggcgtggtggtgggcgcttgtagtcccagctactcaggaggttgaggcaggagaatcgcttgaactgggaggcggaggttgcagtgagtcgagatcacgccactgcactccagcctgggcaacagagtgagactccatctccaaaaagaaagaaaaaaatttgtcactttgggtaaataatcccacactttttacttctcagatgtgtctttgtgtaggggtgaggacgggtagggactctcaatacttactgataacatgggaaactcaggaatagggactatttttttgaggaatagggatattttaagaggccagccagacaacaggtcaaacaaaaggagagaatccgccattatatagagaacagagtagggaaggaagctcgagttaccgtgtcactggaatagcttcttcaggagaaactgccatctgaaataaagttttgtgaaggaagtaggaatgccaggacttgttcagaggagtgcctctttccccattaagctcatcactagaaattcagctgaggggcattgtgcaggctgcagccatgctctctaacaaacggaacaaccacaacgagatgttcaacacttcagtggaagcatctcttccagctatagtttaaaactcttcttggttcaccaaaaggccggaatgccacagggattaatgatatttgattgagcttcatccactcagcagtttgcttttggagtgggctttatgttctcacgagcaatttcctggtagcaggcacataagattttatttttcttattactattattatttttttgagacggggtctcactctgtctctcaggctggagtgcagtggcacgatctcagctcactgcaacctctgccgcctgggttcaagcgattctcctgcctgcctcagcctcccgaatagctgggattataggcccctgccactgtgcctgcctaatttttgtagttttttagtagggatgcggtttcaccctgttggccaggctggtcttgaacacctgacttcatgatccaccaacctcagcctcccagagtgctgggattacaggcgtgagccaccgcgcccagccaagattttgaaattcaaattttttcctgtatgtgagaccagagttttaatcaaatctcatttaacatgggtaattttatatgacacataagtggtttttgtttatagcttaacaaaattttttgtttctgagaagactactctgtaatctggaaagctgatcacacttgaggccgattttttttttctttttaaaagatgtagctaacatatattttctaatattatcctcacatgtcgctaagaggttgatgttattattttatccatttttaaagatgtcaaaattaaggcacaaaaatgataagtaactctctcaaggtcgcatacctagtaaatagtagagctagagttggaatccaggcagtttgactccaaagtccatagtttttcctacttacccttttttctttttttctttctttctttttttttttattggaggcagggtttcactctgtcacccggacttgtagtgcagtggtgtgatcaagactactgcagccttaacctcccaggctcaagccgtcctttcacctcagcctcctgagtagctgggactgcagctgggactataggcacatgccaccacgcccagctaatttcttaaatttttagtagagatgaggtctcactatgttgcccaggttagtcttgaattcctgaactcaatcttcctacctcagcctcccaaagtgttgggcttacaggtgtgagccactgtgcctagcctcatacttttcttataattaccccatacagtataattacctcttataaaagttgttaattttgccatgagcttttcattaaaaatttatgatttgatcaacttcatttgatttcaaattatcactaaaatgtgtgctttttgcattaaataggcatgtaattcttccttttattcagttccaatccacgttgacctgtgattataaacccccattgtgttatagaacttgacaaatgtctgcttgttctggatattaggcaaagtatgagaatctgactttatttcagatctttttatacgtctgaaagaagcctaggttggatagttttcaaacatttgcaaatcataatagtattttatttttaaaagagtctaatggtaataataaatacgaatttattgataaataataataaaaataaataagttaatatttattcattgcaccaccactcccaagtgggatccagtattgatcattgttgtaggtgttttgttttgttttaagatagttgatttattcttatagctaatgtacaacctggacttcccagtcttgatttaaaataaattagtgccctctaaactgtgagaatgctctggaaattcaaatttttaatactttctgttttgctgagtgagcattgaaaatggatgtttgggccgggtgcggtggctcatgcctgttatcccaatactttgggaggccgaggcgggtggatcacgaggtcaagagatcgagaccattctggttaacacgatgaaaccccatctctattaaaaatacaaaaaataagccgggcgtggtggcaggcgcctgtaatcccagctactcaggaagctgaggcaggagaatggcgtgaacccgggaggcagagtttgcagtgagccgtgatcgcgccactgcactccagcctgggcaacagagcaagactccgtctcaaaaaaaaagaaaaaaataaaagaaaatgaatgtttgtgatattccttttgttggcagttaaatgtttggaagagagacttgcagtgtgtgtttcagcatttatttattgatttcattcaacaaatatttaccactgccagcttactgtgtgcccagcccaggggctccagcagttgccaggaaggcatctgcatgtcctccggagtcttctgttagaaagaggaaacacatggctgtctcctcttgtgattccataggtctttgcctaaacctaagcaagagtaattattacaacctacttgatcttgtcattttgtatgttttgtatctgtaccaatttgtaagtttcctggaaataaggactgtgacttattaaggtttattctttacatgtcttgaatgttcagctttacttgacctgaatgttcggcaaatgctggctcattgttaaaataagagattgaagcacgagtgaaaagatcagaacgtccactccatgagaacggggatctctgtgttgtttactgctgtgtcccagaacctagtattttatttaggaagttagcaagtttttctggagtattaccttatactatggactgtgttcagcactggagatgcaagtcttagacaaagccaatctttgtgtaagaagactagatgtgtacaggaaaggtggatttccaatgagaattctgagtgacagccacagtatggggaggtagatagagcaggaggatctttgtacctgctgtttctctacattatctgcaagttggaactcagaaacttggagtgtctggagcatctttgcgaggtgggaaggtgtccatggtgccagacactacacagggttgaaaagacgcagggtgagaaaagttgattagctttgacaagaaacaagtctggtcctaaagggaatatgtagataaacctgcatctttattcatatgtactgaaaaactagcatactattacagacttactttctttaaaaagctcttaaattttagccactttaaatattttgtttttgtgtgaaattagcacagtcaaaaaacttaagaaatgctaaaaagaaagaacataatctagtgtgactttacgctgctttgcggagaatgaggcaagagtaggggtcctcctggctgggttggagtcttggcttcaccacctgctggctcagtgtggtgaacatctttacttgatctttctgtgcctcagtttcctcatctgtgaagtagggcgatgatagctcctaaaccgtagattaaatgagagaatactttccccataggattaagtaagataatgattgcatggaatgtcctgagcactgggcggggccaaacattccctaaatgtttgctttatgggaatataggggaatcctattcctatctttgccaaaatattttctgccttgcctgcctccctctcccagagtgagtagaataggggttgggatagggtggtcttggatgagaacaaattcctgcgcctactgaaatgatggagtctcagtgcccctttcctgactcttctgtgggagatagtcaatgaggagcttgccttggattgattgtgtcctgtctgttatttggtgcagttagctaactataattgttgttgttttagctgcatgaaagcggttacgatgctggcaaagccctgcagcgcctggtgaagaagcctgtgcccaagctcatcgagaagtgctggaccgaggacgaagtggtgagcaggaaccagcatttgccttgtgctctggggcatcgggccaccggcgtctcagtgtgtgacctccctgctgctcagggaaagcagaagcttcagtcatgcagaatggctgtccgtggcagcgccaggcaggaggatggggcccttcagccccttaattgtacagaaagacttgattttattaagattaggcttcatagatgtcgggaaagattgtccaactttcatggaaagaaaggagaaattgatagttactcctaaaaaaagttaatttgaacttgtttttggtgcaagctagcttgtgatacctccctatttaaagacagcatgttaaaacccgtggacatataacctaaagtagggttggtgacttgtcttttttttaatcataattattttagagaagggggttttgccgtgttgctcaggctggttttgaactcctgggctccatcagtcctcttgccccagcttcttaagtagctgggactgtaggcatgctctaccatgcttggcttggtgacttgtttttatagggcttgtaagacccctgacctccttaaaggacattgattacaagcgggaagcagagagttgatgaaataaatatgctggattttacatactgattgtattgctgtggcctgttgaaggaagtggggggagagaaatgtgcccacagatacagccttgcaaacccatggattcccatccagcagacagttttaatgaagctacatctccatcttgtgacttgtaaaaggcattgctgtaaacgacttacggatttcttgtgcttttgcaaatacagtcttcagtatgaatgttaccgcttgacatttgcctttcaggtcgaatgaaatttaaatgaaggctggcactaatacacctattgattgcaagttcctctcctgtattttaaaatatgctaagaaagaatgtttagaaattgtatgtgctttcctgatcccgctctttcattgattcagcaatatttactgagtgcctgcttgcgtgccaggtgttgtccctccttgggagtcttaagttttaagaggggagaccttcataaatgagtatgtgccgggggtggtgaagcagatacagaatagggtaatgagggagaatcagctgggtggggtactgtcttagctaagggaggatcaggaaagtcctggtaagtaacatttagatgagaccttagtaaggtgaggaaggcagccttttggatattagagaattctgggccctaaggtgaaagcatgcttggcatgttcaagaagtaggcaggaatgtttctgcaacacagcaaggaggggagtggtgggaggggtgccctagagggagcagatcaggtgtgacctgttggcctgctgtcagggcatggtgatgtgccccacatgagcagcttctgaacagaggagtgacttgctccgacagtggggctcacactggccgctgagtccggtggtctctgggggttgctgcacaccaggctgggactggtggctgggtggtgtggcagcagtggtcgtgataagaagcagcgagatccaggctgcaccttgaaggtagagaaaagagaatttgctcctagaatggctgtgggtgagggtgggcaagggctgaggaatgggaaaagctaggcggagctgagatgcactgaaatggccctagggtttggtaatggagtgcttgttgaatagttccttaagactttaactttatcagacttacagagttcatgaagctgttttaaaacaaacaaaaccataaaaatcttaacgtgattattaaagagaaagaaacatcttaaacattttaaaatgtttagacaacgttaaattcagttttgagaagtcgtagtgatactgtttttttactgtaagcctgtttatgtgaggagtggataagagatctgattgacaaggttttaaaattctgcgaaaagcctgtgtggaagaaacacataaggagatgaaaaggatggaacaagtgtatagactgtggtcgtttaaccaccctttgtgagattgtcttcagtcctctcagcctggcctaggcggcctcagggccttgtcagcttgcaatccatggctgcttctgcttctgcatttccctcagttcctggccatctcctctctcttcagtctccatgccctttggcgtcctctctccttccccacttccctgcctcttcttggtgtctcccaccctccccactcctcactcatgcctcccagcccctcgctagccatggctctcctctctcccttctttcatttctcttgtgacctttcattccctctggaattttaaaaatacacagccaaagtcctctcttcctgctgaagagaaagctgctttccttttcctgcagcgcctgcttgtaacatcaggcagctgttgattgtctccccattgctgctgcttgaggatttgtcgctgtgagctgagagggaagttttgcacatcagaaagagcctggtttattttgaaaaacaaaacaggactccaaagtggtgaatattttgagtatggaataatgatccttaactgtatacatccgtatccgtttggggtcatttttatcatgtttgcttcttggtttgaaaaatgtcttggcagccatccagcccttgtagagcctcaggatcaaatggttcccttatgtgtaggaagtgaagcttcactttgaaaacctcagcagtgaagaagagagactgactgaataattgagaggttgaaggaagcttctggtgaatggatccaaatcaaatctttgaagagatttatgtggcaacaaggcagtcccctctttaccctcgcctggctttggctgtgaaaaaacacctgctgtgttcatgtggcccccttctgttaaatttaccacattttctcacctcaggaatcacaggaataagcaaaacaaatgtgttccagctaacataaatacatgggcctacctcccccttttttcctcccagttttctatatacttggaacattctaattattatttttattattatcattactattttttaagagatgggggtcttgctatgttgcccaggctggactcaaactgttgggctcaagtgatcctcccacatcagcctctgagcagctgggactacaggcaagccacaatgcctggctacttattactaaacttcgctgccgctggcatattaatttgttctaactacccagtgtctgatctgactacaacagtcttgatgaacgggtttcccttggcatttttacatgaatactttgaagcagctgctctgtgagagggttggtgaaataagcacctgaaggtgtgagttccctgctgtgcagcggacaggctgggcctctgcacctcctgggcctggcaggcctgctgctctatgaagaaactaacctctcatgccagtgcagaccctactcgttctccagtctcagctcggttcctggcccatcccgcggccagtgctccctcttcgcactgtctcccctctgcgcgtcactcgcttggcagttcatcctctgcctcctcgtgctgacttctgatccccagctcttcattccttgcggtcttatttctgagttgattgtcctccgagtttgtaaacttattaagggtaaggacttaatgatgaagatagtttctctccatatgagaggcttgaagaatattgatgactctttgttcaaggtaatccttttaaaaagttcttcactataattgagtgtcttcaatccagcattttaaaacttttaatagttaatagttatgaatcagcacattaaagagaaaaacttttacatgcctcagaaaccaaccttaaaaattttacttttggagcctggtcaacacagcaagaccttgtctccacaaaaaaattaaaaacataataaaatagctgaacatggtgccatgtgcctgtagtcccagttacttgggaggctgaggttggagaatcgcttgagtccaggggttagaggctgcagtgagccgtgatcatggcactgcactccagcctgggcaacagagcaagactctgtctccaaaaaaaataataataataaaagtacttttggaaaaagctcacacattaaactctttcttcttgttcttcctactcctccttctcctcttcctcctcctcctatcacctgacctctttttcctaggtctttcagataatcatgaattctggagatcttagacctcagaatcacacaataggaggcctttcatctcaaactctcagtttatttctctgacagtgtgcgtgtatgatgttcctaattgaagttgctttggggctgagacacttcaaatcttgaactgaagccaaaatgtgccagtttctgtcaaattctgtaccggatactgcaaattaattttgcttttgccgagtgtctgtgagcaacacctgggtcatgtctttcaggctaagtaaacttggtttgatcagagaagcattttggaagaaatgctaggtcagtttgtgaagctttaaataccaaggtatgggtaagggtggagccaaagtaaatggctgccttctgcctctgagagttacattgatggttaatcaatttcacatatattatgctaaaaatactgttccttttcaggaagtcatccagattggtagaacttaggaagataaagaggaggaaatagagattaaaacattaaaaaaaaaaacccaaacaaaacaaatcttagattattaggtttttaattaaacatgatgaacacattcaaatataacataaaggccccaggctgaactgcacctaatcgaaacagattaagtcacccttccatgcttgggtggttattaattctgtttatttatgcatgcgagctgaaggtagcatttgctgctgttgtgttggtgcttattgcactgggattccgttgccgcttgatgctgtgctcttaattagcattcagctgttgattatggaaatactggggatgctaattgaattctttttaaaattcagggcctgcattttccttgtggagtttggtttgacttgcaagattgtaagattgggtgctccagtgagctgtgcatctcactctttgcttcctatccacttagctgcgttttggtttttaaaattattttcatgttgaattcgctttccgcaacaatccaggtgttgcacaaagtgaaggttctgttgcttaccatgttactacagggtgtttttatttcatcttgggtaactatagcttttatcttgaaatacactacccattaaatattttatatcaattttgatgtaatacattgaggtgaacaatctagatacaaataagctctgaaatttttatccaaaaatagttaatctgtggtagtgataaaccttaattggccatgtacatggatttatttacaagctcataaattttaaaacatctaaatcttccttcaatttaaagctcagtctatcataaatataaatgaaaatccttctttcaaaattgacatgagatggcaaagtaattttctaaatatttgtaatccagtgaacccgtgcggccggtcaaggaattacttacacagaatacacacaactatttgcagggtgtctttccccagcagcatctccagatgcctttgttatgccctttttggaatgtctgcttgagaaaacattgttttcattgttcactcttttcaagctaggcatctgaatgtgccagaagacggggctgcttagtggggcaaaaatacaatgaattttatttactgtttgcatggcagctgaggaaaatggaattcacagcaaaatccccgttaagatccaatagcagcaggaggttgtggaggtgaaaacagcaaggaggacaatgacaaagagggagagaggctctcagagcttgtagttatggttacgtggatttcagatactaataatcttggtgattttgttttaaaattttacatccacaatataggggaagggttagttatatttattttaggaatggtaaaatttccagagttgttgaccattttatgtagtcattcaaaaatgatgataggagagtcttgtaggtcatctagtacgaaccttttcactttcttattctttttagggttttgtgcagattgttttttttattgttagaacaacatcctaaaatcattaaagggaatttaaaacctcaccactaacacgtcgtctcacagtgtctggcttcatcgtctcatttgctggcttcttgctctcttctggtctttgtttatgtacgtacgtggttttatgtcattgtcaacttacgtatgtgtacaggtttgcatacatgtgagttgagtcagaacattgaaattatctttctaaagaaattataacttgaaaatttttacaattcatttggaacctttgccattaacccaaaatatagatacaatgtatctactgcatcacatagtaggtacttagtacattttaaattgaatcacagtagattctcctctctactaaccacccttcctccagttttaaatgacagtggtactgtttcttatgaagaactaaatttgtatatatgagagtaggaaaaataagagaaatagaaatgttgatatattacacgtatgtacatattactccatattatgtattcttaatgtgacctatagtgagaattagcccttaatattaaaaaagaaaaatgtagattcaagtgagatttgcctgaagttccaactattaataaaattggactatttttcctatggttaattcccatcggcctttgaaccaaacccttgcttaaagaagtcaatagtatggatagaatggagtttattgtcaagtcctttcggaaatgagacagcaaattaaaaatcaattatatgcacagaaaagttggtgtaaggcagtcaattctgtcaattagtttgcagaaagattctactgtttaacaagctctaaagagaaatgtatttttaaaaccctttagtaaatgaaataggacaagcattttattagaagggaagagatatttcaaaaatgtatttcagtagttcatgtcagtagaagtcgcctctgggataaatgtacagattcagctgtgacctttccattcacatccacggctcactactttctaggcttcctctttatgctgtggtcaaagaagttagtatgcccattttgctctttgtgtttaacaagattattcttttcttagtgtctttaaccggtactttttttaagtccatcatccccagccctacttttagattaaaaaaataaaagccagcataccttgtgctgttctttagggccgtgtgtgtgtatgtatatgtgtgtgtgcgcgcatgcgcacacgtctgtgtttagacatcagggctatacagagacctggaaagtaaccccacattgaatataagcacaccttaaattactcctggctgcttgggataatctttttaaatcgaagagtacttttgacggtatatttttcatttttgcttgagcggggagtaaggggagtaatggggggagtcttcagcttgaaagattaataaatactagagcagtgggttattgaagccatgtttccatctcattttcaagggcatgtaaaaaaatggagatagcatacactttcagccactctctatcatctttctctgttcatttaaaaaatgagaacaaggcacaaggggacttgagagattgcatttgttctcccatagacagtggttattttataaacgaagaggatggaaaacccttttcttgtgcagtttcttagcaacagaattggagtcagttttaatgcgtgtgcttagaacattctacgtatagtgacattggagtcttacattttcacaggtgagacatattacattggtaactggaattgaatgttgggagaaggaaacaggaagtgaaaaatgagaaccctaccatgagaggaagtcattcatttaaagctacctcctctctcctggcatacttctgtcttaaatctaaagtctcccttaggctaggcgcagaggctcatgcttgtaatcccagcactttgggaggcggaggcagggagatcaagtgaggtcaggagttcaggaccagcctggccaacatagcgaaacaccgtctctactaaaaatacaaaaattagctgggcgtggtggtgcgtgcttgtaatctcagctacatggaaggctgaggcaggagaatcacctccccaggaagcagaggatgcattgagccaagattgtgccactgcactccagtctgggtgacagagcaagactctgtctcaaaaaaataaataaataaatatataaagtaagtaagtaagtctcccttaggtagaagtagtgatggccttggtagccccctaattgccatcttcactagagtgccagcctattttgtatcttctctagtagtgttttgttattcttttcctaacaccctgcatgcaactaattgacacttagatttgattttgtttttgcacttgccttaagacatttttccgaagtacctttatataggtgaattctagtgtgttttccacatttatgaggcaaagtactgagctatcaggaagcagcatgtgtttggtggttataaggggagaaagacagtgcctgatattggcctcaccacctgagcatggggcctcaggatctgtctgtctggctctgcattccttgcagaggagtttggtgtcggtttggctcttcctgtgattgttgactgtgtgaacatgaagatagaatgattccttcctacttaccaagtttctcattcagttctgattttagctcactagttgaaattcattcattctttcattctggaaatattggtagagcattgacactctgccaggtgatacagcagtgaacaaaacagacaaaattctctgccttcatggagttgagattgtagtggggaaggaggatagattaaaacagtcttgctaagtgacatgtatagtgtgttagtcctgaaaaaattaaaagcaggaaagtgataggaaataccaggtagaggggttgaactttttcttaaggtagccatggagagttcacttttgagtaaagaccttaaaaagtgaggaagctagccttgcagatacataggggaagagaattctgggccaaggaaacagtgcaaaggccctgaggtgggagcatgcctgagtgtgttccaggaagagcaaagatgccccggagtggatggagaagatgaagtcggaaggccaccaggatcttagaccagagatgttcactcctattttgtacctcacagttaaattacattatcaaattaatgaggaattcttgagggctgttctgttttctcctaacattgtatctctcataacagtgtttttacggcttcagttatgtaggactctgagtcatgcattcctctgacttctgcagctgctcattgtgtcaagattgaagcgtttttgttttgtaactggtttagacaatatttactacataagtttactataaattcagcatttgtgagaggagctgtttttcctgagtaggagcaagaaaatacctggaaagaaaagtgtacctgctgtacctctatcttggagcagtcattactcttgttatcagcctgtcctgacaaattttaattcaggaagtgaacactgtggaaaacttaaaactgtagatgtcatgctctgaattataacacctaatgaaaagagtcatctcaaaaatcttcctttcttgagtcaaataccctggctttgagactcagctcaggggagagtccctctaatactgctgtttgacagaagaggccagcttcccttgtcggccggcatttgcttgctctaggcctgtggtgattattcttaatgtctggaggatggatgctacgtgcactgactaactagaatgctgggccaagcttaatgttccctagtagtgttctgatattcttctttccccaacactcgttcttctgagaggttagggtgctcacgaggcactttagaatgaggagtggcccatgactgatgaaggccgggacgtcactgcattttgcaggccctgctgcaccaggttggtttgacaagttcatttaggtgcctccacacaaaactaggaagtcttgagggcagggttgtagtttaattctttttgtattcacagaacctggcccagcacctggagcaggattgataataagaaaatatcatttgagtgggtggaacagaagagaaacctcacattgcttcagtgcagtgacctctttggctgagctcttgagctgccaccgtctagggagaattaattaactggatgtgtccctgttcttttcctctcagtagcttgctttggaaggagcaaccaactccttccagtttgtggttttattttctaaattccaattaaaaaaactcgttcattgccaacatcacctgatgtgtactgatgatacgtgtggttgagatgttctattatgggagaatgagtgatggagaaggaaagagctcagtgggcagcacaggtgaatctggctgttctaacacaccttcccatacaactcagcactgttcccccagttcaggaatcgtgctcccttgtgatctcgccactgcactccagcctgggtgacagagcgataccctgtctctaaaaaataaaaaataataataaaaaaaggaatcatgctgctaagaacaccaggaagattgttattctgaaaataggaggatgcccagagttgccctgaacagcttcgtcaccactgccccgtgtccctcctggctctgctgtctgagggctgctgacgtcctggcacctgagctctctggggaaggcacagttacctcctgaagaagataagccaggctcttctctttcctatatggaaaactcatttttggggtgggttggtgggcaaaagcaggaaaaacaggcctggtggtttgtggagagaaaactggcctgagagtcagaggtgtgggtatcagtactcagattggctgccacctgtgtggcctcaagaaagtatgatctccccactccccttcttgagtcttcagttttgtggggttttttttttgttgtttgtttgtttgtttgtttgaaacagagtcttaccctgtcgcccaggctggagtacagtggtgcgatcttggctcactgcaacctccgcctcccaggttcaagcgatcctcccgccccagccttccaagtagctgggattacatcctcacaccaccacgcccagccaatttttgtatttttagtagagatgaggtttcaccatgttggccaggctggtctcgaacttctgaccttgtgatccacctgcctcggcctcccaaagtgctggcattacaggcgtgagccaccacacccagcaagtcttaagtttttttttttaatctaaaaaattataggaaaaggagaaggaaagggaaggggaaaattctgaggtgctggcagctgtgtttgacaggaggtcaggattaagcccatcttggtctgctgcctgccccatcctttcacttcccaggtgaaaaattggccacatgatttatctaaagctaacagagtcattcctgtttaagaaatttgaaaacacacgtgtacacatgcatgtgtgcgtacacacacacacagtgtccttttgttactgaaagttctgggatctcccttgaagctgatttgtaagttttgatcatacttttatttttctaagctttgccattgacagtaatgaaaccaaatctcctaggctacagagatgcaggctaatgagtaccatagactccaccagagtgggaggaaggatggcccatcactgcagccatgctctgtgctcttctgtcccttgtgctcccctcaacagcagcttggagtcttctctgggagccactgtttaatattaaaatctgtggaggtgtcacacatttgctaataaactgttttccaaacagacatgttcatcctaaatattactcattttcttttttcagatagggcctctaattaattagggtgacagagctaagtaagcttggttatccaattttaaaagagaattttagaaaatgaattaaaaaaaaattttttttttgagacagagtcttgctctgttgcccaggctggaccagtgcaatggtgtgatctcagctcactgcaacctctgcctcccgggttcaagtgatcctcccacttcagcctccccagtagctgggactacaggtgtgtgtcaccacacccggctaatttttgtatttttagtagagacagggtttcaccatgttagccaggctggtcttgaactcctaacctcaaatgatctgcccaccttggcctcctagagtgctgggattacaggtgtgagccgccatgcccggcctaaggagatcttgataagcaaaggtttgggaaactggttgacctcgaccaaaaacccacctaacattaatctaagaaataaaggagctttgcctagagaagacctggagctttgatctgtggtgatctctcccacgttgaagtcttgatttcatcaggcagagctgttccaattctcagagcagcttaaagagtggggtgggctctggatttttgggatcctactgctcagttcagtccatggaaatgaaattctccagtcctttagcaataacaaaagtagaaaattattttcagatcgtcctttgagacaacccaacttctttgtcagcttcatagtcactttccaagtttatgaccccagagcaatctgaccttggtagcttgtctccctcattaaattctctgacttcataatcagctcacattcccttcctctctctccctctctttttaaatatctgtaaaacattcaaatgatccacgtagatttatcttgcttttaggccacactctgagatgtgtaatccggttgctcacacatttagaggagtccatgagcatcacgccatgctactctccactggtttgaacatcttaggcactcaggcattccgttacgaagatgggcatgtgtacgggtgcactctactgagcctgagtatcttcacaaaaggggtggtggattcttgaaggtgaagagcaaacatttttgtctgtttctggataattaaatttaccttaaaaatatacatggaaaaaggaaggtctttatttttcatcttatactgaatttaattctactgcgtttccattcctactcttgtgtgcagggctctgctggatgtttgagaccgttgtatccactgtttgctctcataattcttcctctagttgaatcttctgttcctatcattgttagtttgttcttctattattcaagtgactttttttttatttggcttagttttttggaaacaagacttagaaaaaacattattgatttctgtgtacaaaaggaagggagcgtatcagtgactttaaacaaacagcatttgttctttcactgctaagatctctgcaggagttaccaccaaccttggtaactgcttggcagtatggcaggtgacatgccatcccactgtggtatccttgactgatttgggtagtgggtgtaaatgagtgcttgagttggatttatcaccacagaatctagagaggggacagcagccacacaattgaaaatttgttttgagtgcctcttttgcttcagatggtgttctggggctcacagggcctgctgaggtgagcagcttgctccctgctcttggacagggagatcaggaagggtgctgtagaggaggcttatttgagaggaccttgaaggatggataggatttcaccgggcagagttgacagaggttagttaattggagaacaagggctaaaagaatttgagtggttggttagtagcaagttgttgcccagtttggatgaagcttatgggtgggggaggatgtgaggtagctaattcagagccttccacttttgactgagaagtttatgtttaattcaacaggaaacgaggaaaaattatatatttttgaatgtgtggggaaggataggactggagctgcccttgaagaccagtctggcagtagcattggaagagtggaggtgggctgaggacgtcttgtaaacttggctgtgcgttagagtcatcgggagaacttgaaaatgccccaatgctggcctgtaccccagcaagtcagagcagaatccctagggtgggacatgggcatccaggccctgagaactactggactggatcaggactatgcccctagtgagagacgttgagagctgtcggtgtacagcagcacttcacactattagcacgctggagtcacatgaggaacttcagacacacagagcagaaacttgggtccaatttaattcatctggggtacaagtttccagtgtcccaggatgttaggacactaatatgcagccaaagtgggtggaagattgggctagaaaattggtgggaggtcgggatgttgaggcaaggagtatttttttttgttcttttttgagatggaattttgctctgtcacccaggccgcagtgcagtggcacaatctcagctcactgcaacctctgccttccgggttcaagctgttctcctgcctcagcttcctgagtagctgggattataggcatgtgccaccacaccccagctaatttttgtatttttagtagagacggggtttcgccatgttggccaggctagtctccaactcctgacctcaagtgatccacccgcctcagcctcccaaagtgctgggattacaggtgtgagccaccgcgcccagctgaggtagtgagtattgactgcattgttgacataatggatagttaagccccaggctgcatagagaacatggggaaccagtacagaagtggtagaggagttgagggacacagtcaagaagagggatgttgtgggggtcatggtagctgtgcagtaaatagggaaaatctgtagtttcacatcttaggtatggctaccggtagatggctaggctggaataaagagcaccaagaatggtagacacagactattagaagggccgtgggcaaccttttccacgttcctgagagtgctgtcgaaaggtaggatggaggaagagacttagctagctaggaagagactttggtgctggtcacaggataagaaggagatgggtttggcaagtggttgacactgtgatgggggaacccggatgggcatggttgatgagacggtgagacaggattgctactgttgacaaaacaacttctggccctataactggaggggttaaaagggattctgtgtggatctgaaagtgagaaagctgcagcagggctcgggggttggggtatgaggccttttggagaactgcgtgtgagaggacagtaggtctctaggggacgtcgtgcgaggcgtcagttgggatttgctagggtgagcttctggtcagaaggacgtctagtctggactgggctgggaatacaggaagggctgggaaggaaggaagcgtgtgctatgctggtcatttaggtcccatggagagggaggtgagcgttgcctccacacgcagctctgctgggtgctgtgcttctcggtggctgttggagctcctggcttctcagtgggatcactaaatcgttaactggtaaatggagccgaagtgcattaacatggagaggttgaaggtggaggaaaggtacgagaagatagagttttgtgaatggaagactatgtagactaagatcgcagattcaagtgttggctgtagaatatattcctgctgtttgtctcctcagtcactcaacaatgagtactgactgtgtacgaggcaccttctcaactctgggaatagaaataaccgtggaggtactgttctcatgggatttgcattctaatagggaccacagacaaataagcaaattaacttaaataagatgaattcaggtagatgccatgaggaggataaactagttttgccacacacagactgagtagggtagaagttgtatagctataaaagtgactccttcagggtagaagcagcttctcattccatgttactattctctcttgagtaattctgggtaaatgataccactgatcattcatgtcagtcaagagtgatctatatttttctagcaattcaaattactgacccccatccaataatctttgtggtcatgtttcacaattgcctataaactgctcattgttaggacctgctaaataaatgtctttaggactcaataactttcagagtttagaacagattaaatttagctgaaaggaaagatgggatctctgctatggaagtgcagtcacgtagtggtctttgacagagcaatctgtgcgtttttcatacctagatgtgcatttttcagcatgagttacacaatagtagaatatttttaaattctaacaagattctttgaagttttttcatgacattttggattgggggaaagattagaagagaaaggtctggttcttgttaaaacctttgctgataatcttatgtcagctgtgggtgaatactccccatggccaggagagacagaacagggagaagttggagctgaacccaaaatggggctctgtctagccggcggagttccctttaaatgtcactgttgtttcgttttctttgatgctttctcagtgtaacatgttttatccaaacaggctggagggcctaaaacaaacaaacagaagacatgaaggagcttgatgtgtggataattcatttcctctttgtaaggaacatttctttgatcctttattaggccacaaaatgtttctgcctgccgttagccattcttgactgtgttgagaggccccgccaattccagccggcctggattcagagcagcctgatcttccaccagcctgggaagaaggctgtaaaggccgatctcatgtctcagggctgtccccaagttaaccaagcgaaagagctgcagtgctgttgtgtgaggtttcatgcgtgaggtttcctgtgtgagtggtgctgacatcgtgtccagtcattcttcagtttgatttttcaaaaacaagaaattctggttcttcttccttttttttttttgtttgtttatttgtttgtttgtttgattgattgtttgagatggagtcttgctctgtcaccgaggctggagtgcagtggcgtgatctcggctcagtgcaacctgcgcctcccgggttcaagagattctactgcctcagcctcccaagtagctgggattacagatgtgcgccagggccatctggaggcctctgcacacggcaggcatttaataaatgtttcttcaatgacgtttcctattagccaccatgcccagctaatttttatgtttttagtagagatggagtttcaccatgttggccaggctggtctccaactcctgacttcgtgatccacccgcctcggcctcccaaagtactgggattacaggcgtgagccactgcgcctggcctttttttttccccctttttattcccttccctcacttctacttttttcagataactcttcatctatctgtggaaaatgcacccaatagtaattattttctttagaatatttatgctgagaagacaaaagtgttggtaaacctgctttctggttgagtctgtgccttggaccagttgctgtaccttgggagagtcattggtcctctcactaagaaatgagagtaataataattaaatagtccccttctggctctgaaaggcccagatactgataataggaaacgtcatcgaagaaacatttattaaatgcctgtcgtgtgcagaggcctccaggtggccctggacaggaactccccacctcaagaagatgatgttctaatggcagtggtggacttggatgcccagaacatagtgctgggcagaatggggaagttccatggggcacacagaaagatggaaacacagaggagcacgacatgacataggcatgagatagtaagggaatttgttcagagccgcagcagtggtgagtggagtactcaggaatccaagtcagatcatcacacccaatatcggctccccagacagcagaactaccctgtgaggagacacagagagtgcaggatgtattcggagaagcaggcagagcctggctcgagttggatctggaggtggggtggcagacgcaggcaagtgccgcacactcattcttctgtgtccattgcatacacggtcaacacagcacagcctccactggagctgaaacgaaacctcagaatccacatgcttggtagattttacctctgcataaaagtggggttcctcaggcagcaacctttgctgttctgcagcctctgctggtgatacccaggcaaacaggttctgaagtggacctccagaaaactccagcagacctgcagcagaggggcctgactgttagaaggaaaactaataaacagaaaggaataccatcaacatcaacacaaaggatgtccacacagaaaccccatctgaaggtcaccaacatcaaagaccaaaggtagacacatccacgaagatgaggaaaaaacaaggcaaaaagtctgaaaattccaaaaaccagaacgcctcttctccttcaaaggagtacagctccttgccagcaagggaacaaaactggatggagaatgagtttgacaaattgacagaagtaggcttcagaaagtgggtaataacaaactcctccgagctaaaggagcatgttctaacccaatgcgaggaagctaagaaccttgaaaaaaggttagaggaactgctaactagaataaccagtttagagaagaacataaatgatctgatggagctgaaaaaaaaaacagcaggagaactttgtgaagcatacacaagtatcaatagccgaattgatcaagcagaagaaagggtatcagagattgaagatcagcttaatgaagtaaagcgtgaagacaagattagagaaaaaagaacgaaaagaaatgaacaggcccggcacagtggctcacgcctataatcccagcactttgggaggccgaggcgggcggatcacgaggtcaggagattgagaccatcctgcctaacatggtgaaaccccgtctctactaaaaatacaaaaaaaaaaaattagcccggtgtggcagtgggcgcctgtagtcccagctactcgggaggctgaggcaggagaatggcgtgaacccggaggcggagcttgcagtgagccgagatggcgccacagcactccagcctgggcgacagagcgagactctaaaaaaaagaaaagaaaagaaatgaacaaagcctccaagaaatatgggactatgaaaagaccaaacctacgtttgattggtgtgcctgaaagtgacacagagaatggaaccaagttggaaaacactcttcgggatattaaccaggagaatttccccaacttagcaagacaggccagcattcaaattcaggaaatacagagaccaccacaaagatactcctcgagaagagcaaccccaagacacataatcttcagattcaccaaggttgaaatgaaagaaaaaatgttaagggcagccagagagaaaggtcaggttacccacaaagggaagcccatatcagatgagaagagtaaccccaagacacgtaatcttcagattcaccaaggttgaaatgaaagaaaaaatgtttagggcagccagagagaaaggtcgggttacccacaaagggaagcccatatcagactatcagcggatctctgcagaaaccctacaagccagaagaccgtgggggccaatattcaacattcttaaaagaattttcaacccagaatttcatatccagccaaactaagcttcataagcgaaagagaaataaaatcctttacagacaagcaaatgctgagagattttgtcaccactaggcctgccttacaagagctcctgaaggaagcactaaacatggaaaggaacaacaggcgccagccactgcaaaaacatgccaaattgtaaagaccgtcgacactgtgaaaactaacacaaggacagaaaaccaaacaccacatgttctcactcgtaagtgggagttgaacagtgagaacacatggacacagggaggggaacatcacacaccagggcctgttggggggtgggggcgggtaggggagggatagcattaggaaaaatacctaatgtagatgatgggttgatgggtgcagcaaaccaccatggtacgtgtaaactatgtaacaaacctgcacgttctgcccatgtatccccgaacataaaaaaaaaaaggtggggttcctgccgcaggtggttgctgatggagacgattgtctatctgtcttcttctgcagttggttcagaaccaagatcacctctgtaatttcctgcttatgaagattattgtcttcaaccactgggtgttggggctggcccatctacatgtgtagatgatggctgaaaaataaaataagtaaaaaagagtccagatgcttgggtgtggtgtgggtatgtgagagtccaggctgaagtgacagaatggaaggtgccaagcactttaattggcacactgaagaatttgtgctttttactgtccttgaacagagctatagtcagctttggaattccagtgaagaaaagtctgtaccttggtggaacagcagttacatacggcaagatcttccatggtgcaacctgtcttggttcaagaaagtgttttcagtgaccctagtttgtttctgttaggtaaaaccagactaaatatagctgagatgtggaagcatgcttggtaccccaaagaatttctgggtcttcctttaggtagatacaaagctaagaaaaatattttatccctatgaagcccctaaaagaattttgcctgaaagcgcatacccactcccaaatttaaattgactttttttatgataaggatgtaacttccaaaattacaaacattgacatttaaaaataaaattgttccctcactcttttaaatattacaagtgaattttaaataccatagtgatttatacccattatctttttttttttttttaaataaagaaaagaggtttaattggcgcacagttctataggctgtacaagcatgacaccaacatctacgcacttcctggggaggcctcagggagcttttacttatggcggaagctgaagcgggaacaccacatcacatggtggaagaaggagcaagggggtggggctgctacacacttttaaacaaccagatcttgcaagaactcactcactattgcaagcacagcacccagaggatggtgcttaaaccattcatgagaaatccacccacgtgatccagtaaccttccaccaggccccatctccgacattggggattacatttcaacatgaaatttgggaggagacaaatattcaaattatataattccattcctggcttcccgcaaaccacatgtccttctcacattacaaattatccgttatcgatagtcccccaaagtcttacctcattccagtataaactcaaaagtcctaagtcttatctgagacaaggcaagtcccttccacctatgagcctgtaaaatcaaaaacaagttatttacttccaagatacaatgctggtataggcattggataaacattcccattccaaaaggtagaaatcagtcaaaagaaagaggcattgagcccaatgcaagtcctaaacccagcagggcaatcattaaatcttaaagctccaaaatagcccttgactccatttgccacagcctgggcaaactgatgaggggcaggctcccaaggtcttgggcacttccacttctgtggctttgcagggttcagcaaattggagttgaatgcctgcagcttttccaggcatacagtgcaagctgctgatggatctaccattcttgggtctggaagacaatggccccttcccacagctccactaggtggtgccccagtggggactctgtgtgggccctccaaccccacatttcccctctacactgccctagtagagtatctgtgtgagggctccatctctgcagcaggcttctggcctgggcacctgatacatcctctgaaatcttggcagaggctgccaagcctccatcactcttgcactctgtacacctgcagacttaacaccacctggaagctgccacagcctatggcttgtaccctctgaagcagcagcctgagctgtatcagaggccctttgagccaaggatgtagtcacaggggcatgtgggaagcagtgtcccaaagctgcagagggcagcaaaaccccatgcctggccctgaaaactattctttcctcttaggtttctcatcctatgatgggaggggctgctgggaaggtctttgaaattcctttaaggcctttccctcattgtcttggatatcagcgcttggctcccttttagttacacaaatatctctagcaagtgattgctttacagcctgcctgaatttctctcctgagaaagcttttctttctttttttttttttttttttttctttttttgagactgagtctcacctgtcactcaggctagagtgcagaggtgctcactgcaacctctgcctcttgggttcaggtgatcctcctgcctcagcctcccaggtagctgggattacaggtgtgtgccatcatgcctggctaattttttgtatctttagtagagatggggtttcaccatgttggccaggctggtcttgaactcctgacctcatgatccacccgccgcggcctctcaaagtgctgggattacaggcgtgagccaccacgcccaaccaaaagcttttctttctttgccacattgccagggtgcaaatgttccaaacttctttgctctgcttcccttttaagtataaattccaacttcaagtcatttctttgtccccacatttgagttaagctagtagaagcagccaggtcacatcttgaatactttgctgcttagagatttcttccaccagataccctaggtcatcactctcaaattcaaacttcaacagatacctagggcagaaacacaacacagccatcttttttgctaggacatcacaagggtgacttttgctccagtgcccaataatgtcctcatttccatctgagaccttctcagcctggtcttcactgtccgtatcactgtcagtattttggtcacaaccatttaaccagtcttttaagaagttccaaactttccctcatcttcctgtcttcttctgagccctgcaaactcttctaacatctgtccattaccccgttgcaaagctgcttccatattttcaggtgtctttatagcagtaccctactcctggcaccaattttccgaattaggccattcttgcattgctataaagaaacaccagagattgggtgatttataaagaaaagaggtttaattggcccacaattctgcaggctgtacaagcacggtgctggcgtctgtgtggcttctggggaggcctcagggagcttttacttatggtagaaaacgaagtaggagcaggcacatcacatgatgaaaggaggagcaagaactatcatctatttttaaaataagctttttttttttttttttttaagatggagtcttgctctgtcacttgggctggactgcagtggcggcaccatcttggtccactgtgcaacgtctgcttcccaggttccagcaattctgcttcagcctcctgagtagctgggattacaggcgtgcgccactatgcctggctaatttttgtatgtttagtagagacaggatttcgccatggtggccaggctggtcttgaactcctgacctcaggtaatctgcccacctaagcctcccaaagtgatgggattacaggtgtgagccaccatgcccgacaagttcattttttaaaagcagtccaatgttgcatcttatccttttccccctttaatttttatttccattctacttccccagggactttatactaagatgatacattttatgtttgaaagtccagtgtccgattgacctttagtacttccctgcaacaaaaagtgtgtgtattgaaatcgggcatatggttatttcctttaataataaagctcttaagtatagaagaaatgttttttcaaattataattattagagcacagttgatgaaaacaacgaaataatgtaaatgttgatataattttcatttttgcttaacatttattggaaataaattgtatggtttttttaaacacgtaagtgcccagaaaccttgtttatgtgagtaagtagatgggaatgatagttttgttacagtgtcactcagttatttgaattctttccataataatgccaaaagtataatttgtcgtcagatatgactttccgcaatctatcagatgacacttccactaggacctccttgtgttttgttgaaagcagagaatcagaaaatgtctgacttgtggagtctttctcatcctgacctcagagctaggcactgtgtcagcaccagtgtcaatgttttaaattgtccccttgttcagtgcccctggggcagtgctgcctggtagccttccagatgggagcgggggagaggaggctgcctttgtgaagtgagaggggggcagtggtggggatagaagaagagaggctgcatcccctcacaggagcgtgtgccttctcaggctgatggattgttggaaagagaacataggaaaaaaatgtcttttgtgtccatacatcccattttgcggactatggtcttacacatcttatatgccaggcccacttctgggcactgggagagtcaaggaaacccacgcccccataggagctgggctagtggtgtgacgagggctagcttaggagcttggggcaggaaaccgggctgcatattgcactggaaattgaatgatgaaaaacttgctgtccttgccctccaagggtttatcatctgaggtcacataataaagcaaaacagcccccccacccccccgaaaaacaaaaaacctgcatgagctaaagaaaaccctctgctagctcttgttatttagtgtgttcatagagcagttatattactctggcatactttctattttttttttttgagatggagtctccctctgtcaccgaggctggagtgcagtggcatggtcttggttcactgcaacttccgcctcctgggttcaagcgattctcctgcctcagcctccccaagtaggtgggactacaggcatgtaccaccatgcccagctaatttttttttttttttgtatttttagtagagacgaggtttcaccatgttggccaggctagtctcaaactcgacgttaggtgatccgccagcctcggcctcccaaagtgctgggattacagacaggagccaccgtgcccagcctttttttttttttttttaggtggagtctcgctctgtcgccaggctggagttcagtggcatgatctcggcttactgcgacctctgactccctggttcaagtgattctcctgcctcagcctcctgagtagctgggattacaggcatgcgccaccacgcccagctaattgtttgtatttttagtagagacagggtttcaccatattggccaggatggtctcgatctcctaacctcatgtccgcctgcctcggcctcccaaagtgctaggattacaggcatgagccgtgcctggccataaaccatttttagaaggagtcaggctttaccagactgccaaagggtccatggcacagaagagataaagaactgtgcactcagtgctggccccttccacatactacaaatagtttccagagtccaagatgacagtttcaatacagtggtttcatggaaggatgctgcatagagttggtgttgggcacaatgttactggcttggtacatgcaccatagatattttgtttttgtttgtttgagagggagtttcactcttgttgcccaggctggagtgtaatggcgcgatctcagctcactgcaacctctgcctcccgggttgaagcaattctcctgcctcagcctccccagtagctgggattacaggcgtttgccaccatgcccagctaattttttgtatttttagtgtagacggggtttcactgtgttggccaggctggtctcaaacttttgacctcaggtgatccacccacctcggcctcccaaagtgctgggattacaggcgtgagccactgtgcccagctcacaccataggtattttaaatgttgcattagactctcagacctgttattgtcctgcattatcctaaggatgctactatttcctgtaatcccatttacagtcaagtatcagggaatccacctggaaccgccagggggtgtggttcccaagggtcattgacctttcttgctcctcctttccatctgagggagaaaactttcattgcctccagattgtgtttcaaaacaatggagaatgttcttggttttattactaagtagtcttgacctctagcttcgtagttattgattggtttgtttctttaacatcttgacattcattattttcttcctggtgttttcttaggcagttgattcctccacacaccagctctcctgacttgaagctacggagatgcatttagatcaggtttcttgcatgctgctggctttatctcatttacagtatcgcatttctgttgccatacactgtaggatctgggcctccccacagctttagaacaattagtaattgagcaggaagtgtgtttttattacagtggccttttgattttgattttacaatcatgtagtgtttagcagagagcagaggtgggcaagtggctctctcaaacacatttttgacagagagaagtctgttgtttcagccacttggctatctgtcagcggttctcagacttcccccttgtgtgggttgcctggcaacctggggctggagcaatcaaaccgtggccagcgcttctccagcccagactgggagacgatttactggtggaactgtaagtacagtaaacccaagcctcagaaatggaccttttttcttttttaaaccaagagtttatagaaaccatatcaaggcaaaaagagagagagagggagaatatcaattagagagttttgttgtaaacattttaaataataaaattagggcctgtaatgagcttatcatctatccagatatgtataagttaatatttttacttagttggattattacctttttttttctttaactgttttactggaacattcaacattttaaaagttagtacttttaaacgctacatttgagtacttgtgatgctgtctttccacgaaaacctcaggcgcagagagtgttcatggctagccggaagtaaactgtgaggccttgctagaatcaggcctttgaaacagagcccagctctcctgatgcctgtgttcctggtttactgtagtgagcacaaaatgctgattgctcttttccctatttttcaaaattagctgaaaaatccagagacccatctatatgggaaatccctataccttctgttccgttttgctgtgaacctgaaattgctctaacaaataaagtttatgaaaacattttgaaaatgcaaagattctgccttactatatgctgttgtaacagatgttttagtaggtctccctcttcgtatgtatatacatctttttaactgaaaattatcctatattgatttttttcctacaggagtgagatctggctgggcacagtggctcatgcccataatcccaactctttgggaggctgaggcagcaggattgcttgaaatcaagagttcaagaccaagcctgggcaacatagtgagaaccccgtctctacaaaaaaatatttttaaaattagctgggcatggtaactgacacatacctgtagtctgacctacttgggaggccgagccaggaggatcatttgagcccggaagctccacgttacagtgaactgtgatcataccactgtagcctaggtggcagagcaagaccctgtctctaaaaataataataaataataataaaagtgaaatctaacagcacttgttgaggtttctccttcatagcatctcaaatatcacaaacgaggatgaaaaggactctatttcgggggacatactgcatgggggtggggggagcagaagtctcagcctgggttagcagtaatctgagcatttctttttgtaaaattttagagaaatactttggaactcaaactcccctctgcatgcagcccattgtatccagctgtgtatgtaaatgagctattagtatgtttgtattccttataaatatacagatctaatctgtttgtgtgtgtaatttacacacagctgtgttcatgctcccgtattaccaatattgtcagcaagagtgaggtatcatgggagcgctattgttccaaacaaaagccagcagcgtagccttgtggtggggcccattaccagcccctgatcttgggaccctcccttgggggactctcttgaaagtcacagccattctgcatggggatagccatcctgcatggggtaggcgggagaccagagtgcctgtaatagaaaaaaaaaacaatgatcacctgttagacagggatctgcattatgactgaggtttggcttttgtcattgaaatgcttcctccacccccaccctggactacatttcctaaaggggtcattgattttcctttcttctttgagatcattctttaaatgaaccgagtcaaatgaggaacccagtcccatgttgtattgtcatgaaggggaaacaaaatccaggagcccctcctgtatcaggagctgacggaaggccctggtgctggtcgaggtcttcagtttcccttgtttgggaagtggggcagatcttaagaactttggcatttggtcgaattcttctagaagacaagttttatgtaatttgaaataacggccctatgtggttttattttaggaatttatgatatcgttgcccatgattctaacagtatagttattttgcctccctaatagaaaacttggagtgctttggatgtttcagtattttacaaaaaaagaagttaggattattctagacctgtgctttccaatgtggtaaccactggtctcttgtggctgttgagcatctgcaatgtgctggcccaagtgtagatgcacggtcagtgtaaaatacacactgatttcaaagactgagcaggaagaaaaagaatgtaaaatatttcattactaacttttatattgattacatgttgaaatgataatatttttgatctttttagttaaataaaacatttaaattaattttacctgtttctttttaaagtatggttactagaagagtaaaacttacatttttggcttatatttctatcgggcaaccactggtctagattcctttaattacagtttttgcaaaatcctctcacggaggatttctacttttttgttcccttgtaacttctagacaatccacatttctttttttagcttatttctctttcctcctgtgttgagatctactttgccaaggaaaggtgaacattttaatgacataacttaggagccactttacaggggcatttatgtagcgactgtagggtgatattgtagggagagaaggagcctcccatgcccatttggattctgttatgagtgttgggttattttatttattttttatttatttatttgagattgagtctcgctctgtcgcccaggttggagtgcagtggcacaatctcagctcattgcaacctctgtctcccgggttcaagcaattctcctgcctcagcctcccaaggagctgagatcacaggcacacgccaccacgcctggctaatttttgtatttttagtagagttggggtttcaccatgttgaccaggctggtctcaaactcctgacctcgtgatctgcctgcctcagcctcccaaagtgctgggattacaggcatgagccagtgcacctggccgtgttgggttatttttaatttgggcgtagctgtgtggccataattggcaagaggcatttggctggcacaatctctacatctgttaatgctgctgcttaactagccagttctcatttgacttgaaagtgcattgatgcatgctttctgatattcacccagtggcagtactttttgttgggcctgcaataatgaaaggacttcagtgtactcagtgtaattatctagacccagaggggcactgacagagatgtatatataggatagctcaatgggctgtgctagtgggtgcagttgctgtttaaaccacaacatgaggtcattttcccattgggcacatggtctttgaatgaaaaatggagtaacttttatttgatatttgagacctcctgggaagggtttttggcatgcaggtgtgttgacaaaggaaatcactggctctactctggatgctgagctggcatcacggaggggatggtgtagttcctctagtgggtttgaacgaagaacacctaatggttttgtcagtagtagttagagagttagaaacttaacagtgcagtgaatatatattaagagacgttgagtcaaactggagaacaggtgatgagaggtcaaatagccttggaggaacactaagcccaatcatctccagatacattcttgtactgaaccagtggttgtcaagcacctgctatatgttgtcaagtgctgttctaggtgctggggatataatagtgaacaaaacaaaggccctttcctcatatattcagtaacgtagcctatatcgtgttatctaatcatatcacatatggtgataagagctaggccttaaaatgaaggcagagtaaggttatagagaggcatgcaaattggggaagcatcattggaagattgcttatttgtttgcttaaattaatagtgactaacaggttaaagtttttagtggttttagtaatgaatcttgtattagttgcctatcgctatgtaacacgttacccctgataataaaaattagcccaatgtaaagcaatgatgatcatttattatctttcacagtttctgtgggaccagaatttaggaatggctccaccgtgcaggtctggcttaggctttcacgaggttgcagtcaagtgataggaggtattggaatcatcttgaaggtttcttcacttatgagtctgggctaggaagactcaaatggctggggactagaatagctagggtttctgtagcacctctccatccctgatggtctctccagcgtggtgactttaggcaagccggactgtttaatctggcagctcagggcttcaaagacacgtgtccagagagggagagcccagcagaagctgtgttgctttgtatgatgtagtcttagaagtcacctggtatcattctgtcacattctgttggtcaagacagttacaaaggtctacccaggctcaggaggagagaacagagagacccacctgtcaatgaaggagtgtcattatcacattgttagagcatgtgggatggaatctgtattggagtggccacctctagaaaatatagtttgtcacaaatgtaaagattttgtgggtatgtgtggtttgatttgttggtttaatttcagttaaatgatttatggtcctcatcagtaatatgagggtttcaaccagcgtagttctctaaagcttctttctagctttctcattctctgattccaccgatagcgcaggtgtggcagggtgtgttgagctggcagctgctcagcttctgtagacatttctgagcatatcatcagaagagtcagctgggacattgaggggctgttggactcttgctggcctcacacactgaaagacctggcgcttcagtcaccctttgtgttatgtttctatagctaatcttaactgggggttgctagtggtggggtgatggaataaaacaatgatttaaaccaggagctgtccattatcatgatactcatgaactgaggagggtagaacagccaggcaggattatattagatctaccttcccaagtgctccttctcattctctttggcctttggaagattaggaaaaagaggaaaagaaaggaaacagaaaagagaactctttggtattactcctctgtgtcagctaaacagctgccatatttgaccctagagaggacttcttttagaaatgaatggggccgggcgcggtggctcacgcctgtaatcccagcactttgggaggccgaggcgggtggatcatgaggtcaggagatcgagaccatcctggctaacaaggtgaaaccccgtctctactaaaaatacaaaaaattagccgggcgcggtggcgggcgcctgtagtcccagctactcgggaggctgaggcaggagaatggcgtgaacccgggaagcggagcttgcagtgagccgagattgcgccactgcagtccgcagtccgacctgggcgacagagcgagactccgtctcaaaaaaaaaaaaaaaaaaaagaaatgaatggactgttactcagagggcttggatttgggatcctgttgtaattaccatagaatcttctgggactagcctgggaaacaggtcttttttgtgtgtgctgaaactaggatttatttcaaagacacatgtccagagagggagaaccaagtggaagtggtgttattagatattaaaggtatttaagacagttgacaaaacatagcatgcaagacaagatgtctttttggaaatagttgagtcctcctcttgtctctttgtaggaccaagaggctaccctgctttacgactgttccattgttaagagaaccagggacatagaaattgaggctttgaagatggtggaggcctagacacccatcttgcacccaggaacacagtagtcctgagatagggctagttaccagtacgggggatgtagttatttagttactgaaccatgccaggttgtttgtgggaaaattttcctcatggatatccagcatacagcatataatctccgacatgtgcttttatttcaagagtttaagtttgggtatatgtatatgtatatgtgtatatatatgtaaactttcctttaaagtatcttaagaagtaccttaagaagtatcacaccctttattcctctgagatgaatagatataaaacagtgttttctgcactgagagtccaagtaatcaatcccattttaaaatatgatttacttctccattcttcttggaaaaaaagaaacaaatctaacattgattagaaattttgtttccatcctaccaaacatgtattatgtttcagggagaactctaggaccaaaaacaatacccatgcagccacccaacagttatcatattgcttggttacagtttgccaggcactctgaagattacacaagacatgaaatactcacctcttgctggaaaggaatccacaatttggtggaagatctatagaccttttaatggcagaagtgcttattaattctagtcataaacaggaattgttgtttttcagagaagggagagagagcagagcggactctgtgtagggatagagttgaaactggaacatgcttcgcacagtgcctcgtgctgtgctccttgttcactcagtgcctcgtgctgtgctccttgttcactcagtgcctcgtgctgtgctctttgcacagtgtgttcactagaatgagggctcaatgaatgttagttgagttgatgtgtttgaataagcagaagtgaagaggggacattctagattgggtaagagagaaaggcattggtaaaaacccagggaaaggaatcaggatggggtactgcagtaactaacttcactacatggtggtgtaggtgattgggaacccaattgtggaggctgttaactaactagcagaccgatagtttggacgtactaggaattgtcacaggtcttcaaataagagaacacattaatatacagaatgcccagaactggaatgttggggggaggggtgtggagacacactgaggccagggaggagaccagtgcagtcactggcatgacgtggccctgtagttggcagagcccttgcaaaaaccgaggagcatgccgaacaggaaactccatgaagtgaagaatgaatctagagggcatggtgactgatggaaggagtgggaatggacagagagcacgccaggcacttcttctagaactctgctgcagctgacagaaatagggccacagggagctaagagagggcaagctggcttggggagagagaagcgggggagatttgaggtgctaggcccatgaggttaattttaaactttataaagtgaaaaaagttacagtaagctaaggttaatttattattgaagaaaggaaacattttaaatgtttaggttaattaagtaaacagtgtttataagactacagtggtatacagcagaggtccccaacctttttggaaccagggaccagctttgtggaagacagcttttccatgggctgaggggaaggatggtttcaggatgattcaagcgcattacatttattgtgcactttatttctattattattacattgtaatatgtaatgaattaattatacaactccctataatgtagaatcagtaggagccctgagcttgttttcctgcaactggacagtcccacctgagggtgatggaaaacagtgacagatcatcagacattagattctcaaaagaagcacgcaacccagatccctcacatgcgcagttcacaataggattcgtggtcctatgaaaatctaatgccgctgctgatgtgacaggaggtagagctcaggcggtaatgcaagccagggggagcatctgtaaatacagatgaagctttgctcacttgcctgccgctcacttcctgctttgtggcccagttcctaacaggctggtagtggtttgtaccctggggactggagacccccgtcttaaggtatatgcaggaagaagttttacttgtgccagtagtaacgtaagggtaataagcctgcacctcagttggtatttggaagacaaaggaatgcctggaggggcctacccagtgtggctctgggtcaccctatggcatctacggactttaatggcatgagttaatacacagaagtacttagcagctcacacgcactctgttaccattggcatggcttttgttgttagaactggacttgaatcctggccctgatgatgattagatgtggatgggccaggagatttaatttacctaacctttagtttatctgtagaatgggcccggttacacttaccttggagagtgtactgtggcaattagcatacttgtgccactaccactaccacttccactctgcacagaagcctgaaggccttggggagctcaagaaacactgaactatttcagtcagttctctgggttcatgagttgctacttgaggaggatgtggcctgtgggctgtcagtgcccaagttgggatggtgatgtcctaaaactatggaggacgttagtctgaatagaaagtgtaggtgcaagtctgagctagggcaaaatgtcagatctggagagagatttgagaaccatcaataaaaatgggatgattattttaaattatcccatttgctgcctttaaactctaactagtttcattaaactattaactggctctcctggaataacactagtaagtgcaaagtgtttttaaagtggaggcagaaattgggagcagcctatactggaaattttggaaatgcccctcatggcttgctggcaggtctcctcccaggcaaattggttctgttgctatttattgacaaagtagtgccttactcaagtcaccctttcattaaaatgttaaatatgtaaaaccaaaaccaaatgatacatctcaaagcagtatcaacagtaaagctccagaaggaaatatgttttagatatggggtgacgggatctgcaaccaacaggatgatatggatgaagtacagttctcatccagtggtttatcagtgagagccagcatcatgtaatacaaatgtttggaaaggcttttatttcttctgcctggcatccatgttcccttttttcaccctacccctccttaccatttaacatttaggacatgtctttttcgtctgctgctctgtgtcttcagtggagccatgggtctgttcctcttacccactgcctgtgtgtctcctcgggggagctgtagtttgcttactagcagatctgcctgcttttctgtcccctgtgaaccaataaattattaacataaaattttgtgcagaaatcagggtaaaacagaaggagccattttcacagtgggaatcattttaatacctacagtgttttccaaacagttatgtaagaggactgagtagatgtcccttttcagaagtcatggtgagtttctgactgtgatacactagttaaaattcaccagagggagttaattttgaaagctctcagccaggggttaatgcagaggtatcttttagccatttttgtagcttagcccctgtcttctgctctcttgctactgcagataggggtcaggtccagcacctgggatgacgccagaatgagatgtgctgggagtttcatgtgtagatgaggggaatttgcacaccttaccctttcagggtttactctcagcccagtattctctatccacacatagaatttttgggaaacaatatcttgggatgcaaacacaggcagcagccacatcatcacatcccttgtctgcaccctcggctccattcctaggcccaccacagctctgaggcttcccaattttttacactggtcccccttgaccctcccagcctgattcaaggatttagtgatacatggttacttttcccacctaaaagatgggaatagcagtagcctctgcctcataaggttgttgtgatgattaaatgagctagtgcattagagcctttaagacagtggctggcacgttatagcgctcagtgttcaccatttttattgttctagggtggtgtttccctgcctttctcataccatgacgcatgtaaaaatcaatgccgtttgtactcatcagtaggttaatggtgatgctacttgcaccaggtccacgtgccatcccaaaggtggagaggtgaggaccagtatctaggcagaccagtgaggctgaggcacaaggcttgggggactatgacagggggtgggctcaagcaatagcatgaggaacttttgaacacattaatttaatgcattttgacgtggttatttttatttttatgttattgttatttttattccaatatagctgtttctaaagtggctaggtctaaacagccatgtcagaatttcctttttggaacataggagcagactagatcacatggcttccaagtctgaaccttgcgttctttccactgtagcgaaaatgcaaaacagagctttccaggttctattaaaacccaaggctagtaatgctgggttcaggtaacttacttttttaaagccagaagttaaattttctctactagggacttgtaggtaggtaacttttgatggtgatacgaaattcagctcaacagtggaaaactatagcagtttatctaaaaattagagcacaaaatcataaacgtaagttgtaacacaaagcaacaatctccttgccataaatatttatttatatttggatctcacctggctatgggggtacacaaacagaaaaggacttgttttatgtttccaaggagcagcacctagttgggttggttgggcatgaacacaccagagaaacaagtgccaacatctcaagacgctcagttcgtgcgtctgagagtgggcaggctatgagctggggagcataaacagcagagctgcccagcgctggcagcagtggccaagtcagtgacttgccttctatatttccttcctcctttacccttggcatcctgctattctaatatctatacactgggagtgatagaaaaactaatggacacagaaataattcatgagaccttgaatttcagcactggaaatgccgaatttcagctcaacaactagaagactcttaagaaacagactgtctccatgaacttgcatttagaggcttatagggcctgttgatttataagtcaatagtgttaattgttaaagtcttaaaaacttcggggtcttcatttgaagagcgatgaatttatagagggaaaggagacagccgcaacagaagtctctttcacgtgtgaccccttccaatcattgactactgtgagtggtcgtctttgtttcgattttcagggctactctacatttctggtaaaccacaagctaaaggctggtctctgagaagcagatgttttgctggttttgaggccttgtggctttccatagagaagtaacagtacaggccacatgaagcttttacttcctttttttttttttttttttttttaaagtggggccaagggtgcttttgctcttgatagcattatattgacatacattgacagctgtggtaggtctgtgttcaccaccagatgtcaaattcctatttctggaagtaattagtttgagatacctgtgaaacgttcaagttgagtgttcccagtggacttggaccatagatttagtcttagaaataccagtgacaatctcgaaagatatttagagccaagggaacagtggagatcatatggggagaggatatatatagcagaaagccctaggacaaagctttggggagactccagcatttagaggttgagtagagaattaggccaagtggtatgagcaaaactaggagagtttggcatcatggagcaagagttcagctctgttaggagagttcaaaatggaccttctggctttcaacagtccatttccactgtgaccaccctagcccaggccctcagcatctcatggttggtttcacttgtccgggtgcggtgactcacacctgtaatctcaacactttgggaggtcaaagcgggaggattgcttgaggccaggagtttgagaccagcctgggcaatatagtgagacctcatcgttaataaataaataatttttaaaggagacaaaaaatgtggtgagcatcaactgcctagtgttatatggaggcactaggtgtaagatgtaattattttaagagtttatggactttttgggtaagcaggccttatacaaataaataaactaatgagagagtaactggacatctggtttcatttgggagtaggagagattttgaggtgaacgtggagatgccttacccagattctggagttgagacagaggtcccccagtgtgggccagttggcattactggacatctggctggaaaggtgggcagggccaggatcctggagggccttgaattcagggctaaggagtgtaaacactgtcctgcagagaccaccatgctgttcttaggtaggggctaagggccagataaagtgggactcaggatgaaatctatagttgggaaaaattccttggcagaggcttttaaatggctggatgggggagatggttaatagcctagttattaggaaagagagataaaggtctggcctgggactgccactagcatgagcaggaaaggagggcgttgaaagacacttttttttttttttttttgagacagagtctctgtcgcccaggctggagtgcagtggcgcaatttcggctcactgcaagctgcgcctcccgggttgacgccattctcctgcctcagcctccccagtagctgggactacaggcgcccaccaccatgcccagctaattttttgtatttttagtagagaccgggtttcactgtgttagccaggatggtctcgatctcctggccttgtggtctgcccgcctcagcctcccaaagtgctaggattacaggcatgagccaccgcgcccggctgaaagacacttcttaggaagaatactgaggactttatgatttgacattggacccgagaagaggaaagtacagactcatagaaaatggtaacagaaaatagtgaccactgtagacgcctgcctgcattttacagagtgtggctctgaggatttgagggggcttaagtttgaattctggctttgtctctgaggagttgatctagttacctatctgtgcctcagcttccttgtctgtaaaatggggataataattgtacttcttcttaggttgtaaagatttcgaattaatatatatgaggctcctggcatatagtaggtacttagtaactattggttgaatggatgatgttcaaaggattgcatcacaataaatggaagaaacaggatctgaatttgtttgtccaactctgccaccttaccctgatgttccagagtcagcctttctcacatgctgcctttattgtgtaggcctcttttactggacctgttagatgtcacttggtatcaagcccacgttccgattgcatggtcctggcgttccacagcctggctcactccagattgcccgccccaagtctgtgtagactgtcccctgtaacccacctcccattctccacctctgaccttcacggagggcccggtcaccaagccacctcccacccctgcaatagttgcccaccccttgtgatctcgctgatgtcactgccttggcgaaggcattctgaactactacagaccactgcagtctagccttcttgggtcccttgctgcactgatgagctgcacctcacttctttatgcttggccagatgacatctcagaatgttctgtaatgacttcacacatacttatcttacgtgcaaaaatgaatcacagttcagtaaaggtccatggcaacctttattatcttcctagacccctctcagctaggtgctcagtaaatacctgaatacttgaagaatggattaagcggcaggaattctgattactgaggtggagtgtgccagtagttgaggtcctcatctcatacctgaactgtgtcagcagcctctttaactggtctgtccctaatctacacttaggccacactgccactggcacagtcctcatccagtcttttcatggaaagctccagcttcagcctttctgccagcctacaattaggaactcttccgtgcggcctgaagggctctctgcaaccggatccttgcctgcctctttcgtcttatctgctggcactccattctgcacaccctgtcctccttgcagttcccagaatgttccctgtgccttttcctggctgacttctgctggaagccctgctggagcccacctggcaggctcacactcttccttgtcacttcctctaagacatcagcaagcagagtaagttgcttcctcttcctagctccacccaccaccctttgttcctctgctgcttttcttgcaggccctaggactggtttgtttacctgtctgccttcctgggcagactgcagctccttgagggcagggccatctttccgtgccgtctctcccggtgatatgctgtgtgcacacagcgtaggatgcctgttgatcatataaacgatacttttgtcaagtaacaaaggtcactcctcacactagaggagagcttgctgctttcttgtgccttgagagattttcccttcgaactgtatgaattatattgaaaattgacaatgatgagtcatatctcagcaagggtgaaattcaaaaacgcaaagcctccactactggagtaggaggttgcagactggtcttaaaaggctaagtctggcccttcactgaatccgcctggcgggtctcaaacacagggagtgggagggaccctctgcccggtgggcaggtgatttattggctgggaagcttccgcggtgatttagttgtgaagcggcggccggggaagtgcaggctaatgcctgggccgccagggagaggccgcccacaatcgcgggccggaagggaccgcggggggcgtcggggccagccccccgtttcgcagctgaggcggggttggggcggagggcgtgcggccggggcgcagccgacttcgtccatccggaacgtgggctggagacccagcagcctgggaagggccccagccctgtgggcgccctctccccacgcttgctgcggtagggaggaagtttctgtgctttaccgccttgatgttctcctgtccggaaggaggacacagattccagcgccgggtgccctggaggctccggcctcggggtgggggtcgggccgggggcggggccggggccggggcgcggggccccggctggcggacaggagggcggcggcaatccaggccgccttttgcagccgcccgcggccgcgccgggctctgcgcgccgcgctcctgcctcctcccccgtcagcggcggccccagccccgcgccccccgggccccgcgccgcgcggccccgccgcggtcacacgccgagccacccgcggccgcctccgccctgcgctttgtggagccggagcccagtgacaggcgacggcctcttgccgccccggaccccgggcgcttacctgtggctgctggggtcggccgcccgggaccaggctgggagccccgaggtgggggctcggagccaggagctgcccccaccggggcggggaggggtgctcgggaggcatgggacaaagtgaaagtctccgggctggggttagggacgagtctgctgcgaaaatggatgggggcggcgagtggcgtcgggagggcggaaggggtgctggttattctctggtgtctcggagtggcttttaatgacggacggtggggcaggcccgctggctttcgtgttcccggtgggcttctgtgatactggtgccttccggtgcctcctggcaaattctttggattaaggaaagcggccttttaaccccctagggttcccttctggagaagagtcaccgggtttggttctgtttcccctttctgctcgacacttctgggaagcttggttctcaggtgggaaagcagttgtgttttattaaaacatggagcatatttataccttcgtgcaccagaatgtgtgcctggtggaagagggggacagattgcttcttagcctcagacgcaggacgtccttctcttaaacgcgctgccctgcgtggtgggtgggattggggttctgatgaaggtagctggggcctgccctggccagtgggtcccagctgagctgctgacatactctccgagcctcggcagtattccctagccgagactttttttgtggttgttattctgctgattgtagatatctttgctttgctgacatcctgttttgtttttggtttttacatcccatttgtttctttttatcacagaaacgcttcgttaagggactcaggcagtacgggaagaacttcttcagaattagaaaggagctgcttcccaataaggaaacagtgagtacaattggactttatgtaacttgattttttcctctttgctcctgctgcctctccacatttgatcttatgaaatggtttcctttaaccctgcgctgtgctcagactcgggctggcctccagaattctctccgttttactcccttgacttttaatttgagttcataatttttagatagtaaagtgacagattatgcttatccgcctggagaacatagacttctgttgtaactctgagaacagaaaggtctttgggaacagagggttagttgtgggggaaggattgttggagagttaacatcaaattttaaacatagtggctggaataggaaatagcattttatcactagtttgaatttggtaattggcagaaatcatcaaccaaaccagaggtttgtggcttattatactttgagttctgggggattttttccatttttcaatgttgctctgttttgaagaggagttttaactctttaatattctatccctgagagtttgcactttccactggacagatgtacaaggggatcttataaattgcttaaatggagctttacaaaaaactacttagtatttcacaaagctgggggtcagagctgacaaatgtgcccgataaacgtgaggtagaaggatttgctgaggaaaatacagagtgaaattatatgaagagaatgcggggaagggattcattctcatttccctatggttgcctccctcctcatctccttccctggtggtgtagaggcagatggggagagagtcttccctctggctaggccacgggatagggcagatgggatggagttggagcagccactccactgtctgaaggcgaagggaggactcattaaccagaaacactcttcaggactttgggaggagtgatccatgtttaatctgcctagacattgagctgcttttttagggagtggaggtgggagatggatgcaagaatatctactataaaagtatgcggataatttgggttttttggcttaattttttaattggatgttgtttactgatttcctcttgtttaattctgtctttttaaaaatgagctgtttttctggacacttactgtatagtacctcaaggacagtgataactcatggggaagaagggttttgtgatttcaagtatagtcttgtatatataaatggatgatttgcatcagtcaatgacaattaaatttaagtattacgcatctcatatgctaggatggatcatattgagaatggtaaaaaacagagagagagaaacctgtttatgaacattaaactaagatgtattatgatgccaatctatataatcaacttatttcttacccttcccagaacagggtagagttatttaatatggaatattgagatacatattttaagttttctggggatttcagtgacttgaagtttgatatgattaaaaattaaaatgcctttgcccgagtgtaggaagtttggtttggctgagtaaaaaagagatcagtgagtagatttctcctgatcgctcagattgtagcctctcaagttctctgtctctgctctgctaaaagttgcaaaccatgaagaatttgatacagaactatcttgacaattattttatctttcagttttaaaaaataaattcataattggaagattaagcattaaatctaaattctaccatctggcatttggaaatgctcggtaattttacttagtgttttatctccgtagtggaagcagatgtgagtaacctttaacctagttaagttcttctactctgtttttctttttgctcttgattttcccttcttattgatgatgtgtgactccgtaaataaatagccttttttctccttcagaggcattctcagtacaccaaccttttgagctagttctctggttgtcttttccactagcctctttgctgagacctttccccatcactcctccgccttcacagtttcccacgctgtagctcttctcccttctctagcacccagcagttttcctatttccaaagtcttcatcagtcaccatcattggaactaatgagagagttgtttgcagcaatggaggatttattatgcctgacatttgctaaatattcatagtgtccttgctgtcttttgcattgcactggaggagtttggtagtagggtaaatctgtaagtattataatgagctgggagaggcactcatcttgtgttttcttattttctctagttatcaacatagccaagctaatcattcacagcccacagggaggggagggcagaggtcattttttactttttgctgcagaagatgagatttgcatgtaccagtgttgttgattcagaacttgctgggtagaattcttatagtcatgccccttttgatagcaaatccctctaatatagatacttttcacattctctctctctttctctctctctcttttttaatgagacaagatctaactctgttgccctggctggtctcaaactcctgggctcaagtgatcctcccctgaatagctgggattacaggtgcacgctaccatgcctggcttacattttcttctgtctaccagaattattaactcatttctttgttattcgcaagtgacttggaacttgagaagggtgtcagcatccaaaagaacatgcctgattgggcattggtgcaagggtcagcagacctgtgttctattcttggccttactggtaactatagtacttgatgatctctttttaattgtgcagtctgccttgagctgttcattggaaagctcaggtcaaatcttgacaacactgggaagttattttctgtaaaatggtgtttctctgcatgagaattgtgtaggtgctgtggtcgttataaaatgcctgtacgtcgttacttgctgcagtgcctgagaacgaagtgatgattcttgccttctctgctacttacttgctctggaaccttaggcagattattcatcccctctgtcctttaatttctgcgtttgtaaaatggggtgataattcctacccttttgattattttgagaatttaaatgagataatgtttgtaaagagtgcatagaaatacttggaaatgattgttcttcctgtctaccttaaatactacataaggtggtagctaaatgctttgaaaagtacagaattcctttctgcttgtaaatatactgagcctgtataaaaataagttacctgtttttcattaatctgtcttgccaaaaacttggagggcagcaactagttaacaacgtccgtcttgaagctttgttgagacctcattcttaccagttcattcatgcggttatagcagagaagggttcctggtgggcatagacgtaaacagctttcctagctcttttggtttctggtgtttattgcacaagagctaaatctggcttttctctgaacactgctgcccactgaagtgggaatagtggctgtgattgcggaaaacccaactgtttatagaggcttagttgaatgggtattacgtgttaacctcagggtacccaagagaataactacaagtcaaatcttttagtgtcatggttgtgcaaatatcctgtagtttattatactttttcccattctctgtttctctataaccatttacctcccctcaatatgcttataaagtatataattagtaggtgaaatgtagtcaggaatacgggtggagcattttagattcaccttggctgtatacctcttctctgtcaagccactgtttgtcataaaccacatcagagtcttaagtgttagtatatttgtataagtcacagagcgcccggtgtctgaacttttgggaggacagtggagaactaggcctcttgattctgctttgagccctgccacttattgttgggtagatggatggtacatgagctttgatgttaaggtaatgcctgaaaaagtaggaggcctaatagagaatcttaattacctaaaggtgaatccatgttaggaataacacaaaatcgtggatgatccaaaaataattttttgtttgatttgtctatacattgcagttttcttcaaaatcatgagataattattcaagcagtggtgacatatctcttctctgaggacatatcagttatttgaaccaaagactttttgtgtctggcacctggatgattgtcccttgaatcctggcctttgtttatagctgtgtctcctattacttagacaaattcagctggcactgggtcgtagtccaggagcgcttcctcagtgacctgccgttgcttgtctctggtgcaactaagattggtgagaagacaatgtgatctaccccagcttggtagccaagaggtgttcccaaagtgttagcccctggagggagatggaaggtgaaaggggacatgctttggctgtctttctcgtctctttctttttatttttgagcacctagcccagtgaagattaagcttgtgtcatttgtaatcccagttggtggtgcattgacacttactacactggaaactcattttcattcacttcccattatcagaactaaattttgtgtatagttcaattttttaaagttctgggtgcccactgagcactgcaatgggtagggtatctataaagagaagcaaggtgccatccctgccctgcagggagccagcacgacatttacatacctgccatacttggtagaatgtgctgagggccctggtgggtggaggttcaggccccacaaagtgagcacagaggctcctggaaagctaattggaggggcggtgtttgaactgggctttgaaggaaggattcatttttgacaggcccaggttgggagggtagaggaaaagcaactttccagccataggaaatactatgaacaaaggcacggagacaggaaattgtaaaacgtgcccagcaagtacatgagcatggttggaaaggaggttgcataagcggatgcagtagaacttgggcccaaattatagctgcagggtagattttgggggaccttgaattccctccaaagaatgtgtatgggtgagtgtggggatgggacccatttaaggcttttaagaagagaagtgagggctgtgctaccgaagtatgtataggatgggaccaaagaggaggctcttcttataatttagtcttgtaggaagacagatagggacttgaaagttcaaagttaatgggaagggaagcctgccttctatcttcattttctctattggaaatgtgtcactgtttggcaccaagggcccagtgaaagggcagccagttttgacgtttttaactttaagtaatgggatgaaaggtattagagatttaaatttttaatttaataaataacatgaaaatcaaccacctttcttagccacatttctgggaatgaattctattaaatacgtacgtaactactggccattaactgtacttttttcttcaggcaaaatgtcatttgcatagaccatattcctgcagcagagaataaatgctattgagaaagggctttaagactgagtaatcaggtttctgttaatattaagaggttaaaaatgattctagtattcaatatgagcttccagcctgaagttttatttaatttcaggttataaccttaaataaacaattttcctagcctcattaatgcttaatctaatgttgcataacaaagtatggacttccttagtcggttgatgctactgagaatgtgcaaatgtgtcacggccacataccagtacattagaagatctctgtttttaaaccttgtccctcttctacaaacgttgtctatcctcactgctcacagtgtgctcctcaggccagcactctcatcactggttaaaatggaagattctcaggccctgtccttgtctcttgagccagaatctgcattttaacggaccccccagaggattccaaagtactgtaaagtttaggaagcaccgctatttacagtaatgcagacttgcagaattctgagcctgcatagtatatcattcttaaaatgatactgtctttattctgttaaaattgtaaagtttcactattagggcttgattttgtttttctaattattgcaaaatatttcaaacagaaaagtatcagggcttatttccattgtcaataataggatttcttttcttttcttttcttttctttttttttttttttttggagatggagtctcgctctgtcgcccaggctggagtgcagttatgcagtctcggctcactgcaagctccgcctcccaggttcacgccattctcctgcctcagcctcccgagtagctgggactacaggcgcccgccaccacgcctggctaattttttgtgtttttagtagagacggggttttcaccatgttaaccaggatggtctcgatctcctgacctcgtgatccgcccgccttggcctcccaaagtgctgggattacaggtgtgagccaccgcgcctgaccgtgagccaggacttctcaatatagttttcttctcaattcccactcccatgtttttctagaaacatgattgtaactcctgtcttacttgatacaaaagctcttgttctctttaccttgtggcatgcagtctagttagaccttgccagattctatttcagtttttaataagcctttttatgtggaaggatggccttctcttgttaactgaagtttacatagtcataaaggtttaataccacagtgttttcgggcattgctttcttttattggcattccttatgtatgaaaaagaaatataagttatttgaggggctggcaagatgggtaagaggaaagacatttatgtgccatactgtttttcttaataatttgtgctcacatagatataaacagttggaattttccatttgaggccaaagtgattgccagtagaaacaggcactgcattttggcagtaagtactgtgatcctatagctattcctgtgctgagagtttgttcccattaaaatggagccgaggctcgaatctattaattgtgatagtctgaactatagggatatttgcctgggcagtggtccagttttcgtgagggtaatctatgagagactggctgatattcccttgtgtaagtgaagtacgtaagagacttttggtgctggtgttggaaagaaaaggaggtattaaaaaattgggtgactttttaaaccaagggccttggacagttgccgttctcagtgtaaacagcctgaccttggcgttatcctacatatgaaaactagtggggatggcatgagaatgctttaattatttgaaatgtattacttatagaaactgcactcaaatgaagtatgcttggggcttttaaagtgttattgaacaaaatgttgcttgcagggatttatttgctgttggtatttgctaacctatatttcttatgatttggctgtgtcttggttacctggatgacttttagatggagacatttatgactttgaagcctaaatagtctgcaccattttattagctagtaaaacaaatggaaggtttgaattggtctttagaaagacttacaagttgtggttgctgtggttaacagtcaatggatttatccacttggagcttatattttatatcatagattcttttttagccttgtaagatctattctgactttgaaaactagtttgctgatattttaaaaatatatctatctagtctgttaggaaaccgacattaaaactaagtttcaaaatgtatctgaaattataatccttgaataactagttcatttttaatcttatttgaaactatacccttgagtaatacttaggaaaatagagtaaaaattaatagtattgttttgaaaagtaaagcaaagcattaacctcagtctcagtcccagctgctcagcatgggaaaggcatccccctactcccagtaagattttttttttcctgtcatgtataatttgaaaaccattaattgtgttaggtaaataggaaaagcaaacaggagcaaccttcctttgggataccagaattccattaagctaagttttccgagatgttgaattttttaattaagtttcagtattaatggcccatgtttcttccccccaccgacccccccactttggaaatataattctttgttctgctcaagtgtcttaaatccttcttctgaatcctctcaattgtggtatcataatccccaggatttgactattgaaatgttatttatttatttagagacggaatctccctctgttgcccaggctggagtgcagtggcgcgatctcagctcaccgcaacctccacctcccgggttcaagtgattctcctgcctcagcctcccaagtagctaggactacaggcatgcgccaccatgcccagctgagttttgtatttttagtagagttttagtagagatggggtttcaccatgttggccagcatgctcttgatctcttgacctcatgattcgcccgcctctgcctcccaaagtgctgggattacaggtgtgagccaccacgcccggccgactattgaaatatctaaactatcccagttgacaaagttgggattttgggggagcttttggtaaccccaggcctgtgctgtctaggatgggatgtctgaggtgaataagggtgcttaccttcatggcccctagtgaaggggccaggtgggccaggggtcttctctgaaaggtatctgagtcccctcatttcttttttttttttttttttgagatggagtttcactcttgttgcccaggctggagtgcaatggcacaatctcagctcaccacagcctccgtctcccgggttcaagcaattctcctccctcttcctcccgaatggctgggattataggcatgcgccaccatgcctggctaattttgtatttttagtagagatgaggtttcactgtgttggccaggctggtcttgaactcccgacctcagatgatacacccaccttggcctcccaaagtgctgggatcacaggcatgagccatggtgccctgctaaagttccctcatttctaacggtcttgctggggctgcctctgctcctccccaggctggttgctgttacacaaagggcccatttcatctcagcagagttgggttttgttccaccctcttcaaattaagattgggcaggtacagtggctcatgtctgtaatcccagcactttgggaggttgaggtgggaggatcacttgagcccaggagttcaagtctagcctaggcaacatggtgaaaccccatctctacaaaaaatacaaaaaattagctgggtatggtgacacgcacctgtagttacagctactcgggaggctgaggtgggaggatcacttgagcccaggaggtcgaggctgcagtgagccaagatcacgctgctatgctccagcctgggcaacagagtagtctcaaaaacaacaacaacaacaaaaaacaaaattaaaatttattttattttattcttggacttgactctgattcctcttttccatgcatttttactctgcacacatgtgtgcatgaatgcatatatgtatttatatagaatataaagccttctgggcagggacctcattttaatacctctttatggcacccttagagtcctgtaacagcccttactttttatttgcttaaaatgaagtatgtgtgtgtgtgttcacgcatgtataaataataggttcgaaatacattgtaatcatgggtagataattaatggtcctaagacgtgaaaactcttcattgtttttaaacgaacattttcctcatcttttgctcttcagtgtgagcaaaatctaacagaccaaaggaaaaaaaaatccatcaacagtcataggaagcttacaaagcttcggagatctggcaccaccaaagcttctccacctgatctgctttgaaatgctctttttaagaccagtttgaaacctggatatcccaggccttagactttgtgtaatagacagaaaacccctgtgaactctactgtcccaggacaatgggactaggacttggggttcactctgccacactggtccttcctgttctgtttattgtgcgcagtaaatcaactctcctgtttgcgcagcggttctgtgttctagattatttataagattgaaatccattgtttatttttctcagcaggtttattgagccagtcaagaataaaatactgtcttaagcagtagagtaagccattagccaattgcaacttggcttcaaattaatccctaaagggtgtgcacatgaacacacacactttgtatgtcccacatacatgtgtgtactggaggtgagagccaggggaggtggaggagctttagtggtgccagatctctgcagctttgtaagcttcctatgactgttgacggatattttttccttttagtctgttagtgagtcatcatcatatgccattttattatcttgaaaacagtctgtggaattttttatcccgtgtctttgctgtatgagtgaaccaccacagagggtgtcgggagcaatattaagctggagactttcttcagtgatgcttcgcttatgtatttgcagctgctgccattgtcgctttgttcccatgtgcaggagttggatttttttgattgttgtttggcaagaaatattaatagtaacttttgtgtgtttgattattttcggggccggagcagcatctatccagcacctttgggatttggtggttattgacttaggcacagggcttctaagatcagaacttggttcttcttcccacaagtgctctgttttggaaatgtgctaatgacacacattgaattatgtcagaggtttgtggccttaagttgtcgagggaggtgttttcatttggcgagaatctgtaatttgtggaacaataggattaagttctaaaggaaataggcccgatgaatctgtatagatggctagtttcgcaaagtaaagcacagagccagtgaactgggggcaaactacacgttttggataatgtgagcctaaaaagaaaaaccctaaaacttttaaataaatttctaaaaaccaaaaccttttagtatatgtaatttactggcttaaaactataaatattatagttttaataattttgtagatcaggaatttaggtgggactcagctggccatttgtttccatgtcatgtatccaaagctcactctgtagtatcacctggtagatgggttgacctgaaaggtccaaggtggcttcccttatgtgtctgccaccttacgggagatgggtgggaagctggctcatctggggctattaaccagaatactggcatttgtcctgtcctctggggtggatttgcccatcaaaacttgaagttctagcagggcagggtagatactcctactatagttccaactacctgggaggctgaggcaggaggatatctttagttcagcccgagcaagctagcaagaccccatctctttaaaaaaaaaaaaaaaaagacttgaagcccttatttcttttgatcttgtaaatctatcaggtgactcaggagaaaagtccatgtgcctctctccattttatggccaccagatgagttgaaggatgtaatgcttctttatgtagtaattttgtatttttattaagatgtccatgtttaccaataggaatacccatttgtccaatatatcttagactcatacaaaagtgtaccattttcttttgtacagtactctgttctagttattatttctccaaatgctacataccttaccaggcatgtctataaatacttacatttgttgcaacatttttctggaaatctgtcatttggaatgtttaactagatagtgtgaatgtaaaatgctcctagtttattcctgatgctagtcaatcatcaagcacttactgaacttattgagcatggggagaaaaatagtgagctgcggttgtgctccctgggggtgtcttactggctgccacggtgcatactggagggaaaccaagtgccgaacaatgtagtgtggatattaaatagtaatgggaggatgaaggcttggggagtcttgtgcatcctggaagatggacacttggggcttcaagctctttgaaggatgggtgttttcaatgttaaaacttgtttgaaaggccttgccgaaggaagtccttgaagtagctttcttgtctgttgaggtatttctcactacctgaatcttctacagcattcctgcagactggggacatcgaacccattaaatgaagccattgtggttttgaacagttccatttttcgggccgccttccttttattaagctgaaatctgtatcacttcaccttccatacattgttctgatctcgtcccttggagacttagaggattcttgccataacgtcttcctcatggaggctcttcatgtgggcctgtgtagttggcacaccccctgcctgggcttctggctataggctgctcaggcctctgcttcctgcaacagccgttctgggtgaggtcttgtggacctttatcattcggccctttgtaaaaattgatgtctacaaagaggagaaagtggcaacaatggccccagccgtgtcccccagccagggcggcccccctcccctgcccagccctccttacccagcaggcaggcaggtatgcatgcatgtgtgttaacttagtgcctcctgggtgtgcatcagtgcacagttcctagactaacataaagtcacatataggttgtgtttgttctgttgagttgagcatgtctttatcccagctctcatttcccacaatgagaaagcattaatgttcggatttagtaaaaaaaaaaaaaaaaaaaaaaaaaattgcctgattgaatagtgcatacccaggctaaccattaattacaccatttcgacacttagaatggacctgagcaaagatttccagtgccagagcccaacatcatcatgcatgaaatagtaggctctttgctcctgggagagggaccattagctttgatcatgtcgccaggccctccccaggaacttgtccatgctgataatcttagcaccagttaatttctcaacccattcctacatgttttgataaactgtggctaaagattaagatagcaaccatttagcagacatacgccttcatgagtgtgctgcttttgtttcaaatcatctgttgaaagaaaagcttgaaagacagagttctccattttgccctctcataaacaaaaattctggaaatgagctgttcacagactggcctaggagccctggattttaaggtaaaatcattgctttgggatttgctgtcagtccaaattggactttctgcttttcattgagccttccccctgcttctattcctctccccaaaacagtgctgctcacaggaactgtgtcccgacagaagtgtggacagttctccttttctctctgctgcctcatgcggttgttagaacaagctaattccatctgagtaggtagtatagcttttctttctgtttactattgctgggtgacaggagagcaagggcagaagttatggtagatagctcagctttacaaccattgtcggggctaaacatgaatcctcagcaatcgggttggccattcctcttctcaaacgttgtactccctctgctggttttgagacaactgatatttccttaagaagtgtgaggctctgccttcaaaacggcacagtctcttttccccagatctgcaactgtgtgtgttgcacacccacaaagaagacagttctttctggctgtggggaaatgatttcagttcttgggcaaggatggcaaggaataaatgtagaagaaattcctttctgataccattctcctacctcacatcctacccccaaatcattgcgggacatttagacttgtttgggggacccccaaacacagcattctcaggcgttgtattcacttctacttgttttctttgaccaccaccacctcctgccccaagcccagcctccacctccccgcagcactcacggcaggagtcattttttatagcacacataacctttacaccaaaaggaaaaagtgcattgcttgtaacaaaatgaatctcttttctgcttttattttgaaaagtcctccctgttgtttaatgtggaggatattcatgctgaaagcctgttccaagtaggcatttgtgcgtcccagaggaacttttgatttatttccttaactctgccctcctttctctgtggttcagaaacctttaatgatctgtgaagctcagagacttcagtgcgaaacagtagtcgttttaagaacccctcccactatataaaaggcctgccagtttccacatgctgggtttttgactccctgaaaggctgacctcttacaaattttggttgtacagcagggcatcctgggttggggccttgataatgcttttgtgaaatctttttccctcctcctcttgctctctttgaaagttgtaatgaaaattccgggctcttggccagcctgtgggatgtgaaacagtagaaatgtttctggtgccctttgttactactcggctttgattaggtttatttcccgtaagcttgattttgctagcccttcccccaccccccctttttttaatggctgaggaggttaacttagccaaggttaagcgttttattatgcaggctgcttcaacctagtagagtcactttggccaggcttttgtggcagagagagacaaggggaagctatgttctccctctgtgtttgcatttcttcctcccaaggctgccttttacttttaatgccagcgttcatagaaggtaacaagctaggtaagctgtattggtttcccatttctttactcagaatgttccaggaaaccattgtacaacttgtcttgagattttgttagtcaaggtaaaaatcatggtagacctctctagggtttctgccaggtggagggcaaggccttgagagccgcagttaacagcagcacgcctttgatcctccctgtggttctctgtttcaaaagaaagaagtggctgcagctttaaaaaggttttaaatgctgctttgaccttgtatttatagctctttcgcccttgccattaagaacattttatagacatcagctcagcagtcatccccataagtctacgggggctgccagtatcattccacatgcacaggtggagaaactgaggcacggtgatactaaaaatggcaccctcacaggtcttgtccaggtcatggggtggggatgagccaagaactagggccttgagaggtaggcttcccccacagagcttctgttgcaagtgcttgcatctgggacaagatttgctttttatagaaaaaaaaagtgggattttattatcttagaaattctttgttcacagtaggattccttggccaccttataaagtataaatgtatgtgcttcctttgtatcctagagctgttgagatgcgaactgtctcataaggtagcagaaagcactgtgatggaagcttctgtttcatcggtgtcctggaatctgctccatccccttctctaggcagcaatatggtcctgcttccttctgggtttaggtcctgggagcctgtcacaattctgtcacacaaaaagagaattccgtaatgaccagcacagctgtatcatttcaaggttctatgctaaaaatgtgcagatcaccaaatagttggccactgagagagcctgtaccacagagggtttcctaatgcgaatgcctgccccaaacactgcagacagcactttctggacttcatcctccatgttcattaactttccactgatttaacagttctaaccagagttattcttgatctttgatgaagtagatttttgaacctcgggtgtcgggtgttttgttgtggagatgatgcgggctctgtagcacatttgtggcagggttcttttcaccctccacaaagttgtatgagctctgactcttgcctgggctgaaaatgcggtctaaaattatatatgtacgtagtacttcttaggtttttttaagatcctcactggactaaatggaagagaattctaaattctcaacgtgttctaattattctgaactattctccctctcccaaaaacacatacagatacacacaaatttattttgtgtgtaacccttgactttcagaaggtttgggttattctatgcataattttttaaaaaaccatttggtttaaaataatttcaaacttaaagaatttgcaagaagagtataaagcattcccatatattctttacccagattctccaaatattaacatcttatcacattatttaaccctccttttgtgtgtgtgcgtgtgtggttttccccccacatgaaccatttgagagtaagttgcggacctgttgcccctttattcctaaaaatgcaccttaaaaagtaaaaaagttgcattactgctttcttctcttgaaaatattaatctgactggggacagcatcatgcctataatcttagcacttctggaggccaaggagggaggatcggttgagcccaggagttcgagaccagtctgggcaacatcgtgagaccctgtctctacaaaaaaataaaaataaaaaaattagccaggtgtagtgccacacacctgtagtcatttgaacccaggaggttgaggccgtagtgatccgggatcacaccactgcgctccagcctgggaaacagagtgagaccctgtctcgatttaaaaaaatattaatctggtggattgactcactcagaatcctactgctgcagttaaaaatcatagtacatttaagtttggctttgtagttgttagggggaaagggaaggggtctgtttttagtaatttttttcccccttgaaaacacagaaaaatttacagtagaaaattaaaatcaggccggctgcggtggctcacacctgtaatcccagcactttgggaggctgaggcgggtagatcatgaggtcaggagatcaagaccatcctggccaacatggtgaaactctctctactaaaaatacaaaaattagctgggcgtggtggcgtgtgcatgtagtcccagctactcaggaaaatgaggcaggagaatcgcttgaaccaggaagttggaggttgcagtgagccgagatcgcaccactgcactccagcctggcaacagagtgagactccgtctcgaaaataaaaagaaaaatcagtaattccatcactaagagatggccactaattaacgttttggcccatattcttccgactgtttctaggcatatatcaataaatattttaaacagaaatggcctcattcagttctataacctaatttttaattttatttttattttatgactatttaaaacttatctgtattgatcttttgcttaacgcatgtatctatggagtcatttttgatggttgcatttttaaaagatatcatgttattaaccaacttctagttttgatcatttattttcagtttctggggtatttttcgggggtggttactgctgcaaaaaaatttcttaatgagtgactttgtcttatctgggggcagttatttccttaagattcattcctagaaatatttatttcaagtagtgtgtgcatttttaaggcctttggtagccagtgccttgcatcctcctgagagattatattggcataccgctaccagcagagccatgctcccttctcactcttgaccatcacttactattctttcagtgttttaacttagcctgcagtctcctttttcttcgaaaactttatgatacttcaaacaacacctctgccactccctcaccctcccccacgccccaaaaagcaaactcagaaaaccgacatatagtcagttggtttatccagagtcagagaagtggcacagggaccaggggcttcatctctccagctttggcaatattttggtgactgtctagggctaattgtcattctcaaggagggtggggtgaggagccaagctttcaggactgtgctctgggtcctccatatcacctcacccagagcagccttccacctcgccctgacacggttggcaccagtctgctgccacctagcccacccttgtaaggagctgtatgggttgtcgaccctgctgtgattttactatggtttttgattgcccaaggactcttcttctctgtctcactgttaatcaggaagtagtttagtcaacaattactgtgggagagtaatctcagattagaatctgtgggacactctgcttttaaaaacgtagggtgatttgaaatttaaaagctaagattttggccaggctcacgaacctgtagtctcagcactttgggaggctgaggcaagaggatcatttgaggccaggagtttgagaccagtctgaacatagtgagactccgtctcttttttttgtttgtttgttttttttttgagacagagtctcactatgtcgccgaggcaggagtgtagtggtgcgatctcggctcactgcaagctccgcctcctgggttcatgccattctcctgcctcagcctctccgagtacctgggactacaggcgcccgccaccacgcctggctaattttttatatttttaatagagacggggtttcaccgtggtctcaatctcctgaccttgtgattcacccacctcagcctctgaaagtgctgggattacaagcgtgagccaccgcacccggcctctattttttttaaaaaaaagctgggtgcagcggctcaggcctataatcccagcacactgggaggccgaggcgggcggatcacgaagtcaagagatggagaccatcctggccaacatggtgaaaccccgtctctactaaaaatacgaaaattagctggacgtggtgacgcgtgcctgtaatcccagctactcaggtggctaaggcaggagaatcacttaaacccgcgagatggaggttgcagtgagccgagatggcaccactgcactccagcctggtgacagagtgagactcccatctcaaaaaaaaaaaaaaaaaaaaaaagctaagattttattaagaaaaatagaaaaagaataaccacaaaagaaagcaatttttaacaaggaaacataaaggtaatagcagatattaatgaaatgggaggaaaaaatgagatgatccacattaaatcaaaagctgattatgtgaaaatagcaatataggctgggggctgtggctcacgctcgtaatcccagcactttgggaggccaaggccagaggatcacttgaggtcaggagtttgagactagcctggccagcatggtgaaaccctgcctctactaaaaatacaaaaattagctgggtgtggtggtgggcgcctataatcccagctattcaggaggctgagacaggagaatcacttgaacccgagaagcaggaaaaaaaaaaaaaaagaaaatatgaatataatacagcaaggctgatcttgtaaaaaagaaggacaagtaaacagtattagaaacaaagagccagtgcaggagagaattttaaatacacaaacccacacatgtaagggctactgtgaaaagttttatgataggaaatttcaaaagagacaacaaaattcttaaaattgactcaagaatagagattccaaatatgctaataattattaaagagactggatcattggccgggcgcggtggctcatgcctgtaatcccagcactttgggaggccgagatgggcagatcacggggtcaggaatttgcaaccagccaggccaacatggtgaaaccccgtctctactaaaaatacaaaaattagctgggtgtggtggtgcgcgcctgtagtcccagctaccagggaggctgaggcagaagaatcacttgaacccgggaggcagaggttgcagtgagctgagatcgcgccactgcactccagcctgggaaacagagcgagactccatctcaaaaaaaagcgaaagaaactggatcattggtttgaatacccctttcccagcaccagcgccccccaggcagttttacaggtgaatatacctgatatttaattaacaaatctttaagctatttctcagaggctaggaaaagaaggcaagcttcacaactttttttaaaaggctaagtttaaccttgatctcaaaaccatataaatacgatctaagaaggaaacattttttgtaggccaatctctcccttcaccaagcaaaacataaacgtcttaagtggaatattaccgaactgaacccagcaatgtataaaaagtactacatggtgagcaagtaggagttatcccgggaatgcaaagatagttaccatgagagactctagtcttgtgttccagctgtccaccgttgcatgacataccatatcaacccatccaacctttttgttctgtttatggattccatggttcaggaattttgaatggggcagtaagggtgtcttatctttgtgccgtgatttctggggcctcagctgggaagacacaaatggctgtgtgtgacataaacagctgtgatcttctttactcacatttctgccacctggctgtgatggtgactctgaggctgagctcgactgggatggaaacctggcgtacctatacttggccactgcatttggcttgggcttcccacagcatgatggttggctgcgttctgtggccatttctgacctagccttagaagttacacagcgttggccgggcgcagcggctcactcctgtaatcccagcactttgggaggtcgaggcaggtggatcacgaggtcaagagattgagaccatcctggccaacatggtgaaacctcgtctctactaaaagtacaaaaatttgctgtgtggtggcgcacgcctgtagccccagctactcgggaggctgaggcagaagaatcacttgaacctgaaggttgaggtggaggttgcagtgagccgagatcatgccactgcactccagcctggcgacagagcaagactctgtctcaaaaaaataaaataaaataaaataaatttacacagcatcacttacactgtgttgtattgtttacaaagcagtcactaagtccaattcacattcaagggaagggaaagtaggctttttttttttctttttggatagggtttagatgtcgtttaggctggagtgcagtggtacatcacggctcactgcagcctcgacctcccaggcttaagcagtcctcccacctcagcctcccgagtagctgggactgcaggtgcatgatgccatgcctggctaatatttttattttttgtagaaatgagggctctctctgttgcccaggctggcctcgaatttctgggttcaagtgatcctcttgtctcaacctcccaaagtgctgggattataggcatgagccactgcacccagttatagacccgatatttatttgtttatttatttatttagtgacaggttctcactctgttgcgcaggctggcgtgcagtggcaggatctcggctcactgcaaactccacctcccgggttcaagcgattctcccaccttgggctctggaagaccccatcttttgatggggagttacaaggtcacattaaagattatgtgaggtgggagatactgtcttggccgtctttgaaaatgcagtttgctacgtaatataactcactgagaaacaagtgcatttgttttcatagttgcataaaattcagtgggtgaaatgcagtgttctttgtaacgatgacttatagaagactaggaatgacaggacatgtgcttaatgcaaaaaagaataactcccaaaaactattaagtgacatacatatatatatatatatatatatatatagggtttttttttttttttttgagacagagtctcactctgtcacccaggctggagtgcagtggtgcagtcatggctcactgcagcctcaacctcctgggctccagtgatgctcccgcttcagtcttctgagtagttgggactacaggtgcacgccatcacgcctggataatttttgggtttttttttttttttttttttgagatggtgtttcaccatgttacccagggtggtctttaactcctggactcaagtgatcctcttgcctcagcctcccaaagttctgggactttaggcgtgagctactcatgtagcccctatgcatcatatttaatggtgaaactgtcagtccttcactgaaaataaagagcaaaataaggttgcctactgtcatcactaatattagactcttcactcagatttctatatgacacaattggacaaagaccctatatatgtgtgtttatagaaaagtatataaatatatggccaggtgaggtgactcactcctataatctcagtgctttgggaggccaaagagggaggatcacttgaggccaaaatttcaagaccaacctgggtaacatagaaagacttcatttctacaaaaaataaaaatattagccggccatggtggcatgcgcctgtagtcccactacttgggaggctgaggtgggaggattgcttgagcccaggggttcaagttatagtgagctatgatcatacctctgcactccagtctgggtaacagagcatgactttgtcaaactataatatatatgtacacacacacacacacacacacacacacacacacacacacacacatatatgacacaggaatggaaaggaagagacaaaactgatttgtaggtgatatatttatattaaaaatgtagacacttaattagtggagcaaatgaaaatatagaaaaattttacagtttaaagatttttaaaaaattggtagtattcctatggaccaccaccaacaaagtagaaaatgtaatatattaaaaatactgagccgggtgcagtgggatgaccttgtagttgcagctactcaggagactgaggcaggaagatcacttaggcccaggagttggagtcccacctgaatgacatagtgagactctgtctcttaaaaaaaaaaatgctgttcacagtggctacagaaacttatagtttataagattcctagcagtaagtacaacaaatgatatgcaaattctttatttttttttttaaaaaaagacataataaaatattaaaagacctaaaaaaaagacgtagataaatggagagatgatgcgccgatgttaatggaaaaagtactctgcattataaagatccccttactctctcattgctatatcatttcaatcaaaactttaacaggatttttttgtggaaccagcagactgatttgtgtggtagaataaaggtccaagaatagcaagaaaattgagtaagaaacaaggaagataggctttatacaaatgagataagacttgtaaagttagagtaattaagacctggtggtattgatgcaaaatagagacgtcagtgtaatgggggcagaactatgtgatatccgtggggaactaaccaattattcagtaaatggtttgggaccaatgggcttagctggcatatgggaacaaaataaaataagattgtaactttcagataagttaaagccaggaaaaacaagactttaaaactgtaagaaaatagaacattttaatgttccctgagtagggaagggtttataagaaatagtacaaaaagtacaactcaaaaagtaaatgataatatatttatctatattaagacttaaaaagtctgtgttttataggaaaccataaagtgagaaaaaagtgacagactgagagaagatatttataacataactggattagtatctagaatgcatgaagaacttgtagaaatctataatagacacaagcagttcaatagaaaaatgggtgaaagatgagaacaggtagttttagctgagaaaatctgaaaagtctgcaaagttttgcagcctcactaacagggaaatgcaaattaaaatacacatattacttcacacccgttatatttacaaaaaagtttatcagttctaagtagaagtgaggttgttgaaaagcaggtactctcatgtactcctagtggccgcgcacattgatgcacctgtttgttgttgagatatgaagtgaaaatcacagatacctgtaaaaatagcaaatttttcgatgtatagcaaggccctgtgccagattccatgggtgtagtggattgcatacccaactggtcatcagagtcacctgacaaaatctgtttttaggctgcgtattttctggtgatcttccagagttggggaagactcctcccccacactagagttcagtgaatacttcactggggagtcaaaacataaatacgcatgataaataataagaaaaaggaaaaatcatttaagactgataacagatgttagaagcactacgtgattaattgccaaataaattgtagagatggtcgttgttaatagaagaggatcttattttacactggggcggtcaagacacacgtcaggaagaagctgagacttgaactaggccttgagtgatggggagatggtgagaaccaaccctgagcaaagcacacaggagagcaaagctatggagatttcatcagccacactcagtactaacccccttgcctgagagtcaagaccttttatactgtggtccaaatcagcttctccaagccccttccctactgcttttctttctgcacctctggcccttgccaaacactcaggcttcctgtctgccatttcttcctgcagtgttctgcccagaatgcctgcccttctgttactccatgtggaaatgctctacatttttaaacttaatttccttcattaatctttctctaatctgaggaggatataactctgtcctttgaatacccctgtagaacatcatgcctctcttagggcctttctctggctctgcattgtcttatgaaattctatcttacacctccctttttggattgagctcctgaaggcaaggactgtcttactcacattatcttcatcatggtgccttgcacctagatgctcaagaaatatttgtatgattgaattaaagttgaaagttgcagtcaatctttttgaagattattctggcaacagtgtgtatcagagaataaagagcctgaaatcagaaagtacaaatagcagaaggtcttgggggatggtgcccagtaagaacaggaaagatcagaagagtcaggaacttactgcatatgggggaggaggtaataatggtctaaggcgcgtggatcctcaaggcttagagaactgagaagccagcaggaaataaaactgtagcacagttgggttattgccattttggtgacagtttcatgtgtttttttttttttttcctgtgtgagtgtgattttgctcaacatgagtttggtaactgggatcagaaaggttttgttccttggtacattttacagaatggttgctaagccaacagaactcagaattgagttcaaatcccagctatcccacttattctctgggggtttggggtaagtctcttagatgctgtaaaatttaagttcctcagtaatgaaatgggggcacaaatagaacctccctcagagtcgtagtgaaagtcgaataaggcagcagtgattgagctcttattatgcactaggcactgttctaagcacttgaacttacttaaccttcatagcatctccatgaggcaagtggtggtgttgccatcacaatacgtgtgaagagaaaggaggcagagagattatgatgacttgcccaaagaacacagagttcacactgaattggaactggaacttgggcagtgtggttgcagagcacccagtcttagctgctgtgctgtttctgactcagtatctgtcacatagtaaacattccattagaatcagctcctgtttctcctcccagggaagacacacagtacattttgcctgagataactgtctcaccagatgtgtatacagtcacgtggtagactggaaagcacatttgtgagtgttagttctcatggtcctttgagttttcccttacctttaaaatgcaaagatgctgttgaaagtgaataaactgatactgtggagaaagcatgatatatcacaaagaatgccattgtggaaaaagttcactttgactgcttaatgagggggaggggtctcctttgggggatgatgaaagcgttttggaattagatctgagggctgcacgcattgtagatgtattaactgcctctgaattgtaaactttaaaatgattaattttatgttatgtgaattttacctcaataacaatttttttaagttaattcgagttgggttttacctttggaagtataattacaaagcgggcaatacttcatgctgttaaaattaaacttgatttattagacggctgactgcttccgttgttatccacagctgaaaaggagatgaagatcctgcttgtagctgagcagtctttagaagtctgctgcattcttcccaaattccatcactctagtcaagagtaagaggatttgataataggggactggtttcctctcggctctgtgataactggggactggttccaggagggcaggtactttgtatgtgagttttcatgtacttcacattatgtccatgtcacgttcttcaacttgatcagcctttgaattttggcatggacaacaaactccacattgaattcagctctagaagctgggattcaaatttgaccccagaatggaccccaagtgatagcacagcagcccttcccccctcccactttcctgatggtagaaacaggataattagcataggttttcaagagatgatctctgctcagttgttctgtgccttctcacttgtcactaaggctcttagccctggcttgaaggcttttgctaatatttcttggggaacaaagtctttctctggaatccattcaaggtgggtagttaatggaatggctgtcctttaagcacagagagaggggtggtgtcacctatgccttacagagcagaataataataatagaattggtcctcgttcgagtgttccttctcagatttgtgctcccgtgttccttgggcactctcactggctaattctctgcaaacatcacaactcaggcatggaacctctcatacttcctcctgtgcccccactgcaggccttcagtgcatggtggtggttttggttttggtttttgtttcctctcctctcccgttttagaaacacggatgtcttatattcccacaaaagaatttaggaaattaacctgtttacaaaaaggtccacacaggtttgacattgcttcctcaaagcaccttgttcacagttgcccttctaggtcaagctcaccttcaccttttttttttcctacctccagcttcaaatgtctccaggtgcctgcatagctgagcaggagaggttccttttttatgcagacaagaccaaagaggaaattgttcattcttttttttttttttttgagacagagcctcactctgttgctcaggctggagtgtagtggcgtgatctcagctcactgcaacctctgcctcccgggttcaagctattctcctgcctcagcctcccgagtagctgggactacaggcgtgtgccaccacgcccggctaattttttatatttttagtagagatggggtttcaccatattggcgaggccggtcttgaactcctgaccttgtgatccacccgcctcggcttcccaaagtgctcagattacaagcatgagccactgcacccgacccggaaattgctcattctttggtattattatttttagtttctttgtacttgatttattctgtgggcaggagaaggggaatatacaatatcttattacaggaaatactagacaccttatctgaaagtttagtaacaaacttccctcatggaatgcctttgggctgtttggcccttaaaatatgttttcttttttattttatttacatttatttactcactcaaccactcaacagacgtttgagtttctatgggaaagacattttagatagatgctgaggatataaaaatgagtaatacagtttctctccccttaaagtattaatcacctgctaagaaatgcaaacaaaaaccaagtgtaactgtggtaagtgcttcatggagatataatatatatatatactagtagtggattttatggtttacagagcaagttaacgtatttttttcttatttccttggggtaacagtcttctgaagcaattgggtgactctggctgagagttgggactcagaccttatgatttgtcacttttttgttgctcattccccctctccagcactgagtgatgtgggattccatgactgataagtttgttctctgcagtagctcctttcttaagttaaattactggaaaacggaaatgtgtgtgaattccttttccactcccgctgtccttggacaaattatttcatctctctgtgctttagttttctcatctataaaatggtgataatattatctgcttcccaggacagtagtgagaattaattgagtagttgatggtcagaatgatcttgcctgtatgtagttgtcgaacttcaaatattttgagaatctgaaaagcaagaaatatttctcaaaattgtttaatttggaattgtgggcagtatgtttagcatacttccaatcaagattttggtgaagctttttaataatggggaaagctctgtatagtgttgtgtgcaagatgaattgtgtctgtttacattggatttcagctctgtcctacctgtgcagttagagccacctgcattagaaattgaaagttgggattatagaatgtcaagaaatggcagctaatttggttttcccaaagtataggtcaccatccttcatcttgtctttctggtctcaggagcccttagtggagaaatcagggatttttcttgggttatggtgtataggattttgcagtgttttaagtccccaggtggagattggaggtggccagccttcatggcaaaatcgtgggccttgagctcctatcatctgaagcttctaattgcccttcaaattataaacaaaaaatgaaggaagttttaaaaggtatttttatatgttaatatattttcttagcaacattttcaactctatatagtttttacttttacctggatactagtaatccatagttgatttgatgccattaaactttcattcatgtaaattgtctctgtattatgtagttgcccagttctggatgcatcagagttgagggttgctattttatcttacctatgcttttcaaataatattgataacagaaataaccagaaatggaccttgcctgcgcttgggtccatttgttgggagatgcccattatgctttatgaacactgtgtattattcttaaaacaccttgagctgttagaaaaccaaccccattttatgagtagaattaaacaggacttggaaagggggagtgctcacccagagcagtttagattgagtcagcaagagaaaggagggtcccctaagccactgctctttgtcatgctacggtccaatcagaaaggcccagatgatgtggatgctatggttcctggctttgggcccccagtcacacaggccacgctaaataggatactgcatcttacttggcatttattacccttgatggaggcggaaataagaactgttgtatttggatcttcctagagcagttggtgaactgatggtgcactagactaaaaaattcacagaaacatctggaaaggtaagatcaagtactataaagtgtaggacagtttctggcaaagtagcctccttcttggtaggttgagtctttgggaacttggggacgaatccctgcagaagtccaatctgagcaccttgctattccttctcatgagtaagcccaccacattctccttctcctactttcaggataaacttcatcatggtattttggtgcacatcttcattgggtagtatccaactatattttccaccgtctctacatggtttagaatcctttcattttctatgaaatggaaacccttgaaaatgcccccagagaatgcacatcgtgttctctgcagcactctgtatcgcttgctttggtcagagggctgcttcacgaagagctgaaactttgctcgcaaacatccctccagggctggtaatcttccagacaggatggcccacttgatagaaatgttttcagcacaaccttgcagcagatgtttgctctggtgtgctggcgtaacagatgctgaccatatctcttgagggcctccacgtccctcgtagatggactctactgctagtgtgagttatgcgtacttcagggccataattaaagctcctagatggaggggtgggggtagatactggctgtgttcaaagtgggtgtttatggttgataggaaaaggcaaatgttttgtctttgctgaatttttagaaagctaggaatgaagaatgagacccaggggagaggaaaaagttttggctaagtttgtttttatctagatagatagatggatagacagagagatatatagatagagatattcattttccaggttaggtaaaaatataagcataaaaggatttttttaaaaaaggattttgttagattcacctttttttattttttcaattgtgtattttgtttatttctatttcttacaaatgccctctgtgacattttttggtctcaagaatgagtcattaacctgaaacctcttgagcatgtacatggctttttaggttatttctttacaaggtaagtcaagttgttattagatttctttatactcattcatcttacagatatttactgaagatctgtagaatgctgaacattgtgtgagttgtgagaaatgcagcaataaacaaaagacatgttccctggtttctagaattttatttatttattttttctgaggcagagtctcactctgctgtccaggctggagtgcaatagcgcgatcttggctcactgcagcctctgcctcccaagttcaaacgattctcatgcctcatcctcccgagtagctggtatcacaggcacctgctaccatgcccagccaatttttatattatttagtagagacagggttggccaggctggtgtaggactcctgacctcaggcgatccacctgtctcggccttccaaagtgctggaattacaggcgtgagccaccatgcccggcctctagaattttaattctatgaagaagacagattaggtgaataattagatatataattataaattctcataagtgcaataatggaaatctgctgagtattatgagaaatcataacagggggacctaacttaagaaaggaatatctgaagatatttcagttatgaccccagagatgaggagggaaggatagaatcagaagagccccccaggccaagggatcagcctgtacagaggccctggagaaggataggcttggaactcaggggaagctgaaaaagtaagtgtagctggagtgtgtggagcaaaaaggagaatggagaggggtgaagtaacagtgatggggagaggtcaggtcatggggaccttgtgtgctccatggcagtaataggatgtcctgagggcctctcaggtgccaggcactgttctcagtgctttacatacatcggttcattgaccacatagataggaggctgtgtaacttacccaagtatgtacaacttggaaataccatagctgggatttactctcaggcagtctggctttaaagtccatgctgttgaacaccttgctagagttttgtgctgagaatgtgacaagttgataaggaatctcaaacagggaagtaacatcagttttcctgtttattttgttatttttaagacacagtgtggaatttgggttgtagtaggtcaaggggagtggaaactgagcgccaggtaggagtcagtgtgatcatggaaggtgaccccgagattggatgagggtggtggcagttgaggcagagagaagtaaagttttttttgttttgttttgtttttttgagataatattttggaaggcaggattggtgagatttggtgttgaatcagaagtggcaaatcagagaggacagcgtcagggaggaccccccgctggcacagagccactgggtaggggaagtgctgcttgttaagatggggaggtaagtttaggagggagaagtgaagatcaggagttccctcttgtatagctggttttgagatgtatgtttgttttatggaagaatggattcaaaatgtacatagtttttaactggataaatatgattttttaaaaatagttttaaaaatatttactagatagaaaggaattagttgggagaattttggacttaggtttctggggctctgtcttcactatttgtttgggtctctgaatgaggctgataaattagtgccccttcttccttccccaagttctgaagaaagagagatgggttcaaaatattacctatagttattgatacagttcggactatgggacatagattagtgggcaggggaagagcctaccctggagaagaggatcaaaaagagcagctagctcccaaaactaccagggcgctgaaccatgcatgccaggtttgttttttccactctccaaataagcagcttccctacctggggtggggtgacgactggccagaagatgtgccaaaggcctctctgtacatgagtgtagctgtctggagtggggtctctgctcttctgtatgccgtcgttcttgtcagatgtgtcacaggatgcctctgggttcagatgtggcgtggttggttgtggcacatggctctgcttcaggtcacaggatgactgtttctaggtcttggattttaggtgtctggtattggttttcctttttctggtacatgcccacctccttatgttaacatcctcactgtctaactactcttgttcttaacccgtgatgtattttcactcctgccagagaaattcagtctagtttggctttgtgtcttgacaggtccacagagagattgaacaggatcctaggggagatactctttggccattggtggttggaggtgatgaactgtttgcagaagtggatgcgtttaagagacagggtcgtcattgctgccctgatttctcctcacaaatggaaaactattaatgtatacaaaacaacgtgcacttagctgacggattgttttattcgcatactacagttggggcttcatttatagagggaagtggtgaggttccctccatgcgaccttccgtggtggctccccgacttctcctcccaacatgaacctcaaattgactgcaaagcatgggttaccaaagagaattccaccccttcctcatggttttttgttagcatgtgtggcggtaggggggtcttgcctaagaccttttttgtgttgttgtaaacaagaggcacagtgaccttggcttttcgtgctagggtgcgcctgctgggattccctaaagtaggggcatccactgagccgcacagcagcagaaatctagaagtaaatggacggggtggcacagaggtttctgaaatggccgtgaataaagaacaaggcgttgacgtcacacgccagtggatgctggggatgaaggttttagtacctcccgtgtatgtatttagtttttcaggttttacacagacatgagagtgggttgacatgagttcacagacatattcttcatacccctgaggctacttgtgctgtagattatatttggagactgttgacacctatggagtagtcattttcggccttatctagaagcacagctctgcttattttagactgattttgataattttgaagatttcatgtcacccttcccagctgacacatgtctttctaagaagtgtcatttcataagcactgtactttcctaaagataatacaatactcaggaaaacagtgatcctaagaaagagaagggaggtcatttgggtttgaagagcagggacacagaagtgtgctcccaagtgggagtatccctgcagtgggtgtgctgtggagctcggacagcacctttagagtgggcgggcaggtggcagtgggaaaagtgaggtcaggtggaagagaagtcattaaaccccttacctagctgtctaatgagcaaggaagcacttgcatatcatttccaaattatctgtagagaagagaaacctttctttaaatgcagaattggaatatatttgacaatcttctggtttaaattttttttagttaaatattgaagagttacaaaagaatatagcatttgtgtatggtataaaaacagccacacggtgaactgtcgccaccacgcagcttaagattgcacagactgggccgggcgcggtggctcacgcctgtaatcccagcactttgggaggccaaggcgggcggatcatgaggtcaggagatcgagaccatcctggctaacaaggtgaaaccccgtctctactaaaaatacaaaaaattagccgggcgcggtggcgggcgcctgtagtcccagctactcaggaggctgaggcaggagaatggcgtgaacccgggaagcggagcttgcagtgagccgagattgcgccactgcagtccgcagtccagcctgggcgacagagtgagactccgtctcaaaaaaaaaaaaagattgcacagactgtttcctctccggtgcaatcccctgtcctttccacgcaaagataaccactagactgggtattctgctataacccccctccttttccttatggcttgcctcatatatgtgtattgctacacagtatattagttttgcatgtctttgaacttcctatgaatggagtcatggaggaaaaatgtcctgcaccttgctgttttcattcccctttatcccgagaggcagctctgcatcctgtggtacttcacagccttgtatgaatagagcgtcttttccttctcttttctgctgttgatggacatttcagttggttccagtgttttgctgttgcatacagttctgctgtaaactttcttgcacacatcaactggcacacatgcacacgaattctttagggtatagttaagacaatttttgagttacaggtatgcgtatctgctattttaccaagaaaagcagattgttgtttttccagctgtatgtaagaattccagtaacttcacatcctagccaacacttgatagaatcagaccttaaaatgcttaccaacattataaacttgaaatgtctgagtgattttaatttgtatttccctggtttccagtcatattgagcatcctttaatgagtttattggctatttgtatttcctctttatgaagggcctatataaatcttttgcttacttttcaatttgattgtctttttctagatttgtaagagttctagatactcatcttaaataatgtgtgttgcaaataccttctggcttgtggcttatcttttcacactttttatgattggttaaagattaatatgttgttaattttaacgattttatcctctctccttaaatgtatcagcctttatactttgagcttttatttgttagaaatctctcttggtcatttaggcagtctcctatacttactgttttctaaaagttttataattttgcttttcgtatttaagttcttagtccgtgggtttggtgattgtgtagcataaagaaagagaccagatttacttgtttctgtaatacatcaccaggtgtcccagtgtcatctctggagaagtccagccttttctccactgatttgtgttgccagctatgtcaaagtgaaatttccataagagtgtgaatctgtttctaagctgttttgttctgttggtctctctgtctattccagtgcttcactgtctagctttaggataattgttgatagttgacttagcaggtcccctacctttttcttgtttttcaagagtgtcttgattagtggcactttattcttctttaaaatttttaaaatcagcttgtcttgttccacaaactaaccagctgggattttgaatgagatagtgttgaatccatttgagtacgttccctttatccgtcttttttctatttgtgaagtcctttcaagtcatatttttatcctctttcctttcctcacactacttctgcacccaaagttgcagcttttcccctgagagaatatatagtagatttcaaaacctttgtcttctgtgttaactctttgaggtaaactttacttgaaaatccaacacaaagaatttgggcatttgaggagtttgtatttccctggttactaatcatattgggcatcctataatgagtttattggctgtttgtgtttctttttcatgaagggcctgtgtaagtcttttgcttatttttcaatggattgtccttttctttttcatttgtaagagttctagatattcatcttaaataatgtatgttcagttcactgccttcagaaaggaagctctctggctgtttgggattctgtcttggctgggtttcagagctcaggcccagggagtggaaacccttatttgtgtggctttactgtctttatgagacagggccacacaagctcataggatctcaggaatgttctcattattgataatgcccaatgtgggaagaatctcttggcttgggatgagaggggttcctaagaagttctcttggctctattttattcttatgatttatataggagcaatggtaattttttaatttttttatttttggtctctctgattctaaagaaaaatttggaggagagaatagttaactgtagtcctacaagttttcttaaatatcttgatattttgaacagttgggatataagtattcatgaaatttataaaaatttttgtcttcacctacatggaagcttagaaactactgctcctttgtggttcttttgactgctgtgaaccaagaaaaaaaaaaaaaaaaaaaaaaaaaataatatatatatatatatatatatatattttttttttttttttttttttttttaagacggagtcttgctgtgtcacccagggtggagtgcagtggtgcgatctccactcactgcaagctccacctcccgggttcacgccattctcctgcctcagtctcccgagtggctgggactacaggcgcccgccaccacgtccagctaatttttttttttttgtatttttagtagagatggggtttcaccatgttagccaggatagtctcgatctcctgacctagtgatccatccgccaaagtggtgttttcttgtttgtttgtttgtttgtttggtagaaggcttcccttcaagaaataaaagctctccgggtagctggtcaggcgttctgaggccacagttggttgtgttttgttacattgttttgtttggtcaccaggagctggaagtacatcattatctgatactcttcagggtccttttggcatctgggtaattcctgtatttcctttgtgttaatgtaaggcaggatttaaaactccgtggtagcctgcccctgctaccattcagttttttgcagttgcatccagggtctcccttggatcagttgtgatttctgcttaaggcacagagtcaactttccctgaggcctcttgagagttcggaaccctctagctgcacaaagcacaaacgggcagtctgaaactcttgaggaaggaagcatggggctgtcagtagaagttaataatcaagttatttgttacactgtgatgggtgttgatattattaattcaattgcccatttatatgtgaaactcattttgattttagacagtgaacatgttaaattctaagatacaattagaataattcaagagatgtattttcctcggtgcttcccataaagaacagcatagacccaaggccatgcttgactcagtcttgctaggaattccaaggaaggaagatggaggacacaggacctgtggctggcagaaatcgccctgcagagctgcttttagatgggcccagaaggaaggtgcaagcacgagagacttgttaggtgctgccttgagttcaattttagattgtccttgaagtcaatgtggttgttgcatcggctgagagctgtgcccatgactggcatgttgatggccagctgttgccctctgccactcaggaacgctggtcacatgccactgccattcctgcccacagcaggagacagaaagtttagctgggagtgaaaaacaagtagcccaacctctttattagtagccttctggaacagatgagtaagagtgtacagaactgttaattgtctgtaactagagggagcagagaaaatgccttcaaagcatctggttgtgatgtcacagccttctgatccagatcatatgtgacaagactttttaagtgatattcatcagttcagatattcatcactcctatctggagttagcatacaaccgctcacctttgctgttaccttaagcagatctcatttacctctttatttgctgctgtatgagagcactgtttaaatgattgcttgagttcccaggagaggatccctgctcttcttattaatgcccctttaagatacaggtgttttagtacctcatggcatccagagaagcatgttccttttctgagcacgtcagcacatctctttacccctacagaggggacagattacagaactgacattgtatcccacaagaaaaaactagggcagcaggaacaggatgcgcatgactcagggagagactggacctccgtgcatcccagcttacatgttcccagtcacacagcctagaggggtagagggacagccacgatgtggaataaacagtaagaccccgacctgaggaagcagtggacccaaggaggctttggggtgaggcggttgattgtacaacctgttccctatgctcttctcagcatcagaaacacagattctttcaagcttaattctaaagagtctttagacctttctactacgagagtttgtaatctaagccactaattttcattctggagtttgtgacactctagtgagccccacattatcataagtgaatatttttaaaattcggcaatagaattcattgtagtttggcatacatttttattttattttattttattttattttatttattttttgagacagagtctcactttgtcacccaggctggagtgcagtggcgcaatctcagctcactgcaaccttcacctcccgggctcaagcgattctcctgcctcagcctcctaagtagctgggagtacaggtgcgtgccaccacacccggctaatttttgtatttttagtagagataaagtttcaccgtgttggtcaggctggtctcaaactcctgacctcgtgatccacccacctcagcctcccaaagtgctgggattacaggtatgagccaccgcacctggcccttgggcataaattgtaacataagtgtatgttcttcgacacatttaagagtggagtgatggtgtcataaaattaaataatgggatgttctaagtcccttaagctggacctttccaatctgtgcatcaaagctaattctgcattaaagtgcaaggacggctcacaaaccccatagttgcctgatatagattggcaggtgcattctcttggtttcgtttttattcctgctgaaatgtttaatgatcttgtgtggcgtcattctgttgccgattgtgtaagagagaagctggacctgggtggagacaggcttcttaggtggcctcagtgggctgttgggcatttatggttctgctggttgcagctgagatcttcagacagaatactcttctccttgaccagcgcttatctttcagattgtgaactaggcccagacaccattaccattcaccatctctaacattctcttattctttgactacataaggcactgtcgttctaggggaaacatgatagaggaaggaagttggttgcagaaaccattctttgaaagacttttttttttttttaacttagtcaattaaaatagtcctttaaggtgaacttagttctgagtttctggtccttttcccagatggaaaaggattttcaagaaaaaatcctgtcacttactgagcatgtgtgccggctcctttttggcacttccatcctcaccacaaccctataaaggagggagctcgtggcgaggcagcccaggtttctagataaggagagtctcgaggaggttccttaaccttcctgtggtggtttttctccatttttaaaatgaagaaacagaggccaagagaggttagggaatttgctcaaggtcgtgcagccagtggcagctgttctcactcggagttctgagagaggtaagcctcagaagccgggcatccattgtgtgtaacgtagtaacgtcttgcctgtgcatctagaaaggtacctgttatgttccgttcataggagaattgagaaaatattaatagtcacttcattttaagaactccagttgaaaaaggctagacagtcaatgtttgttcattgtttttctccattcttccccagcatgcgcgctctctcatgcacacgcacgcatgcgcacgtggctgagccaaagcctaagctgcgaattgagtttcgttaattcatgtggaggcagctgagagtgccacctggtcctgaagaaattgggatacttgtgggcacaaaggtggacctgagatcactggagccaagctggtggaagtgttgaccactgccgttggcagagagctgtcattactggtgcttcaggccacagctcagcaggctgtccttgttctgttttgttaagagcctagcagcatggctagcttgcaggcataatcccagagcctcttgctatctgcctgcaggaagtctctatgtgctccagcacactgaaggaatttggtgctcactttctcctgcttttgagctttggtcctgtgttattactaatccttagaggaagattttgactgtaaccactttcctgagtgctcttaaggcaggtccagaggattctcacagcgtgaaatgagaaaacgctcagcctcagaaaaatggaagttattcttttagtgccaaagtgtcattggaccacagtgcagcttggttaattcaggttaagacttagcccctggaacagtgtcaagccaaggcctgtgtggtttcatcatagatttgtaaaacaaaaaacacgtgtgttctggtaaattccaagcgcacattagtgcatacgtgtatgtgcaggaacactccctgtaagactcttgttctcatttcacactggcgcgtccccggggctggggaaatcattttcatttttgagagtaaccttaactaattaaatggatcaagggactctttgtgttttgttttcattttgttttgttttttactttaatgtacagataaattaagggaaataataattaccttgaataattttgattctcgtaactaattttccacctatgtgtgtttagctcaattttgaaatggttcactgaaagatttccaaatttcttatcactgaaactgagttatttcacttttatgactgttagtgactcctctgttttatgtatttctggtgcagtataattcttctatgtctgtgtgtctgtgatagatctcagttcaagttagcgtttcccgagcacccatcttgtgtcaggcactctgctaatgattgcgcaggttacaaggtttagagtggccacatcccctgttcacttgcagtttagagtccagtcggaggaaagggaggaggggaatcatgttatagacataacttgatatcctgcaggactcagtgatgtatgagccacaaaaaggtcacagctgagtgagagagttggtaatcatggaaacaggcgcatcggaaactcgcttcctatgggtcagtaaagtgtgtatgaggtggtgtggatgacagcacatagagctggaggggtgggccagcagcaaccaggagaaggcgttccaggtgtctgcacccaaggagatcctggggtcagaggcaggacatgtgggaaaaaccattggtcccttttacccagggaaggactcaagaagccgaacgtggtaggagatggaggctcccaagccctggcagacgttacagcagcgctgagcactttcaggaccaggactccaaggtccagctctggaacgcccctctctgccctgactttggttccttcatcagcagaggggctcctgggctatgggctcaagtctgaagtcaccttaaagagaaatctctacctttctgttctccttcattgctgaggattttgacttgtgttgaaaagtttctgaagctttctgcagctggaaaatcaagcttttaaaaaagctcttgatgggccaggcttggtggctcacgcctgtaatcccagcactttaggaggccaaggcaggtggatcacgagatcaggagtttgagactagcctggtcaacatggtgaaacgccatccctactaaaaatacaaaaattagccaggtgcggtggcacgtgcctatagttccagctgctcaggaggttgagggagaagaatcacttaaacccaggaggtggaggttgcagtgagctgagaccatgccactgcactccagcctgggcaacagagcaaggctctgttttgtttcgtttaaaaaaaaaaaaaaaaagcctgttgacttttgggagttgtgtctgggacctaggcttgagcagtgaggacgcagagctcatcatcagcatggcttgctctgaggctgttagagattctcatgccaagagaggcaggccttttgccatgtgggcatgaaggaaaaaattacttcccgagagagggccaagggcacctttgcatcacagaccaatcccagcataaacatgcatgggtgggagggatggggttatggtatgttctgggagcacagtgacatacctcctcctgccacatgccatgtcagccgtgaggtgggcgttggagtggggtgactgaggtcacccatcatgacaacagtggtgatttgtctccagaacaggagcggccaggatttgatgcaggctaaggtgtgctgtggtgagtttgtggcatacgtgctgcattaggtgaagtgatcccacccagccccgcaggcttccccactacacagcgtgttgcagagatctaggtccatctggcattcaacttgtgtgttaaatggaaaagggagctcctggctctcctctggggagttagccccatcatctttgcaaattccctttggagtagggagcggtttcctagagtctctagacagtgacccccgcgtgccccctgtgggccccacatgcatagcagcctgcatggggtggcgctgccagtcccacacttcctgggcctcttaagggagagccagccgccctctgtaaagaacctttgaggagacctagatatggaccaggagagaatccgtggagcccatatcacagtcacagtcacagattcggagatccatggctgttttcataaattacacccgaacccctggtggttcccgttgtgtgtgttttctcaactgcagtgtgtctgttgatgtgaggaacccagaacagtggcttggaaacccctggaaccacagagctgtggtggtcagagagcctcacacatttgtctgtctgtgaagtatgggctgcatgaccctcctttccccggtcgcagcttcatgggaggctgtgcggggcgggcccagccccatggagctgggctcttgcctgtggaaactgaccagaattaagtggtcagaaacaggcccacagagactctggagggttcttcctttgtgttctgctggcagcagttttccttcccatcttgtggttctcttccttcccccgtgtcccttcacgcgagccagctgtctttagatccacagcatctgagagctgttctggagttgggctggttctcctgggtcagaatgcagccgtcgtgagggaactgtgtggcatttgccctttagagctgctaggataagctgcgaggtttggccccacttaaagtagaaaattattttgctgtttcccacattactctaccctttggcacctgttcttctcccccagcagactgcatcttcactgctgacagtcagctccatgagccccgtctcacagcccagggcttagaggttcattcagcaggcctcacttctctgctggttcctctcctttcctcgaggctcaccatgaagccctgtccttaggcttatgtattagtctgctgtggttgccatgacagaataccgtagactgggttgcttcagcaacagaacttattttcttacagttctggaagttggaagtccaagaccagagttcagtagggttggttctcctgaggcctctcaccttggctgtagatgccatcttctccctgtgtcttcccgtggtcttccttctgtgggtgtctgtgtcctcatctcttcttataaggacaccagtcgtactggattagggctcacttgacctcattttaacataatcacctcttggaagagcctgtctccaaataaagtcacattgagaggccctgggggttagagcttcaacgtaggaatttgagggaggacacagttcagccaatacagttgcataaagacagctgcagtctctccccttccttcctggagcttctttgctagagggctctggttgcacgtttacacaagagcacagagaagccagggcctggtttgcaggcttgcctgaatttttctaagatgtttgccttaggtgaagtccaaaattcaggtgaaagagatgagacatttcacatcttgaagagggtacggtactgtacttgtgtttttgtgctttgaagtgtaatttttgtttccgctccttttattaaaggtaatgcagtgagaaaattaagtaccctttcttttcctttctttgtattgagcaattttaaaattcaacttgcagaaatggattatacatgataatttgctgtgcatccataaaaaccataaaatataagagaagtgttgttagagtagctgttcccatttcctggcagtcattacatgcttccaatacaaaaacatttttctcctaactatcttttctgagctcaaaaatggatttccctccagcccctgtcattcaattatcacctcgggaaatgcacagatataactgatgatccctttcaaacgtcctgcggcaggcctcgctctctcatccttcatcgttcgtcccgctcccgtcattaaacgttacattgccgatgtatattttataaggtgaccctgacggatgtcactttgatgctgtgcagggataataagattgcacatataatgaaaggccaataaatagaaaaatgtttacgagatagagaatggtagttttaacagttttatggctttcgttttttctttcgtctcctccccctttgctggtagaaaacatcaagaaaggtgaggtggcgatagaaccaacggcagtgaaatcccacttgccctgtttctgaactctaataaaatgaattcaggaaataatgaagtgttcagcttgtgggaaagaaaagtgatgtcaacaaatgaattcttagggtttgggaggctctaccgagaaaacaagatttttctggtattagcattattacacttaaaatatttacatcctatatttaaacaaacagttcagtaaaacaagaaataaacctccaagaggtttagaaatacaagcctccaagggggcccttgtgtgtgtgggttccatgtaagtgaaattgtgttggaactgcccagggcttccaggccagaggccggggtgattcccctcatgtcgtgggagtctttcagttcagcctgagctttagactgttttgcagtggcctcaatctttgccttcaaatgagtggtttccaaatctgttatttatttatttttaaattattttaattactattattttttaattaagttgaagttaggccactgtcagtgcttcctcactcagcagctttatttacaaacaaacaaggaaaccaatagttatctattgcttgatcaatgaatataattttttttaatagatctgcttgcagtgggtagcaacaaggtcatagaggttcagcagacccaccctgggatccctccaacacctgtacggttttgagccgcagttcagaaccactgatttaaatagatacttctagctggaagcagtttggaaagatgctttgtatagtaggtgtatgcaaacatctttttttgggcagagcccgtatctctttagggactctaccttatctagactcaggcatcactgcttttggatcaagaggcaggtgaaggccacttattggcacatttctgggacatatgttgcctagagccaaaagtaggccagagggcttctcctgtatcagaagctggtgggtggtgtgaggtatggtaagtaggtagtgaggtggggagggttcatggttgtaggctcccagcgtctgtctcatgtcgtcatagaggttgttcttggtataggaagcagaaagcgtttctatagacatgtgcataattctaaatcttcactcatggctaccaaatgtgcttctgatttgtgtgcccctgaagttgcttcaagcaggtgcagttctgtagtccatgggtgctgggatgggggctctaccctgagctgggaaggctggcatcctgttattaccaggaggcacagggatattttgtgctcctcagccataactgcgaaggtccaggtatgaagattaagatgctattgcgttgaactccagagattccagagatcaaagatagcccaaatttgcccccctcacttaaaaaaatctagatggctatttcctcttagtgctttaaaccatgatggtcaaacgttttagagcagcagcacagcagagtctaaggttaagggcgttagacttcattgaaactgagcttggccacatggcttcatctcactgtgcttcagttgcctcatttgtaaagcagggaaaatgaaggtttatctatttgggagtctgtgaagataaaatataaataaagatgaagataaagtatatgtaaaagataaatatatattaagatataaaaagatatggcttagcttagttattgtagatttcatagtaaaatgttgtttgcttgtttgtaaataaagctgctgagtgaggatgcattttcagtggctgctgagtgaggaagcattttcagtggctgctgagtgaggaaacattttcagtggctgctgagtgaggaagcattttcagtggctgctgagtgaggaagcattttcagtggctgctgagtgaggaaacattttcagtggctgctgagtgaggaagcattttcagtggctgctgagtgaggaagcattttcagtggctgctgagcgaggaagcattttcagtggctgctgagcgaggaagcattttcagtggctgctgagcgaggaagcattttcagtggctgctgagtgaggaagcattttcagtggcttcctaagccaccattccatgatactcaccttcagagcagccacttccaaacatcggcatgtggattgcgttttcactggcccataagaaataaatgtagccatttttcctaacagtaaatgtaatcaaagaactttttctgtttacttttttggagataaaatgtcatttcttttacaaaataatgatgagatcaggaggcagttacttctaatgaccttacatggcaaaataagaaagtggcaattcggtatccatttctcaaaagttttatccttttaatttcaggtgaattttaattctccagaaataatcatttcatcagatgtttactgaatacttattcaagatgttgtcttagacctgtggggtactcacagatgagatagcacgtactttggcaagttgggtgggcccatgtatggttacagcacagggaagcctgtctgtgccagcacagaggcgggaatgaaaagatgtaggagtgaaacctgtatgatgccatccagtggtgggggagtgaagtgaagggaaggcttcatggagaagaaggcagcaaatgtgatgaattgagtcctgagtgatgaggaggactacagggcctggacagaggaggaggtgggggtggtatggggctcaggggctcacccagcaggcaggagagtgctgaggaacagaaaactggccattgtgtttgacataagccaaaggccgtgaggcgggggaatatggtagaaaggaatatggtagaaaagtcttccggtaacacagagaaagtctcagaagaagtagtcaagcagctgggcctttgttccttaggccctgaggaacctttgaccgtttggagaagaagtggcaaggtactagcggggctttgggaagactcacctggtctgtgtgcagcatgggagggccggcccagggaagagctgtggcaggacctcaggtccagacgtctgagtggaggtgtggggccagggtgggattagcaaatggctgagttcatccaccagaacaacacagagcttaggaaatctcattacagtgttcagtgttggcagaaatcttgagctattgcagttcctttgcactgtacaaatggagtggtaaatgtagtggtaaaaaaaaaattttttttaactgattttttaaaatgttataaaaaggtgcctgggtaaggaacatcttcatgagtgtcttagactggccccacctatttacaagttaaagccacaagaccttcacgtacttccctcctttccctttgcctttccccagaagaggatctggaggtggcaccgagggactgccttgcctggaggcagctgcctcctcactgtgggcttcctcgtgggtggcggtttagatcagagcccttcggcctcttgaacgtaggaggctgagatttcagaattccacttctctgcgtgtgccttcaagcagatcatcattctccctgctgcactcagagaccacagaggtgatatttaacgattagcagcagagcccgctgacagtgccaggctcctttagggattagaggattcggttggttaacaaaagaaggagcccaggagaacagtgctttaattaccagagttgttactggaagacaaccggttgcctcctggaaaaagatctgtagaaggtggctgctcctgaatatcgctgctggttctgcccagtgcccggcttctcacctcagatgttctgaacagttgtcagatccagcccttgaatcgttggggagggaaaggaaagaatgactcgcataggattccatgccaggaaatgttcctgactgcactcggcagcagcgttggagcactccagttagggcagctcttcaggggacagcgtcgcatgcagacttcctgggaccggctctcagggccacagctctttcctcatggcctgggtcactctctgggcccgggtttaggaagcagctctacaccatgcttctttctccctctctgccctacataatttgaggccttgttttttattatttgttgcttgctgggatttctccctgaaaaaacataccttaaaaaaaagttttagatctctccacttcagtaaggaaggggtggatttcttcatcccctttacgtggaccaccaaagaaggagccagatgctcactgtggggcattttttcaaacaaaagtttaagcaggggaacaacattctgactctaattgcacattagcaccgagagttaaggcattgtgtagagattatttagctgctccttctgtattcatgttaaaatatttgtttagccataggaacagataatcttgtgtcttaaagaattaaaatgatttcttctaaatgcttacttctaagactctgcgatggggtcaggtgcgtacaaggatgtgcactcagcagccctgcccctgttggctcctgtcccatcacgtaactacagtctgctcagctgacagtggtaggtgggcttcgaagacctgtgaaatagcttcggaaagaaattgtgtttataatcctgttatccatgagaagcttccaggcctgcctcctcatcccccttctctccgactgccccctcctttttagtgggcgatgcatggcccagaaagggtgcccattggaaacttcgtttgtgaaaaagaaaggagctgcagctgaccctcactagtggcacaaggccagagcctgggcatatgtgacgttgcagggatctggtttagatgcctgcctgcctgtatctcccctctgtctgcatgggcaaggaggcaggaaactggtgttccagggccttccttaacatagccgtaaggccagcagtcctcatcattctttgctgttggtcgtaaaactgtgttgtgacagtggaagattctcactgttctctgtgaactgaatcgaaagggggtgcgcatacggttatttacaaaggactgagtccttctttggcttaatttaaaacacacacacacacacacacacacacacacacacacgacctgatggtaggtggcaggctgcagacaccctggataccgtgtgtgggagtctccagacctcatcttctattgcactccctccccttcctcaggggagtgtccagacttcttgggtgatgtggtaataatgatataattaccaaaaaaagtgggactcaatcttgggtgtacccttatgcttctaatatgggacagcagaaaccattgatttaaccttctcctgcctccatgtcagcttctcagaggatcctgtctgagcagttcatgctgggctcgggcagaagagaagctgggccccatactgtttgaaacaggcatgcttgctacgagtgagccttttatagtcaaaatgcttccagtgccttcttcttcaacaatctcttctactctttcactcccccatgcccctaaagagagagaagacatgtggcttatcacaggacaggttacaggttctcttcccgtagcattccactgcctgtgggaaattaaatagcagttgtgttggtggatagtgtttagtttaccaaatgcgcacaggtaagttggcctgttggaaagcctgggaggagaccctgctcacatctgtgcacacatgcacatacacaggggcacccacttggcccctgggtcgggttgcctatcacttacccaagataaagcagaactgggcctggccagaacagcagaaccagtattaatacctgaaatgggtacaggcagcctctaggaggtaggcagccccggcccctgttgctccagcccagattgcccaggcggcggagggagctcttaaagacctgtgctgatgtcttacgttgtgtctgtgtgaacttgatagacttgcagcctaaccctggagggggcagaaataaagtggtggctgaggaggagaaagtggcctgagcccagcaggcccctggatggcaggagcggctgccgctgagctgtccctccgctaggcccagagtcagctgactctgcatccttagctttttccttctctcctaaggcccttcacccagattgcctggtgccaagcagcttactacttcttccctctctcttccatgtgtggcactcccttccccttgtttttctttttgtgggaaattaaaggaacctaatggtgcttattttcctaactccatcttagtgtatagcctggaaagacacctctgctgggaagagactcctaagtccaggagccaagctcctgtcattgccaaaggctttttgcatatgacctgtgggaaaaatttagcccccccaccgccaaaagaaaaaggaaaggagagagaatctgctaaatatagcccaatggatttgagcacttctcttggcaagagctgcagccgggaacactgtcagttggagatgacttcgccctcttcctttcccatttctgcccaggcactaaaccagttgagttcctcatgctgtgtgcaattatagcaccgagacataagatatgttgactgtgagaccttgttgtgagatgaggtgagagcatcaggagcaaaatgatcattataggccattcatgtcgacaacattttatacctctgtgtttgcttgcaggcaaaatcaggagctaatttgcaaggctgcctttgtggagctgccttttgattaatgattgcctgtgttaatgtttcagtaagctattgatttctgcaacagcttttgttccctgaatttatgtgcagcgggtctctgcagcacacactatgcatgtttgattaaagttcaattgacttcattcctggcgaggcctctagctgcttcactccctatttgtagaaccagagctttccccgacatgttcttttgtttgtgctcaagaccttgccacccatgcagtcaccaatatgccatttccgatcctagactcgcttcattccagtgttgaatcccttgataggcataacagtggttgagaggcagctaataaaacccggcctggatttgttgttgtttttcttcagctttattgacgtaacctgccatatatggtatgaataccgtaaaaatgcacccactttaagtacacagtttcatgagttttgaccactgtatacatttgtgtcagtgacaccacattcaacttacagagcattttcatcaccctggagtgcttacctgagttcttttagtttcttgtcccccaccctccaggctctcggcaaccgctagtttggtttttgtgatctctgggaaggactcacgcagcacccaccgtccctgtctgcctgctttcatgcagcatggtgttgctgcatgtgtcggtggtctgtgccttttaattgccaagttgtagtccagtgaatgtggggataccattatttgtttatccattctcctgcttgtgggcatttaggttgtttccagtttggactgttaagaatagtttctggctgggcacggtggctcacacctgtaatcccagcactttgggaggccgaggcaggcaaataacgaggtcaggagatcgagaccatcctggcaaacacagtgaaaccccgtctctactaaaaatacaaaaaaaattagccgggctggtggcgggctcctgtagtcccagctactcgggaggccgaggcaggagaatggcgtgaacccgggaggcggagcttgcagtgagccgagatcgtgccactgcactccagcctgggagacagagcaagactccgtctcaaaaaaatatatatatatagaatagtttctatgaatgtatccgtgaaagtctgtgtgtgagaattttttttttcttttgggtaaataagagaagaattgctgggttgtttggtagatatcgtggtttgagcattctgtatttccaccagcagtggatgacagttctggtcaccctgtcaccttcctgaattgtaagtttaccgttcttaccacctgtgacttcactgctgtggaggacagtccttcctgcctggtcattttcttttcttctttttttttttttttttttttttttttttagtaaaaggcgaaagatttattcgatttgaagagaaaccagttgcctggtcattttcatccttggcactcagatggtgaaatctgttctggactacttcttctttaagtgtcaacaaaaagttgatgttgatttcaatgttagatttctttcttttgggtcttgatttttttcacttgttggcagagatcagtgaagccaggagcaaaggtttgaaagttaagccttttttctgtctggcatggggcagtttcttacctcactgaactctggcttcttgtttttaagtgttcttttattttttttaaagagatggcctctcgccctgtcccccaggctggagtgcggtggcacatttgtagctcactgcagcctcagcctcctgggctcaagtgatcctcttgtctcagcttcctgaatagctggtattattacaggcacacaccagcacactgggctaattttttaaacttttttgtagagattgggcctgtagggcccaggcttgtcttaagctcctggcctcaagcaatcctcctgccttgatctcccaagtagctgggactgccggtgcacaccaccatgcccagataattttttttttttttgaggtgggggactaaatctcactatgttgcccaggctggtcttgaactcctggcctcaagtgatcctcctgcctcagcctcccaaagtactggtattacaggcgtaaactgctgcgcctggcttcttcccttaacctgggatctgcaggttactatcttttaaagccatttcaaaacatatatatttgataaatagaaataattgattataactgtgtgtagcaatattgcattatagacaaatgctatttagaaaagtcaggttgctgctttttaacagccttcaggtaagacttgaaggcatggcagaggctcaggtaccaccttctcactcgatttttctctcccgtttttggtcccttttgtctcgtatagctttgcatttcttcttacatcccaagcttttttttttttttttctttttctttgagacagagtctcactctgtcgcccaggctggagtgcagtggcacgatctcggctcactgcaagctccgcttcccgggttcacgccattctcctgtctcagactcccgagtagctggaaatacaggcatctgccaccaggcccagctaattttttgtattttttttagtagagacagggtttcaccatgttagccaggatggtctcaatctcctgacctcaggtgatccgcctgcctcagcctcccaaagtgctaggattacaggcgtgagccaccgcacctggccacatcccaagcttttatcattcagtagcccctaaaatgacttggactgaggaagtagaaggaaccactgtgagttttttctcattcttctttcaagctctggaatttgagctgtgacttatcacagcaccagttgcccttttgagctcatgaagcatgaccttggacagagcatttggagtgtgactgctccctgccttgatttctcttccatattttctcagaggaaaaccagacacaagtcagcgtttatgtcagcagtgatcttgtaaccccctagtgggatttacgaatcttttccgtctagccaacacccaaggatcagtatagataaatgcatttccaagtctggaaagcaggaagtgaaaagagctaggaggttcacagatcatgaccttaggggccaggatgctcatgcccgctgggacagttgtagctcgcattcctagactagcatgggggagaggagccagtcagaaattccaatggcagtatctgcatttctccttatcattcagttaccatctcatggaaccgaggggtgggcacatgcacatacgtgtagggacatgagtgtgcttgtcccgagatggctccctggccctgctggcctggggttatgcttcatctgctaggtattggtgatcaggagtaatttgttaagtgttaagtgcttggggaggttgagacacgtccagtgctccaggagatacatgtgatgggctttataggccagtcagccctccttcaaggcattccagccctcctttagggaccgcagccgtggtcccacttcttacaaaaatgcccaggcataagatgcagctgtgggcagtcaagtactcaaggcacggcatcccctgccttgcggaagccaccccaccacctaaaatctgcccacctctcttgtcactgtgttctgaggccatttcctctgggggtgttttggatgaaatctggtctgatgggtgagtttgtcatgtggcagctacatgtctttgtttggtttgtctattttagtccttccaacactagtctttccatccccctctctcactttcccctctctctttttgcctcctccattcacaagacagtgtttgatgagacaaagtgagggtgcaggtacctccaagacaactcccagcatctagtcgccaagctaatagactttctacagtgttgatttaattagagggaaaccaagtgatctgtgctctctcacttggctgtgtttgttttttgggttttttttttttgtttttttttttgtttttttttttcagttctaggtaaagagactttatcttgggatgtttaagaaatcgtcttttgtgtgtagggtgagatggcagcctgcagcgccctgagggctgggggtgcccaaagtgccctttctttaaaaagcttacatttgctatatttccaaaaaggtatcttgcttttgtttctgctgggccatgaaaagaagcctgaccttgtggtgtgtgatatttcacctttgcatcagcaccactgtgtgtctgtcctcttgtagtctttctttgccaagcccagtccttgcctctggacgtcgtgccggcatgtcagatgtgggccttcagatggagccaggtggaggctgtggagcagtttcctgagcatgcggtctctgttcttccccaccttctgtttggccctggttcctcaccacctgggcagtttgctttggttggttggttgtttctgggggagtctaactggccgggcatttccttctcacacctgtgtgatttcactggcattactgtaaagaaagcatcgttgtgttcacacacatgcacagactcacgtgcacacacagctagaatgtaagctcctcgtgggcaggaatcttctctccttttcgtccattgtggatgatgtgtacctcccatgtgtacaacagcggtggggtctgacatagcagacacccaacaagtacttgttcttggtgtctggaagtcaagctgtgctgggctgaggaggcgggccccattcatgcagtccacgggcagctcagtggctgtttcttgggcaagcccagttcctctcccaactccaggagcgactggtctttattctcatctctggcacagctgttaaacacccagctttccactgtggcagagagggtgcgtggggcacggaaaagccccaggccctcccccacagtcagcccttctcttctgcagggggagctgatcaccttctattactattggaagaagacccccgaagcagccagctcccgagcccatcgtaggcaccgcaggcaggccgtgttcaggaggattaagactcgcaccgcgtccacacccgtcaacacaccctccagacccccgtccagtgaattctgtgagtaggggtcttggcatcacagtgggcggaggggagactgttcacgggcagcctgtcccactctgggcccgtaggagctgatggctccgggaagcatgagggggtgtgcacccgtgctccagtgcatgtgtgaagcctgacctaaacatagaccgatggtgggggcggggagcaggacaaggattcaggagggagactttaaaacattatttgtacatttaaatatttctcataaactcaacatcatcttaggtttttacaaaaaatacacgtcttggcctgggatgtttttggccttgtcctgggaaggttttccatttgacagatgatgtacttgatgtcctgcttgaattctcattgcacttttggttgtaagaagatcagattaacactttcttctttttcctcctgcttcaccaagatcctctttttggtcccagtatgatgtacaatctaatgatgctggagcccacaccttctcacccctaaaaaactggggtgtagcaaaagtgccttatagctctgtcctggcccgggacgctgaacctgaggggcgccggtgttgcgcatgcaggcgactagaaatcacctagcaggacgggttgggggcgctcggtgaagttggaatttctcaggattgcctgggcgtattagggagggaggcagcatggacgcgcttgtcccagttcagactcacccgttacgggcatcagtggcagggcaggcccttgggtatggcgcctcacacacaggccctctgtcctggtgactgacactgaggagctcgaagtggtcctttgcagacactgtcctacctcagcctgtgcacccagccgctctgactggtggccagaacctgcagtaggccagaggtcacaggtgttcccccctcccccccaccccaccggcccagccttggctgagcatgatggtgtctcccccacccccactatgtgcctgccacgcccagtggacctaagttcagccagtgaagatgacttcgacagtgaggacagtgagcaggagctgaaggggtacgcctgccgccactgcttcaccaccagtaagtggcctcgtcacgctcctggggcggggcgggggcacaagcacttccatgttctgaacatttcatgcatccagctggaaacctgccagggacagtacttgatttgacatttgcattgtgcttcgggattcgagaaagttagaaatgtttagtttactttactcctctgcttggcagtcggtatggaatactgactggtaggcaggacagattgagtgggattggggggttgacactgtagttcccaggagcttgctgccagcttttcctgggcaccccaagttgaagtgggcagcagatgcccctgaaaccctctcctggccttgggggagcagggcagcactagccctggggtgttggggcccagggctgcatggtgctggtggcatcaggtttgggtagagcccacagaagggcccctctgcccagacatccccagggagagggatggtttccaaggttggcccccaccacttccctcacacagcctccaaagattggcaccacggaggccgggagaacatcctgctttgcaccgactgtcgcatccacttcaagaaatacggtgagctcccgcccattgagaagcccgtggacccgccaccgtttatgttcaaacccgtcaaggaagaggatgatgggctcagtgggaagcatagcatgaggacacggcggagtcggggctcggtgagtcccctggggccatggggctcctggcaacttcttcagtttcctgggatgtgtgggggcttgagcctcccagggggaggaagcgaaagtcttgtttaccagacaaagtcctggaggggagctgctttgcccgaggcggtagcttgcctgtgggctgggaagagttctctgttctctccttcgaggggccccagggtggcatcctgctctgggttttgtagcaagctcttagcttctggctcagtgcaggctctccaaggcccctcttgctctccaaggctgctgcttgtggtgtcacttccattgtatcaaatctctgctattttaaacttgcaggctcttttgtgttagtgtgtttgtgattttttttaaatgtttgatcccgttttggaaacttccgatacatttttctgctcactgcatagctcctcccataaagagactttgtttcctaggttggaaatgtgccagggactttgggagaggctttttccaggtttggggctgagggtactgacagggtctttcccttcagcctcccttatggccccttctggcaggtgggtgggaccatccactttcctctgccccttgtatgccgttgaggctgctggcagcccggcccccgctcactcagaagggagcaggtcaaccagccagaaccattgtctcctgatctcttctgagccctcatggctttgcagaaacatgctgaagcgcttggcggcttggggagctgagctgctttacttgacagcttcatctctttgggtcacttcctgtcctgtcagattaaatccacaagtgtttgatttcatttggtttggttgggagaatggacggttatgaggaataaacagaaagggtgtagggtgctttaaagatggccccaggcgactttctgccgctcagaaagtgtggttcatttccagcacacgttgttcaggacagtcccttgggatgagtgctttaggtttgagaaccgccctctggcgtgagcccactgatttccccacctcttccctgagctccacaccgaccttcatgcagccagggacaggcagggcggcctgttgtttgccaaggtctgggatttgctgagaggctgatagggtgtgccttcaggcttctgcctgtgggttgggctcaggtgggtccacatggggactgggaatctggtgtcaccagtcttcggtttgggtgggcagatgtcgacactacgcagtggtcggaagaagcagccagccagccctgatggtcgcacctcacccatcaatgaagacatccgctccagcggccggaactcccccagcgctgccagtacctccagcaatgacagtaaagcagagacagtgaagaagtcggccaaggtcaggtgctggggggatagtagggcctactctgtccctccctcacattaaaactggtttgctggtattcgtgatcagctccctcagacacgaggatgcagctcattcatggagcctgtctggacaccagcattgtcctggcctaggggctgcagaccgaaggctgggggcctagagaagggggctcgagcaccaactcttgggggccacctctgcctcaagcttcccaagttctcagaaagtgtggggagtggttagaacggctccctccagagccaagtacagtcctcccttggtatccattagagattggctccagagcctccaccgcccaggataccaaaatccacaggtgctcaaatctcatatacatcgacacatggtttgcatgtgaccagtcacatcctcctgtagactctaaatcatccctaggttacttctactgcccagtgcaatgtaaatgcagtttaaacagtggttccactgtctagttcaggagataatgacaagaaaacattgtgtgcacgttcagtatagatgtaaccatcacagtcctgcctacattttcagtccatggttgcttgaatctgaggatgcaaacccacaggtgcagagggctggctctcattcccacccccagatacgtgttccttcttggccccagttgacccttctagagctttttgctcctggagatggaactcagaatgagggagcaaagtgtctgcaaaccgtcatttccttgctgaggctgatgggatggtctcccttggcctgattgctccttgtgggcttttcccctgcagaaggtgaaggaggaagcctcttcccctcttaagagtaacaaacgccagcgggagaaggtggcctctgatacggaggaggctgacaggaccagctccaagaagacaaaaacgcaggtgaggtttgctgctgagccttgctgagtaaagctaatgcttcttcagaagcccccagccggggttctccctagttggtggccgtgccctgtctcctagggtggggctggagtggcctttgacactggctgggtcagggcacgacctgtggtcccggagccaagcttgctgcttcatctgcacaaacattactgtgtgtccggcactggtggtgcagagcagacagggctctgccctcctgggacttccatccttcccttctctgactccaggagatcagcaggcccaactcgccatctgaaggtgagggagagagttcagacagtcgcagcgtcaacgatgagggtagcagtgaccccaaagacatcgaccaggacaatcgcagcacgtccccgagcatccccagcccccaggacaatgagagtgactcggactcgtcagcccagcagcagatgctgcaggcccagcccccagccttgcaggctcccactggggtcaccccagctccctcctcagctcctccagggacccctcagctgcccacgccagggcccacgccctctgccactgcagttcccccacagggctcccccacggcctcccaggcccctaaccagccacaggctcccacagcgcctgttccccacacccacatccaacaggcaccggccttgcacccccagcggccgccctcaccgcatcccccgccgcatccctcgccacatcccccgctgcagcctctgactgggtcggcgggccagccttctgcaccctctcatgcccagcccccactgcacggtcagggcccacccggccctcacagcctgcaggctgggcccctgctgcagcacccaggccccccacagccctttggcctccctccccaggcctcccaaggccaggcccctctggggacctccccagcagcagcgtaccctcacacctccctgcagctgccagcctctcagtcagcgctgcagtcccaacagcctccacgggagcagcccctgccaccagcgcccttggccatgccccacatcaagcccccgcctaccactcccatcccccagctgccggcgccacaggcccacaagcaccctccccacctctcggggccctcacccttctccatgaatgccaacctgcctccccctccagccctgaagcccctgagctccctgtccacacatcaccccccgtcggctcaccccccacccctgcaactcatgcctcagagccagccattgccctcctcgcccgcccagccccccgggctgacccagagccagaacctgcccccgccccctgcctcccacccccctacaggcctccaccaggtggccccccaacccccgtttgctcagcacccctttgtccctggaggccctcctcccatcacccctccgacctgcccctccacctctaccccaccggcgggacctggcacctcggcccagccaccctgctctggtgcggcggcttcaggaggcagcatagcgggggggtcgtcctgcccactccccaccgtccagatcaaggaggaggctctggacgacgctgaggagcctgagagcccccctcccccaccaaggagcccgtccccggagcccactgtggtggacacccccagtcacgccagccagtcagctaggtacgcttcctagggctccaggacgggtcaggcacaggtgggctggtgggggcaagttctggtgggagggagggccggggtgggtctcggcaggagctcccagcaagatctgtggcttttctcaggttctacaaacacctggaccggggctacaactcgtgtgcccggacagacctgtacttcatgcctctggccgggtccaagctggccaagaagagggaggaggccattgagaaggccaagcgcgaggctgagcagaaagcccgagaggagcgagagcgggagaaggagaaggagaaggagcgggagcgggagcgagagcgggagcgcgaggcagagcgggcggctgtgagtccagggttggcgaggtgtgacggggggcgctggtccatcctgcgcctgggagccacgctgggccaccgagctctgcccttggctgcctgactcggcctcctggcagctagagggttgggtgctatttacaccctgtctccacacctctgacgggtgctgcacatccgaagctgccggggtaactgcgcatggcaggtctaggctgactcccagcagtgactgtgcgtcctcctaccggagggccttcgaggaaagggcctgtccttctcctgcagcctttgggttcataacttctaagtaatttgaaggagtcggggagaagcacaagggggcgccttgagagaagacctgagcactcaggcgataagcaggctgcgaggggcctctccagctgccctgcctttgtggccccctcgtgggctgggtgctgtggtggtggccagctctctgctgtcgcggggaggaaagggcagccaacccaggaagtggcatgagggactgccagtgaggttcctggcctgctgggctcactcacccatgccccccagctgtcactcccagacacaaccctcacacgtagacaacccatgcatgagcttagtctcacagggacacattcccatctgggcctgaggggagctgcgggcacaggtgagcccgaccctgtggggcctggactgcatcctggtgtcaggccaaggcagggccgggtctccgtggagggaccaggttggcctgtcagagcaggccaggagcaggaccaggcccacctccgcagtgtggaccaagcggagaccccaggcgctcgggggacccctcacgctttcttttccttctgcagaaggcgtccagctcagcgcatgaaggtcgcctcagtgacccacagctcagtggtcctggccacatgcggccatccttcgagccaccaccaaccaccattgctgctgtgcccccctacatcgggcccgacacacctgcccttcggactctgagcgagtacgcccggccccacgtcatgtcgcccaccaaccgcaaccaccccttctacatgccccttaaccccacggaccccctgctggcctaccacatgcctggcctctacaacgtcgaccccaccatccgcgagcgggagctccgggagcgggagatccgagagcgggagatccgggagcgtgagctgcgggagaggatgaagccgggcttcgaggtgaagcccccagagctggaccccctgcacccagccgccaaccccatggagcactttgcccggcacagcgccctcaccatccccccgaccgccgggccccacccttttgcttctttccacccgggcctgaaccccttggagagggagagactggccctggcgggcccccagctgcggcccgagatgagctaccctgacagactggcagccgagcgtatccacgcagagcgcatggcatcgctgaccagcgatcccctggcccgactgcagatgttcaacgtgactccgcaccatcaccagcactctcacattcactcccacctccacctccaccagcaggaccccctccaccaaggtgcgtgccccagcgtggcaggtgggacagaggcacggggaggggtgcagagcctgatgagtgacagtcaccatccaggagcggaaactgttcttttctgaacagatccctcatccctggcagatcttagaagagctcagcatccactaccgtcatggttttgctgtatcgcagtctctcctcggccccgcagctctccagaactgcaaggcctcagacagctgcagcacacgggtgaagcctgggttcttggccctgtgcctgggatggagggaagtggcctaggcccacagggcagggtaagggcagcagagcagtgtcatgtggcctttggagccaaggaacgtacagataaggcactgggctactcaagggtggctgagggagaatgaaaagcacagtcctcttcccttgaggagcgaggctgggcaggcctcctgctggctttggctgagttttccgagctgacccacctggccagggctgctcagtcctgtccaccctggaagtaggagctccttaaggccactcattgaccagctgtggagaggctgctctgaggcagaggcaggcccagctggcatcctcactccctctgcagcctggtgagatggcgcagggggtggctactgtgcttacgaggaggcaggttcacctgctccatgggacttggagtacaggtcctgtgggacagcctacgtgcagggcttcctcactggccaccctccagtgtggggcaggatgactgatagagcagggcccagagggagggcggggagccaccttgcttggaggcaccaggcgcctcccctgcccctgtacccagtcctgacatgggagagcactcaccattgccgtcctcatatctgaagctctgttggcacctggtgtagaccttacaagcctcagtatgagcagtgttgaggacaggtagtcatttgttcattcatgcatcattcattcagcaagtgtttactgaacccctggaatgtgccaggcacagttgtaggtgctggcagaacccctgtccacatttaccttccagtttggggagatagttgaaagacgtgtgccacgttgtgagaggcagaaagtatatgttctggaaaaaaataaatccagaagaggggatcaggagagctgggcgcaggggcagtatggcggtttcgagaaggccgtcaggagaggtccgctgaggaggtagcagaaacatggaggagatgaaagggcaagctgtgggaaatcggggcaagagcagccacagaggcagagcgggggctcccaatcttccagggaccccagggcagcatggctggaggtggcaaccctgaaatccctgccagcgcctgtgttggctggagctgggagataggaggtgagggcaggaggtggtgcagtgaggtcagatcaaggcaacgttctgaagggagagacgcaagatttgtgccagcagagaggagagggcagtgctgtgccaggtccccattctgcgccacccactctgctggcctcctttaggttctgcgagtgaagagcagggagacagccctgggcagggggtgccagcccaacacccactggcgcaaggctgtgtgttcctgtgacctgacaggcagagggcaggcccaggtggccggcgagagggaccctgctgatcccgggtcctcgacaaaactggcctgggattgcctgttaggggcactccacaagcggacgagggagtgcctgcatcagcggtgggctcgtcacttctctcggcctctggagctcttgctgaaggtggaggcagccactttggggcagggccacctgtagccaggtggtgcatccagccctggtgaccaggagccatcctgggtgaggaggaagtcatcggtcattccagccaagggggacaaacattgaagagctgcacaccgcctccatctggcgttttgtcctttccttaggttcagcaggccccgttcacccgctggtcgaccccctgactgccggtccccacctggctcgcttcccctacccgcctggcactctccccaaccctctgcttggacagcccccacacgagcacgagatgcttcgccacccagttttcggtaagacttcccctccaggaggggcggggaggccgtgtgagggttgggttggggtctggtctgctgtcttcattcattactcattcattcattcatgcattgagcaggtgggttcgctccccctgcatgcagggggtccgtgggggaacaagcctcctgccctctgggggctgtctggggtaggggtcataaatgcatcagccttgctaagagccggtgaaagtagcagaggggactcacggcaggtctctgaaggagaagcacttgggctgaggccttggaggaggggccaggcaggtccaggcagaggcacccaagggcacctcctgcctccccagaggctctgccctctggctgtctgcagagtctgggaggggctggctcctgtgtccgaactggcacctctcctgtgctctttgccgtttgctgtgcctgtgccgccctggtcttggccagtcctctggctatttctgtagcgcaggttgttttgtgttcggcaggcaccccctacccccgtgacctgcctggggccatcccaccccccatgtcagcagcccaccagctgcaggccatgcatgcccagtcggccgagctgcagagactggccatggagcagcagtggctgcatggacacccccacatgcatggtggccacctaccaagtcaggaagattattacaggtgaggtggggtgctgggagggagtggaggggttatctgagcccaggctcccaacctccccgtgtgcccagggccaggctcctccccctctgcctgctgggccctggaggggacattgtggaaccatggtgatgggagaaacagaggaagggaggtgttgggagggtaggtcagctacacaggaggctgcgggcttggggttggattgcctggctgttgtctttggggttgcctccagcctgcgtgactgcctgcctaggcctgagactaaatacgctttcctgttttgtctttccagtcgactgaagaaagaaggtgacaagcagttataagttatttatttgttaacgctggctgtggaaaccccagttcttggggggagaaacaggactttttacataaaataggagctgcaaaagcaaaaagaatatcttctaaagatttctttatatatttaaaaacccacaactaaaaatgtatccacatagtagtgttcgtttgtcgagaggatttcctgagactggtttggatctccctgcatgacagtcccccagaaacttagtgagtcctggactggactgaacatccagaaagcttccctgcaatcttggggtttggctttagttttcttttccttgatttctcagtaggtgctagaatccagttcacacccttcactgtgcgtgcagacacactgacacactccgccacgagtgctccagagcccacgaggcttgcagatcgggggcataggaatttggaatccaagagctataatttttaaaaaaaaaaatcttttattttaatacattgtaggaaatcttcataattggagaaagttctgcagcatggctttttacgtctgtaaataaataattttagaacagcctttttttcttccataaactactattgtgatctattttttccagccatgtcactaattgtgaattcctaccaactattgacagaatacagagttgattttttaataaaaagttatatataattatccctttaattaaagggagcaaaggggcgttccacatggacagaggcttggaccgaggcctggtcacagcagcgagcatccagggtttgcagggacgatgttacagactctgttttctgcctggcgtttcacttgtgtctgctcctagcctgtgctctgccagcagcacagacatctgctccatcagacctcttccattttgcacagggagtgcaggaggtgaatgttcactttctgttctccagtgtcactgttctgtttccacgggatggaaagcgcatgggcctgtgtccattgtagatttccttctagatttctgtgtacacacacttgattgttctggatgaatgtcttttttaatactccgaaaatttcatcatctaagaaaatgattccatacaaataactcagcacacaagtgacccaggacatatgcctgccaaagggatgtgttagaaggctgccttctcatgcgcattgtcacttggatcttgtggtgaggacggccccatctttcttgccacagattgaggccacttttgagcaagggagatcctggagttaagacaggtgttgggggcagcctgtattttaccctaggggcaggtctgcatggtgaccccacattgcactggtaaaccatttgagtcccactcttcatcctggaagtgggaactggagtcccacccacagtgcattcagaaagcatgctgtgtgggggctgcttctcaggaggccaggcccttctgagcggaaccgtcctggagagagcctgccctcgtttccaggctgcagccgtaacgcactttctcccaggctgagggcgggtgttctggggtgtctgccctctgtcggccctgcttcctgccaggacgtggcctcttccgatccttttctctcagacactggaggtctcttctgccattgtgctggtcccatcccaagaattgtaggacagagaccacactgggtcggcggacacaaagtccatccaggacccaggccgcagagggagcaggaagagatgctgatagtttgatctagaaaccagcagctactggctcaaattcaggttctggcgtcaaatagcgacatttccagtttctcttaaaaaccgtgtttggtttcagttgggataggcttgttttgtctgttgaaaatgtttctagttttttttctttcatttttctctcattccatttctgccttaactttagtttgttcacagggaggcaaagctgacatgaaccttttgtcgtgggacttcaggccacattggcttgaaggcattcgtttccttctggggtggggacaggccctcatggcaggcttgttcccgtggctctgagcgaggcctcttcctgctgggctcccagactcctgcatccaggcccccaccttctcggcttctggtttttctttctttttggtagaacacaacatctaccattcagttaaaccttctttatctcctcctttggcatccatttttccaaagaagagtcgagtcctctgaggtctgtgcttgaaagccgtccgaaggcattcttgttagctttgcttttctccccatatcccaaggcgaagcgctgagattcttccatctaaaaaaccctcgacccgaaaccctcaccagataaactacagtttgtttaggaggccctgaccttcatggtgtctttgaagcccaaccactcggtttccttcggattttcctccctttgttcggggtttggtttggctcctctgtgtgtgtccgtatcttgttcggtgtcctcgaggttgagcttcactccactgcggcagaggcagcgtgcacactcggatttgctacgtttctatatatcttgaagctaaatgtatatatgagtagtttgccatgagataacacagtgtaaacagtagacacccagaaatcgtgacttctgtgttctctccatttgagtattttgtaatttttttgaaatatttgtggacataaataaaaccaagctacactacaacccttgggtgtctcccgtgcactgtctcattcctggagagtgggcggggatcctggctgttaccccaggtggggaagggacagagggagagtcggctgttccctgctgctcgggaccctgtttgcatcccagagtggcttccagaaacatcctctgtctgggaagaggctttccctggtgagggtgctgtctttctttggaggctccccaagcagcgggatgggccctaagcaggcactggcattgggactaagagcatcttcccccaccccttgccattcaccccacacctctaatccgtgggcgttaccagcatgtatgggcatgtggcaccctgcctgctcaggagacacatcggaaccaccccatcctagcggcctcctgcctggcccccatctgcctccccgtggcctaccagtgcccccacaccccacccccagccacccagctctagagctgcactccaggtggaggatgcatcccaggcctaaggggctctaaccctccaaaggggctgcaggcagcctgcagggtgtggacatggccacaggggggcaggcgttggaattgcgctgtggcttcagaacctgttgagggcattttcctggagcctcaggattgtccccggaaatgtgtgtccaccctttgtcatctgggatagggccatcagtttctaggtgtttgcagacatggggcaagagcagcccagaaagctgactgttggtaaactgtcctcaaaccaggcagggtccgccacgtggtaaagacttggggagcagcaggcaccaggcactgcctcgctcaggacctgagaaagcttcgccatgcaaagacccgagtggcgcacacgatgacggcccttgaggcgaacagcaggggtcctgctcagcagcgtggctgaccagggcacagggatgggcccgcaggctggccacaggagccccaggtggctctcagtccaggtcttgggtgagaggatggcactggggtggctgggagaggctggaatccaggcgctgtcttggtgggtctccgggactgtgccccttaggaagctgcagggtttaacaggtacaggtctgtgaagtgtagatttcagtgtggttaaatggttggatccaagcgtcttgaggagatagtaggttcatgctacaacaaggcctcatcagagctgggcagcttctcaggcatgaacagctgtggccattgtcaccactctgccacgcacccatgtgaggaagagggccgggaatgctaaccagacatctgctgggtggacggggcggagggaaatggtgctgtcctccagcagcaccccaaagccaggccctcgcctcttgctgccccaacgacgtcccacgtgccctctgcccctttgttcctggaaacgcatcctcagcttgagcatggtggctcagcagccccgctggttccactgcaggtgggctaggaagatggcactttgcagggcatggtgtaagtcccagggcctcagcacagtgtaggtgtgcagctgggtgtgtggctgcattgttgataattgtccatggtaagtctagggagggagagacctcacttaagcctcacctgggtaagtcaagatcacgcatctgaagggcaaggatgcaccgtggagagatcagcggtggcctcccacacacacacgagattgcaagcttccaggccctcaaaaatcagcactggtgagctatacaattgtggatgtgatcagctgatgagtggtggcggggggcggggggggggggggtcagggccagagcccttctgtgtggaagctgagatgtggggagccgtcatctgagctaagagccctcactagccccagcctgaccacatggtgagacccagggcagtgtgactgggcaccagcacagacttcagtgaccaccatcagcctcacctgaccagcccagaaggcttgggtacatatctgaactcagagctttgaaatcagaaccagctacccagatactggggatgaagctgccaggccccaaaaccagtggaaaagtctgtcctgcactggacccctggggcccttcctgctgcccaatggagaccgaggaacagcggggtccttggcctccctacctcctcctaaggaggatctgccagatgagccagccaagggatgcagccgcacatttggccatccggttggactgatacgggctgcaggataaagcaagccctttctggttcataaggttcccggacctcccgttagaaggcggggcctggctggagctggcatccatcgtggatccccagggggccaggaacagcctcctgctcagcccctgatgagctccagctgcagatgcctcacccggtcctctcggaggcggcattgtcggcctttgacagtctcggtatctgaggtcctttacctgaatccccactgggttcctagctgccctggaatccttggcaactcaagttctgggacctggttctctgcttctccaactcaaggtggcttctctagtggctgtctttgtcaagagtggtcattgttcccttttgacacctcagggacccaggctgcagaagtccccctgtatctcccacagcccagttctgtgtatgcacaggcacccgggccccttcttaatgaaccaagtttgtggaaggcacttgctctgcagatattggagggatggatggatgggtggatggaccctgctggatggatggatggatggatggatggatggacggacggacggatggacggacggacgggccctgcagggcaaggttccttgctgccagtccagatgtgctattggaaagtgggtgtgaaggaccagatagaaggaccttttgggttgacttcggaaggcttcccagggacgcctctgctgggcacctggagaccctcccttcacattctcttgactgtgcctgccgtgtgggccctgcagtccctctgactccaaccctggttgacaccatcgtagaagtggggaatggggcttgggggatcagcttctgatgaacccctagggtttgagtatccattggagcaaattaaaaacaggcttttagagcaccttttagttgtcccagagaggattcctgaggccatttcttgcctatcccactgttttctgggcatgtgaccacccagtcccccccaccccccaatccccttggaccctgctgctgggcagccgtcgaacagagtccatccccatcctggccaccaggtggcagtcgttacaaggcccaggtgcttgccctgggcccgcggctgccacaagacctgcagctctggtgtaggggcaagtcaaggcccccggcgatggtggggaaggctggagggtttgacagcgagcattgtgtaagagatccgacgtttcctcgaggcaggcggccggacaggcgggtcagagatcaggcaactggacaggcctcagcagagcgggttgtggagatggctgggaagagggggctgagtgtgggcaggtgaggctgatggctgtgggcaggcagggcgggcacggctgtgagaatgagggcaaaggccttgtctagagaacaggaggtttcttctgttctccgctgcatcccccaaggcttgggaggtacccggtaggaactcaatgttccttgtgtggaagagaatcccaggatggcatcagcagcggatgacttccaagaatcatgactcccataactaaccgcgcccccactccccgacaagccccctgagcagctgctgggggtccttgtgtgccacaaaagtacccacccccagttccagacacctgctccttccctctacggatgccctccacccgctccccgctgaggatgatacgtcacgccccacgcacccgagtggattctgcagacacactctgagcaggtgcagggagggccaggacctcccgactgcgggggggccaggcaattgtcagttcttgcatattccagggaaatcatccctgttcccccagaaacctgtagcccagcctggtgagtgtaggaatgccaccttaccgggtcccggttcccggttctccagggaatgccaccttaccctgtcccggttccccagggaatggtccagggttagcccaacagcctagggaggaagaaacacaaaacccagggaggcgatgacctctagggcaattcctttgatgacgttcagtttccatgctaagtgctgtgggcagtgctcgatggctgttaggtgtgtttcgtttctgagtggcatcaaggaatgggagccactttccaagtttgctgacaggaaagtcaggagtggcttcagatcttggtgatgtggtttttgttttgagtggcctgagaagcatgagtctcacagagcgctgatcgataaagcaagaggccttctcccgctgtcccctcgcctctgaataggatgagaagctccctccaagctgagctccctggggagcgagccctggggagcgagaaggcctccctgcagcagcacagtgttcaggagacagacgggcaggaagctgcccgccctcaggggcttggccggctcacagcgctcctaaggcactcagcggcatgaggctggactcagactccccgggctcaaactccaccctgttgtgacgtgggccaggtactgggtgtgcttgcctcaggatccagatctgtcaaatgggggaatgatacctctttcccagcaaggtcggagaatggattaagattcattcacacgtggcctcgtgtgtagtgaggacttcacaaacagcaagcagcggtgactaccctcatcatcacagcttgattctttttttttttttttttttgagacagagtctcgctctgtcacccaggctggagtgcagtggtgcaatctcagcccactgcaacctctgccgcccaggttcaagcgattctcctgcctcagcctcccaagtagctgggactacaggcgcccaccaccatgcccagctaattttttgtatttttagtagagacagggtttcaccgtgttagccaggatggtctcaatctcctggcctcgtgatccacccgcctcggcctcccaaagtgctgggattacaggcgtgagccactgcgcccggcccacagcttgatttttaagtagagagaaatcctctctgagatgtgaaagtcaaacgaatgtggctctcagtgagtcctaggcctcgtggtttggagctggtggctgctcccactgccatctgctaggaatagacctggaagtcaagggcagcttttcggacccggccagagggcagtactcccacagttcgggaggcagggcaggttctcagaaaagagaggctgacagggacgattcccacgtgtagaagcaatctgtgttttgttagaaagttctaggaagagggcctaagatttgacaagccaagagtaagcgggaagccccttattcttcattttgaccagttctgggcaaagacagcccagaccagaggacagccacccaacaccacattttctaggaagtctgaagctcttccaaacaacataaatgtggggagggtaagtctgcagttccaggaaaagcatgggactaacagggcctgagtctacagaggctcaaaggagcggtgtgactttgaaaagccactaaacctctctgtgcttcagctacatgtgtatcagggaccgtgagacccgcttcactgagctcatgaccatgaagggtaaagcagcatcacatgaaagcacagggaaagaatcactggctccaagcagggtggactgcacggaggaagtggcatttcagacaggtctacatggatgaatcagatattgatgggcagagaagaggtggacttggcctgcaggaagatcctaaacacaggaaccgattgtggcccacaaaggttctgtggctgtagtacagggggctggcaacgtggcgggtggctggctcgggaagatgggctgggctctgtttggtggaaggaatttctacctgattccttagggtctggggagccagggtaggtgtcatggaagactagaagaggggatgggctcaggcccgtgtttacagccccccagcttcagggtggaagatggatgtgagggtagacaggaggccaggagtccagcaggggcgcagagaggagtggtggggctccaggaggcagcaggcagtgacactgaggaaggctatggcccatgggggaggccggggctcaggtgggaaaatcataaccaaggtggggaggccgtggttgggagggaggctgtggcccaggtggggaggtagcctttctgactggccctaagtggtcacagcaagatgataagacactgtcatgaacgccagactccccaaggctggcaacaggccccagaacccctgttgtttgttgtggatttgtggtcagggatgtcttatatgtccccagaacacagggcccatgcagtgagggaactgggggctgcacaatcccagaccaggcccagcttggcgacaacagggacccggccgtgacccctcatggccattaatcaccatgcgtggaggagccctcccaggcctctgagaaggggccttggtgagcttccagcgtcaggtgacgaagatggtcagaggccagatggcgagggactgccacactcacgagagctttgccagatccacaaaggggcactgggaggcagtgggcacagcccgggcagacccaggcccagcgacgcctgcacgcagcaggcacatggtgtccatctgtggaatgaacccttggcggatggagggggaagaatgacccgaacctcgccctccagcccctagtccctgcctgtggagtcaaaaggcaggatgggcgctggccagccacatcagctccaaactctttgagatttcaacttttggggcattttacaatctgagcatcttggtgcctatgctccctcgagcctgtcaagcaagtgctcacttcagagatcactccctggcttcatcaggacactgctcaaacggcacctcactactgaggccacccagacacgctgctgtcgccctgtcctccttccctgcgcttgcgctgcacggaacctcagtgagccatgtgtctcccttcctctcacatcagttccagcagggcagagtggacacttacagctggattcccaggccaaccactgtctgccacacccaggcactcgctggatatctggagggtggatgagtggataagaggatgggtggaaggatggatggatggagaaatggatatttggatgggtagatgggtggacatgtggatggatggatatatggatgagtggatattcggataggtggatatttggatgagtagatggatggttatgtggatgggtagatgggtggatgtgtggatggatggttttgtggatgagtggatattcagatgggtaaatatttggatgagtggatggatggttatgtggatggacggatgggtggatatgtggatggatggatatatggagaagtggatatttggatgggtggatggctggatatgtggatggatggatggatggatggatggatggatggatgggtggatggatggatatatgaagaagtggatatttagatgggtggatggatggatagatggatggatggatggatgggtggacggatggatggatatatggagaagtggatatttagatgggtggatggatggatagatggatggatgtatctaaggagaagtggatatttggatgggtggatgggtggatatgtggatggatggatggatagatggatggatgtatatatggagaagtggatatttggatgggtggatgggtggatatgtggatggatggatggatggatggatggatggatggatggatggatatatggagaagtggatatttagatgggtggatgggtggatatgtggatggatggatatatagatgagtagatattcagatgggtggatatttggatgagtggacggatggttatgtggacggatgaatgggtgggtatgtagatggatggatatatagatgagtggatatttggatgggaggatatttggatgagtggatggatggttatgtggatgggtggatatgcggatgggtagatgaatgaatggatgagagaataaatggatgaatggacaagtgaatgaatatgaggccttctgatccaaaagacctgtatactgtgactctaccctgggatgcaatgtacagaatgtatggtccagttagaccaggctcactctacctcagcacaattgacagctgggtcttgctagctccttgctgttggggcggtcctgtgtgccgtgggaggtttacagcatccccgagttgtgacaaccaaagctatctccagactttgccagatgtcttcctgggggtgggggtggggtggcaaaattgcccctggttgagaaccattgaattacacctttactttcaaaaaaagattcttacaaacctcccctgcccgagtcctcaggagggtaactcaatcccatggggacctctcagccaccagagagcaatgcctagaaaccataggctttgccgctgtcatttattattttatcacatatttacattccagtaggcagccagtccccctgtccaacaaggccctttggtcctcactggtcggcctgctccagacccccaggtgcaggcgcgtgtccggagtcgaggctccgcgatgtcagacgttcagcaggaggggccggtgctcctcgtctgcagcgtcgctgggaggaatttcataaatgacaaacagggaggagtacaggcagcccaggaaggacacgaggctggagaagtacatcaccccgttggcactgcccacggccgaggtcaggggccccaggaccagggagaccagaatctgagccaggaagtactggcagctcagcagagagatgtccacgcccatgccccgccgggtgccgtccgcactggaccctgcaaactgacccagaggaagaaacgtgtcagcgagacacgccgcggccagcacggggtgaccgagctcggtgtgtcctgcgagcccaggaggcccgagcggcccacacacagcggcctcacatttttcagcgccaacatgcacagggagttcagccaagagtttaacaatatttgtgttcggagagatgacgacaatgaaaagaatccatgactaatggggcagagggctgagctcccacgggccgaggtggcgggagacactttccccgctcagcacttgagctcttccccatcctctcacccaaagaaaaccaatctgcccagccaggcgaccgctccactcctgccatcccctccttcaccttcatccaggatgggacctgccctacacccccaaagtcctctgcacatgacagccgctggtcctctgtccgaggctccaaggtcctcgtggcctccagcttgggcacgtcactcactctccctcccctgcatgccatgctgggggacagtggctgagagtgtggtctgtgcagagtgacggtggggagcggtggcatggctttccctcactgggctcccccagcaccagccggcctgcaaggtgctgcgtgagtgggcattgctgtgacctgggagcctgggcctcccctgcggcttccccccatcagaagggctgtgctcagggccagcccagctgaacttgtcagactccaaactccctaaaacaaatcaggcccaggcctgggggaggcaactgaggcatgagattaaaagggagagagagaaactcagtaatccaggtcacatttcttttctttctttcttttctcttttcttttttttttttttgagacagggtcttgctctgttgcccaggctggagtgcagtggcacaatctcagcccactgcagcctcagcctcctgggctcaagtgatcctcccacctcagcctcccgagtagctggaactaccggtgcatgccaccacacctggctaatttttaattttatttttttagagatgg

SEQ ID NO: 1560 - DNA, 8183 bp, Homo sapiens
ctccgcgctccggagcctcctcagcctcccgcacaccccgagacgctcgccccgctgggcctcggtccccgcctcctcccccgtccttttcccctctctcgctccccacattgtctctgcctcattttctctcctagttgaggattaaaaaaaaaaaaaaatcaccatcatcctcagggagccccctcgccctcggaaaacaaaaccagacatgatcctgggctcctgcttctgaaagatctgcccgaccgaggaggagggagcctaggttcaagtcgcaggaaaggtcacggcagggaagccccctcagcccctccgcgtcgcctccccgcgggccgcccctctcggccctgcgccccgcggccccgcagcctccgcgcggcctcccgccccatccccgccactttccccggagctgggccgcgaacacctcactattgatggtgtagcgctttaggggaaggaggtgattgtctaggagtaactgtatgtgcgctcagcaccgggtcacaaccaccgtgggatccacttacagagaagatttgtggagagcttcagcctgtttatggtgttactgagaaaggaattgtggccatttgatataattctggatggaagacctcttatttgtattacattgaattagagcatttttgaaacgttggggttgttggagtggttggattttccctggaattgagtgagaaattcagaagactgaagcccaggcttactgtctacctttcacggaggcctagccgtgagaggacagaagaaggcacgtggcgaatcatgacagcggacaaagacaaagacaaagacaaagagaaggaccgggaccgagaccgggaccgagagagagagaaaagagacaaagcaagagagagtgagaattcaaggccacgccggagctgtaccttggaaggaggagccaaaaattatgctgagagtgatcacagtgaagacgaggacaatgacaacaatagtgccaccgcagaggagtccacgaagaagaataagaagaaaccaccgaaaaaaaagtctcgttatgaaaggacagataccggtgagataacatcctacatcactgaagatgatgtggtctacagaccaggagactgtgtgtatatcgagagtcggaggccaaacacaccgtatttcatctgtagcattcaagacttcaaactggtccacaactcccaggcctgttgcagatctccaactcctgctttgtgtgaccccccagcatgctctctgccggtggcatcacagccaccacagcatctttctgaagccgggagagggcctgtagggagtaagagggaccatctcctcatgaacgtcaaatggtactaccgtcaatctgaggttccagattctgtgtatcagcatttggttcaggatcgacataatgaaaatgactctggaagagaacttgtcattacagacccagttatcaagaaccgagagctcttcatttctgattacgttgacacttaccatgctgctgcccttagagggaagtgtaacatctcccatttttctgacatatttgctgctagagagtttaaagcccgagtggattcatttttctacatattaggatataaccctgagacaaggaggctgaacagtacccagggggagattcgtgtcggtcctagtcatcaggccaaacttccagatctgcaaccatttccttctccagatggtgatacagtgacccaacatgaggaactggtctggatgcctggagttaacgactgtgacctccttatgtacttgagggcagcaaggagcatggcggcatttgcaggaatgtgtgatggaggctctacagaggacggctgtgtcgcagcctctcgggatgacaccactctgaatgcactgaacacactgcatgaaagcggttacgatgctggcaaagccctgcagcgcctggtgaagaagcctgtgcccaagctcatcgagaagtgctggaccgaggacgaagtgaaacgcttcgttaagggactcaggcagtacgggaagaacttcttcagaattagaaaggagctgcttcccaataaggaaacaggggagctgatcaccttctattactattggaagaagacccccgaagcagccagctcccgagcccatcgtaggcaccgcaggcaggccgtgttcaggaggattaagactcgcaccgcgtccacacccgtcaacacaccctccagacccccgtccagtgaattcttggacctaagttcagccagtgaagatgacttcgacagtgaggacagtgagcaggagctgaaggggtacgcctgccgccactgcttcaccaccacctccaaagattggcaccacggaggccgggagaacatcctgctttgcaccgactgtcgcatccacttcaagaaatacggtgagctcccgcccattgagaagcccgtggacccgccaccgtttatgttcaaacccgtcaaggaagaggatgatgggctcagtgggaagcatagcatgaggacacggcggagtcggggctcgatgtcgacactacgcagtggtcggaagaagcagccagccagccctgatggtcgcacctcacccatcaatgaagacatccgctccagcggccggaactcccccagcgctgccagtacctccagcaatgacagtaaagcagagacagtgaagaagtcggccaagaaggtgaaggaggaagcctcttcccctcttaagagtaacaaacgccagcgggagaaggtggcctctgatacggaggaggctgacaggaccagctccaagaagacaaaaacgcaggagatcagcaggcccaactcgccatctgaaggtgagggagagagttcagacagtcgcagcgtcaacgatgagggtagcagtgaccccaaagacatcgaccaggacaatcgcagcacgtccccgagcatccccagcccccaggacaatgagagtgactcggactcgtcagcccagcagcagatgctgcaggcccagcccccagccttgcaggctcccactggggtcaccccagctccctcctcagctcctccagggacccctcagctgcccacgccagggcccacgccctctgccactgcagttcccccacagggctcccccacggcctcccaggcccctaaccagccacaggctcccacagcgcctgttccccacacccacatccaacaggcaccggccttgcacccccagcggccgccctcaccgcatcccccgccgcatccctcgccacatcccccgctgcagcctctgactgggtcggcgggccagccttctgcaccctctcatgcccagcccccactgcacggtcagggcccacccggccctcacagcctgcaggctgggcccctgctgcagcacccaggccccccacagccctttggcctccctccccaggcctcccaaggccaggcccctctggggacctccccagcagcagcgtaccctcacacctccctgcagctgccagcctctcagtcagcgctgcagtcccaacagcctccacgggagcagcccctgccaccagcgcccttggccatgccccacatcaagcccccgcctaccactcccatcccccagctgccggcgccacaggcccacaagcaccctccccacctctcggggccctcacccttctccatgaatgccaacctgcctccccctccagccctgaagcccctgagctccctgtccacacatcaccccccgtcggctcaccccccacccctgcaactcatgcctcagagccagccattgccctcctcgcccgcccagccccccgggctgacccagagccagaacctgcccccgccccctgcctcccacccccctacaggcctccaccaggtggccccccaacccccgtttgctcagcacccctttgtccctggaggccctcctcccatcacccctccgacctgcccctccacctctaccccaccggcgggacctggcacctcggcccagccaccctgctctggtgcggcggcttcaggaggcagcatagcgggggggtcgtcctgcccactccccaccgtccagatcaaggaggaggctctggacgacgctgaggagcctgagagcccccctcccccaccaaggagcccgtccccggagcccactgtggtggacacccccagtcacgccagccagtcagctaggttctacaaacacctggaccggggctacaactcgtgtgcccggacagacctgtacttcatgcctctggccgggtccaagctggccaagaagagggaggaggccattgagaaggccaagcgcgaggctgagcagaaagcccgagaggagcgagagcgggagaaggagaaggagaaggagcgggagcgggagcgagagcgggagcgcgaggcagagcgggcggctaaggcgtccagctcagcgcatgaaggtcgcctcagtgacccacagctcagtggtcctggccacatgcggccatccttcgagccaccaccaaccaccattgctgctgtgcccccctacatcgggcccgacacacctgcccttcggactctgagcgagtacgcccggccccacgtcatgtcgcccaccaaccgcaaccaccccttctacatgccccttaaccccacggaccccctgctggcctaccacatgcctggcctctacaacgtcgaccccaccatccgcgagcgggagctccgggagcgggagatccgagagcgggagatccgggagcgtgagctgcgggagaggatgaagccgggcttcgaggtgaagcccccagagctggaccccctgcacccagccgccaaccccatggagcactttgcccggcacagcgccctcaccatccccccgaccgccgggccccacccttttgcttctttccacccgggcctgaaccccttggagagggagagactggccctggcgggcccccagctgcggcccgagatgagctaccctgacagactggcagccgagcgtatccacgcagagcgcatggcatcgctgaccagcgatcccctggcccgactgcagatgttcaacgtgactccgcaccatcaccagcactctcacattcactcccacctccacctccaccagcaggaccccctccaccaaggttcagcaggccccgttcacccgctggtcgaccccctgactgccggtccccacctggctcgcttcccctacccgcctggcactctccccaaccctctgcttggacagcccccacacgagcacgagatgcttcgccacccagttttcggcaccccctacccccgtgacctgcctggggccatcccaccccccatgtcagcagcccaccagctgcaggccatgcatgcccagtcggccgagctgcagagactggccatggagcagcagtggctgcatggacacccccacatgcatggtggccacctaccaagtcaggaagattattacagtcgactgaagaaagaaggtgacaagcagttataagttatttatttgttaacgctggctgtggaaaccccagttcttggggggagaaacaggactttttacataaaataggagctgcaaaagcaaaaagaatatcttctaaagatttctttatatatttaaaaacccacaactaaaaatgtatccacatagtagtgttcgtttgtcgagaggatttcctgagactggtttggatctccctgcatgacagtcccccagaaacttagtgagtcctggactggactgaacatccagaaagcttccctgcaatcttggggtttggctttagttttcttttccttgatttctcagtaggtgctagaatccagttcacacccttcactgtgcgtgcagacacactgacacactccgccacgagtgctccagagcccacgaggcttgcagatcgggggcataggaatttggaatccaagagctataatttttaaaaaaaaaaatcttttattttaatacattgtaggaaatcttcataattggagaaagttctgcagcatggctttttacgtctgtaaataaataattttagaacagcctttttttcttccataaactactattgtgatctattttttccagccatgtcactaattgtgaattcctaccaactattgacagaatacagagttgattttttaataaaaagttatatataattatccctttaattaaagggagcaaaggggcgttccacatggacagaggcttggaccgaggcctggtcacagcagcgagcatccagggtttgcagggacgatgttacagactctgttttctgcctggcgtttcacttgtgtctgctcctagcctgtgctctgccagcagcacagacatctgctccatcagacctcttccattttgcacagggagtgcaggaggtgaatgttcactttctgttctccagtgtcactgttctgtttccacgggatggaaagcgcatgggcctgtgtccattgtagatttccttctagatttctgtgtacacacacttgattgttctggatgaatgtcttttttaatactccgaaaatttcatcatctaagaaaatgattccatacaaataactcagcacacaagtgacccaggacatatgcctgccaaagggatgtgttagaaggctgccttctcatgcgcattgtcacttggatcttgtggtgaggacggccccatctttcttgccacagattgaggccacttttgagcaagggagatcctggagttaagacaggtgttgggggcagcctgtattttaccctaggggcaggtctgcatggtgaccccacattgcactggtaaaccatttgagtcccactcttcatcctggaagtgggaactggagtcccacccacagtgcattcagaaagcatgctgtgtgggggctgcttctcaggaggccaggcccttctgagcggaaccgtcctggagagagcctgccctcgtttccaggctgcagccgtaacgcactttctcccaggctgagggcgggtgttctggggtgtctgccctctgtcggccctgcttcctgccaggacgtggcctcttccgatccttttctctcagacactggaggtctcttctgccattgtgctggtcccatcccaagaattgtaggacagagaccacactgggtcggcggacacaaagtccatccaggacccaggccgcagagggagcaggaagagatgctgatagtttgatctagaaaccagcagctactggctcaaattcaggttctggcgtcaaatagcgacatttccagtttctcttaaaaaccgtgtttggtttcagttgggataggcttgttttgtctgttgaaaatgtttctagttttttttctttcatttttctctcattccatttctgccttaactttagtttgttcacagggaggcaaagctgacatgaaccttttgtcgtgggacttcaggccacattggcttgaaggcattcgtttccttctggggtggggacaggccctcatggcaggcttgttcccgtggctctgagcgaggcctcttcctgctgggctcccagactcctgcatccaggcccccaccttctcggcttctggtttttctttctttttggtagaacacaacatctaccattcagttaaaccttctttatctcctcctttggcatccatttttccaaagaagagtcgagtcctctgaggtctgtgcttgaaagccgtccgaaggcattcttgttagctttgcttttctccccatatcccaaggcgaagcgctgagattcttccatctaaaaaaccctcgacccgaaaccctcaccagataaactacagtttgtttaggaggccctgaccttcatggtgtctttgaagcccaaccactcggtttccttcggattttcctccctttgttcggggtttggtttggctcctctgtgtgtgtccgtatcttgttcggtgtcctcgaggttgagcttcactccactgcggcagaggcagcgtgcacactcggatttgctacgtttctatatatcttgaagctaaatgtatatatgagtagtttgccatgagataacacagtgtaaacagtagacacccagaaatcgtgacttctgtgttctctccatttgagtattttgtaatttttttgaaatatttgtggacataaataaaaccaagctacactacaacccttgg

SEQ ID NO: 1561 - protein, 1556 aa, Homo sapiens
MTADKDKDKDKEKDRDRDRDREREKRDKARESENSRPRRSCTLEGGAKNYAESDHSEDEDNDNNSATAEESTKKNKKKPPKKKSRYERTDTGEITSYITEDDVVYRPGDCVYIESRRPNTPYFICSIQDFKLVHNSQACCRSPTPALCDPPACSLPVASQPPQHLSEAGRGPVGSKRDHLLMNVKWYYRQSEVPDSVYQHLVQDRHNENDSGRELVITDPVIKNRELFISDYVDTYHAAALRGKCNISHFSDIFAAREFKARVDSFFYILGYNPETRRLNSTQGEIRVGPSHQAKLPDLQPFPSPDGDTVTQHEELVWMPGVNDCDLLMYLRAARSMAAFAGMCDGGSTEDGCVAASRDDTTLNALNTLHESGYDAGKALQRLVKKPVPKLIEKCWTEDEVKRFVKGLRQYGKNFFRIRKELLPNKETGELITFYYYWKKTPEAASSRAHRRHRRQAVFRRIKTRTASTPVNTPSRPPSSEFLDLSSASEDDFDSEDSEQELKGYACRHCFTTTSKDWHHGGRENILLCTDCRIHFKKYGELPPIEKPVDPPPFMFKPVKEEDDGLSGKHSMRTRRSRGSMSTLRSGRKKQPDDGRTSPINEDIRSSGRNSPSAASTSSNDSKAETVKKSAKKVKEEASSPLKSNKRQREKVASDTEEADRTSSKKTKTQEISRPNSPSEGEGESSDSRSVNDEGSSDPKDIDQDNRSTSPSIPSPQDNESDSDSSAQQQMLQAQPPALQAPTGVTPAPSSAPPGTPQLPTPGPTPSATAVPPQGSPTASQAPNQPQAPTAPVPHTHIQQAPALHPQRPPSPHPPPHPSPHPPLQPLTGSAGQPSAPSHAQPPLHGQGPPGPHSLQAGPLLQHPGPPQPFGLPPQASQGQAPLGTSPAAAYPHTSLQLPASQSALQSQQPPREQPLPPAPLAMPHIKPPPTTPIPQLPAPQAHKHPPHLSGPSPFSMNANLPPPPALKPLSSLSTHHPPSAHPPPLQLMPQSQPLPSSPAQPPGLTQSQNLPPPPASHPPTGLHQVAPQPPFAQHPFVPGGPPPITPPTCPSTSTPPAGPGTSAQPPCSGAAASGGSIAGGSSCPLPTVQIKEEALDDAEEPESPPPPPRSPSPEPTVVDTPSHASQSARFYKHLDRGYNSCARTDLYFMPLAGSKLAKKREEAIEKAKREAEQKAREEREREKEKEKEREREREREREAERAAKASSSAHEGRLSDPQLSGPGHMRPSFEPPPTTIAAVPPYIGPDTPALRTLSEYARPHVMSPTNRNHPFYMPLNPTDPLLAYHMPGNVDPTIRERELREREIREREIRERELRERMKPGFEVKPPELDPLHPAANPMEHFARHSALTIPPTAGPHPFASFHPQPLERERLAGPQLRPEMSYPDRLAAERIHAERMASLTSDPLARLQMFNVTPHHHQHSHIHSHLHLHQQDPLHQGSAGPVHPLVDPLTAGPHLARFPYPPGTLPNPLLGQPFHEMLRHPVFGTPYPRDLPGAIPPPMSAAHQLQAMHAQSAELQRLAMEQQWLHGHPHMHGGHLPSQEDYYSRLKKEGDKQL

SEQ ID NO: 1562 - DNA, 6375 bp, Homo sapiens
gagccggagcccagtgacaggcgacggcctcttgccgccccggaccccgggcgcttacctgtggctgctggggtcggccgcccgggaccaggctgggagccccgagggttcccttctggagaagagtcaccgggtttggttctgtttcccctttctgctcgacacttctgggaagcttggttctcagaaacgcttcgttaagggactcaggcagtacgggaagaacttcttcagaattagaaaggagctgcttcccaataaggaaacaggggagctgatcaccttctattactattggaagaagacccccgaagcagccagctcccgagcccatcgtaggcaccgcaggcaggccgtgttcaggaggattaagactcgcaccgcgtccacacccgtcaacacaccctccagacccccgtccagtgaattcttggacctaagttcagccagtgaagatgacttcgacagtgaggacagtgagcaggagctgaaggggtacgcctgccgccactgcttcaccaccacctccaaagattggcaccacggaggccgggagaacatcctgctttgcaccgactgtcgcatccacttcaagaaatacggtgagctcccgcccattgagaagcccgtggacccgccaccgtttatgttcaaacccgtcaaggaagaggatgatgggctcagtgggaagcatagcatgaggacacggcggagtcggggctcgatgtcgacactacgcagtggtcggaagaagcagccagccagccctgatggtcgcacctcacccatcaatgaagacatccgctccagcggccggaactcccccagcgctgccagtacctccagcaatgacagtaaagcagagacagtgaagaagtcggccaagaaggtgaaggaggaagcctcttcccctcttaagagtaacaaacgccagcgggagaaggtggcctctgatacggaggaggctgacaggaccagctccaagaagacaaaaacgcaggagatcagcaggcccaactcgccatctgaaggtgagggagagagttcagacagtcgcagcgtcaacgatgagggtagcagtgaccccaaagacatcgaccaggacaatcgcagcacgtccccgagcatccccagcccccaggacaatgagagtgactcggactcgtcagcccagcagcagatgctgcaggcccagcccccagccttgcaggctcccactggggtcaccccagctccctcctcagctcctccagggacccctcagctgcccacgccagggcccacgccctctgccactgcagttcccccacagggctcccccacggcctcccaggcccctaaccagccacaggctcccacagcgcctgttccccacacccacatccaacaggcaccggccttgcacccccagcggccgccctcaccgcatcccccgccgcatccctcgccacatcccccgctgcagcctctgactgggtcggcgggccagccttctgcaccctctcatgcccagcccccactgcacggtcagggcccacccggccctcacagcctgcaggctgggcccctgctgcagcacccaggccccccacagccctttggcctccctccccaggcctcccaaggccaggcccctctggggacctccccagcagcagcgtaccctcacacctccctgcagctgccagcctctcagtcagcgctgcagtcccaacagcctccacgggagcagcccctgccaccagcgcccttggccatgccccacatcaagcccccgcctaccactcccatcccccagctgccggcgccacaggcccacaagcaccctccccacctctcggggccctcacccttctccatgaatgccaacctgcctccccctccagccctgaagcccctgagctccctgtccacacatcaccccccgtcggctcaccccccacccctgcaactcatgcctcagagccagccattgccctcctcgcccgcccagccccccgggctgacccagagccagaacctgcccccgccccctgcctcccacccccctacaggcctccaccaggtggccccccaacccccgtttgctcagcacccctttgtccctggaggccctcctcccatcacccctccgacctgcccctccacctctaccccaccggcgggacctggcacctcggcccagccaccctgctctggtgcggcggcttcaggaggcagcatagcgggggggtcgtcctgcccactccccaccgtccagatcaaggaggaggctctggacgacgctgaggagcctgagagcccccctcccccaccaaggagcccgtccccggagcccactgtggtggacacccccagtcacgccagccagtcagctaggttctacaaacacctggaccggggctacaactcgtgtgcccggacagacctgtacttcatgcctctggccgggtccaagctggccaagaagagggaggaggccattgagaaggccaagcgcgaggctgagcagaaagcccgagaggagcgagagcgggagaaggagaaggagaaggagcgggagcgggagcgagagcgggagcgcgaggcagagcgggcggctaaggcgtccagctcagcgcatgaaggtcgcctcagtgacccacagctcagtggtcctggccacatgcggccatccttcgagccaccaccaaccaccattgctgctgtgcccccctacatcgggcccgacacacctgcccttcggactctgagcgagtacgcccggccccacgtcatgtcgcccaccaaccgcaaccaccccttctacatgccccttaaccccacggaccccctgctggcctaccacatgcctggcctctacaacgtcgaccccaccatccgcgagcgggagctccgggagcgggagatccgagagcgggagatccgggagcgtgagctgcgggagaggatgaagccgggcttcgaggtgaagcccccagagctggaccccctgcacccagccgccaaccccatggagcactttgcccggcacagcgccctcaccatccccccgaccgccgggccccacccttttgcttctttccacccgggcctgaaccccttggagagggagagactggccctggcgggcccccagctgcggcccgagatgagctaccctgacagactggcagccgagcgtatccacgcagagcgcatggcatcgctgaccagcgatcccctggcccgactgcagatgttcaacgtgactccgcaccatcaccagcactctcacattcactcccacctccacctccaccagcaggaccccctccaccaaggttcagcaggccccgttcacccgctggtcgaccccctgactgccggtccccacctggctcgcttcccctacccgcctggcactctccccaaccctctgcttggacagcccccacacgagcacgagatgcttcgccacccagttttcggcaccccctacccccgtgacctgcctggggccatcccaccccccatgtcagcagcccaccagctgcaggccatgcatgcccagtcggccgagctgcagagactggccatggagcagcagtggctgcatggacacccccacatgcatggtggccacctaccaagtcaggaagattattacagtcgactgaagaaagaaggtgacaagcagttataagttatttatttgttaacgctggctgtggaaaccccagttcttggggggagaaacaggactttttacataaaataggagctgcaaaagcaaaaagaatatcttctaaagatttctttatatatttaaaaacccacaactaaaaatgtatccacatagtagtgttcgtttgtcgagaggatttcctgagactggtttggatctccctgcatgacagtcccccagaaacttagtgagtcctggactggactgaacatccagaaagcttccctgcaatcttggggtttggctttagttttcttttccttgatttctcagtaggtgctagaatccagttcacacccttcactgtgcgtgcagacacactgacacactccgccacgagtgctccagagcccacgaggcttgcagatcgggggcataggaatttggaatccaagagctataatttttaaaaaaaaaaatcttttattttaatacattgtaggaaatcttcataattggagaaagttctgcagcatggctttttacgtctgtaaataaataattttagaacagcctttttttcttccataaactactattgtgatctattttttccagccatgtcactaattgtgaattcctaccaactattgacagaatacagagttgattttttaataaaaagttatatataattatccctttaattaaagggagcaaaggggcgttccacatggacagaggcttggaccgaggcctggtcacagcagcgagcatccagggtttgcagggacgatgttacagactctgttttctgcctggcgtttcacttgtgtctgctcctagcctgtgctctgccagcagcacagacatctgctccatcagacctcttccattttgcacagggagtgcaggaggtgaatgttcactttctgttctccagtgtcactgttctgtttccacgggatggaaagcgcatgggcctgtgtccattgtagatttccttctagatttctgtgtacacacacttgattgttctggatgaatgtcttttttaatactccgaaaatttcatcatctaagaaaatgattccatacaaataactcagcacacaagtgacccaggacatatgcctgccaaagggatgtgttagaaggctgccttctcatgcgcattgtcacttggatcttgtggtgaggacggccccatctttcttgccacagattgaggccacttttgagcaagggagatcctggagttaagacaggtgttgggggcagcctgtattttaccctaggggcaggtctgcatggtgaccccacattgcactggtaaaccatttgagtcccactcttcatcctggaagtgggaactggagtcccacccacagtgcattcagaaagcatgctgtgtgggggctgcttctcaggaggccaggcccttctgagcggaaccgtcctggagagagcctgccctcgtttccaggctgcagccgtaacgcactttctcccaggctgagggcgggtgttctggggtgtctgccctctgtcggccctgcttcctgccaggacgtggcctcttccgatccttttctctcagacactggaggtctcttctgccattgtgctggtcccatcccaagaattgtaggacagagaccacactgggtcggcggacacaaagtccatccaggacccaggccgcagagggagcaggaagagatgctgatagtttgatctagaaaccagcagctactggctcaaattcaggttctggcgtcaaatagcgacatttccagtttctcttaaaaaccgtgtttggtttcagttgggataggcttgttttgtctgttgaaaatgtttctagttttttttctttcatttttctctcattccatttctgccttaactttagtttgttcacagggaggcaaagctgacatgaaccttttgtcgtgggacttcaggccacattggcttgaaggcattcgtttccttctggggtggggacaggccctcatggcaggcttgttcccgtggctctgagcgaggcctcttcctgctgggctcccagactcctgcatccaggcccccaccttctcggcttctggtttttctttctttttggtagaacacaacatctaccattcagttaaaccttctttatctcctcctttggcatccatttttccaaagaagagtcgagtcctctgaggtctgtgcttgaaagccgtccgaaggcattcttgttagctttgcttttctccccatatcccaaggcgaagcgctgagattcttccatctaaaaaaccctcgacccgaaaccctcaccagataaactacagtttgtttaggaggccctgaccttcatggtgtctttgaagcccaaccactcggtttccttcggattttcctccctttgttcggggtttggtttggctcctctgtgtgtgtccgtatcttgttcggtgtcctcgaggttgagcttcactccactgcggcagaggcagcgtgcacactcggatttgctacgtttctatatatcttgaagctaaatgtatatatgagtagtttgccatgagataacacagtgtaaacagtagacacccagaaatcgtgacttctgtgttctctccatttgagtattttgtaatttttttgaaatatttgtggacataaataaaaccaagctacactacaacccttgg

SEQ ID NO: 1563 - protein, 1002 aa, Homo sapiens
MFKPVKEEDDGLSGKHSMRTRRSRGSMSTLRSGRKKQPDDGRTSPINEDIRSSGRNSPSAASTSSNDSKAETVKKSAKKVKEEASSPLKSNKRQREKVASDTEEADRTSSKKTKTQEISRPNSPSEGEGESSDSRSVNDEGSSDPKDIDQDNRSTSPSIPSPQDNESDSDSSAQQQMLQAQPPALQAPTGVTPAPSSAPPGTPQLPTPGPTPSATAVPPQGSPTASQAPNQPQAPTAPVPHTHIQQAPALHPQRPPSPHPPPHPSPHPPLQPLTGSAGQPSAPSHAQPPLHGQGPPGPHSLQAGPLLQHPGPPQPFGLPPQASQGQAPLGTSPAAAYPHTSLQLPASQSALQSQQPPREQPLPPAPLAMPHIKPPPTTPIPQLPAPQAHKHPPHLSGPSPFSMNANLPPPPALKPLSSLSTHHPPSAHPPPLQLMPQSQPLPSSPAQPPGLTQSQNLPPPPASHPPTGLHQVAPQPPFAQHPFVPGGPPPITPPTCPSTSTPPAGPGTSAQPPCSGAAASGGSIAGGSSCPLPTVQIKEEALDDAEEPESPPPPPRSPSPEPTVVDTPSHASQSARFYKHLDRGYNSCARTDLYFMPLAGSKLAKKREEAIEKAKREAEQKAREEREREKEKEKEREREREREREAERAAKASSSAHEGRLSDPQLSGPGHMRPSFEPPPTTIAAVPPYIGPDTPALRTLSEYARPHVMSPTNRNHPFYMPLNPTDPLLAYHMPGNVDPTIRERELREREIREREIRERELRERMKPGFEVKPPELDPLHPAANPMEHFARHSALTIPPTAGPHPFASFHPQPLERERLAGPQLRPEMSYPDRLAAERIHAERMASLTSDPLARLQMFNVTPHHHQHSHIHSHLHLHQQDPLHQGSAGPVHPLVDPLTAGPHLARFPYPPGTLPNPLLGQPFHEMLRHPVFGTPYPRDLPGAIPPPMSAAHQLQAMHAQSAELQRLAMEQQWLHGHPHMHGGHLPSQEDYYSRLKKEGDKQL

SEQ ID NO: 1564 - DNA, 6716 bp, Homo sapiens
agggtcacagcacatgctcagtcctgtcagagtgaggggaagtttctgcgttctgcgtgaaggcttaggtcatagcacaagctcagtgaaagctctatgaggtctctgagactgcatgtgcctccattttgagttgttagtgtagaaaagggcagagttttagcagaaagtaaaggttcaggaatccagctagactcaccagagcccgtgttagtcatggatgatccattcagcccctgcaggaggctgaacagtacccagggggagattcgtgtcggtcctagtcatcaggccaaacttccagatctgcaaccatttccttctccagatggtgatacagtgacccaacatgaggaactggtctggatgcctggagttaacgactgtgacctccttatgtacttgagggcagcaaggagcatggcggcatttgcaggaatgtgtgatggaggctctacagaggacggctgtgtcgcagcctctcgggatgacaccactctgaatgcactgaacacactgcatgaaagcggttacgatgctggcaaagccctgcagcgcctggtgaagaagcctgtgcccaagctcatcgagaagtgctggaccgaggacgaagtgaaacgcttcgttaagggactcaggcagtacgggaagaacttcttcagaattagaaaggagctgcttcccaataaggaaacaggggagctgatcaccttctattactattggaagaagacccccgaagcagccagctcccgagcccatcgtaggcaccgcaggcaggccgtgttcaggaggattaagactcgcaccgcgtccacacccgtcaacacaccctccagacccccgtccagtgaattcttggacctaagttcagccagtgaagatgacttcgacagtgaggacagtgagcaggagctgaaggggtacgcctgccgccactgcttcaccaccacctccaaagattggcaccacggaggccgggagaacatcctgctttgcaccgactgtcgcatccacttcaagaaatacggtgagctcccgcccattgagaagcccgtggacccgccaccgtttatgttcaaacccgtcaaggaagaggatgatgggctcagtgggaagcatagcatgaggacacggcggagtcggggctcgatgtcgacactacgcagtggtcggaagaagcagccagccagccctgatggtcgcacctcacccatcaatgaagacatccgctccagcggccggaactcccccagcgctgccagtacctccagcaatgacagtaaagcagagacagtgaagaagtcggccaagaaggtgaaggaggaagcctcttcccctcttaagagtaacaaacgccagcgggagaaggtggcctctgatacggaggaggctgacaggaccagctccaagaagacaaaaacgcaggagatcagcaggcccaactcgccatctgaaggtgagggagagagttcagacagtcgcagcgtcaacgatgagggtagcagtgaccccaaagacatcgaccaggacaatcgcagcacgtccccgagcatccccagcccccaggacaatgagagtgactcggactcgtcagcccagcagcagatgctgcaggcccagcccccagccttgcaggctcccactggggtcaccccagctccctcctcagctcctccagggacccctcagctgcccacgccagggcccacgccctctgccactgcagttcccccacagggctcccccacggcctcccaggcccctaaccagccacaggctcccacagcgcctgttccccacacccacatccaacaggcaccggccttgcacccccagcggccgccctcaccgcatcccccgccgcatccctcgccacatcccccgctgcagcctctgactgggtcggcgggccagccttctgcaccctctcatgcccagcccccactgcacggtcagggcccacccggccctcacagcctgcaggctgggcccctgctgcagcacccaggccccccacagccctttggcctccctccccaggcctcccaaggccaggcccctctggggacctccccagcagcagcgtaccctcacacctccctgcagctgccagcctctcagtcagcgctgcagtcccaacagcctccacgggagcagcccctgccaccagcgcccttggccatgccccacatcaagcccccgcctaccactcccatcccccagctgccggcgccacaggcccacaagcaccctccccacctctcggggccctcacccttctccatgaatgccaacctgcctccccctccagccctgaagcccctgagctccctgtccacacatcaccccccccagaacctgcccccgccccctgcctcccacccccctacaggcctccaccaggtggccccccaacccccgtttgctcagcacccctttgtccctggaggccctcctcccatcacccctccgacctgcccctccacctctaccccaccggcgggacctggcacctcggcccagccaccctgctctggtgcggcggcttcaggaggcagcatagcgggggggtcgtcctgcccactccccaccgtccagatcaaggaggaggctctggacgacgctgaggagcctgagagcccccctcccccaccaaggagcccgtccccggagcccactgtggtggacacccccagtcacgccagccagtcagctaggttctacaaacacctggaccggggctacaactcgtgtgcccggacagacctgtacttcatgcctctggccgggtccaagctggccaagaagagggaggaggccattgagaaggccaagcgcgaggctgagcagaaagcccgagaggagcgagagcgggagaaggagaaggagaaggagcgggagcgggagcgagagcgggagcgcgaggcagagcgggcggctaaggcgtccagctcagcgcatgaaggtcgcctcagtgacccacagctcagtggtcctggccacatgcggccatccttcgagccaccaccaaccaccattgctgctgtgcccccctacatcgggcccgacacacctgcccttcggactctgagcgagtacgcccggccccacgtcatgtcgcccaccaaccgcaaccaccccttctacatgccccttaaccccacggaccccctgctggcctaccacatgcctggcctctacaacgtcgaccccaccatccgcgagcgggagctccgggagcgggagatccgagagcgggagatccgggagcgtgagctgcgggagaggatgaagccgggcttcgaggtgaagcccccagagctggaccccctgcacccagccgccaaccccatggagcactttgcccggcacagcgccctcaccatccccccgaccgccgggccccacccttttgcttctttccacccgggcctgaaccccttggagagggagagactggccctggcgggcccccagctgcggcccgagatgagctaccctgacagactggcagccgagcgtatccacgcagagcgcatggcatcgctgaccagcgatcccctggcccgactgcagatgttcaacgtgactccgcaccatcaccagcactctcacattcactcccacctccacctccaccagcaggaccccctccaccaaggttcagcaggccccgttcacccgctggtcgaccccctgactgccggtccccacctggctcgcttcccctacccgcctggcactctccccaaccctctgcttggacagcccccacacgagcacgagatgcttcgccacccagttttcggcaccccctacccccgtgacctgcctggggccatcccaccccccatgtcagcagcccaccagctgcaggccatgcatgcccagtcggccgagctgcagagactggccatggagcagcagtggctgcatggacacccccacatgcatggtggccacctaccaagtcaggaagattattacagtcgactgaagaaagaaggtgacaagcagttataagttatttatttgttaacgctggctgtggaaaccccagttcttggggggagaaacaggactttttacataaaataggagctgcaaaagcaaaaagaatatcttctaaagatttctttatatatttaaaaacccacaactaaaaatgtatccacatagtagtgttcgtttgtcgagaggatttcctgagactggtttggatctccctgcatgacagtcccccagaaacttagtgagtcctggactggactgaacatccagaaagcttccctgcaatcttggggtttggctttagttttcttttccttgatttctcagtaggtgctagaatccagttcacacccttcactgtgcgtgcagacacactgacacactccgccacgagtgctccagagcccacgaggcttgcagatcgggggcataggaatttggaatccaagagctataatttttaaaaaaaaaaatcttttattttaatacattgtaggaaatcttcataattggagaaagttctgcagcatggctttttacgtctgtaaataaataattttagaacagcctttttttcttccataaactactattgtgatctattttttccagccatgtcactaattgtgaattcctaccaactattgacagaatacagagttgattttttaataaaaagttatatataattatccctttaattaaagggagcaaaggggcgttccacatggacagaggcttggaccgaggcctggtcacagcagcgagcatccagggtttgcagggacgatgttacagactctgttttctgcctggcgtttcacttgtgtctgctcctagcctgtgctctgccagcagcacagacatctgctccatcagacctcttccattttgcacagggagtgcaggaggtgaatgttcactttctgttctccagtgtcactgttctgtttccacgggatggaaagcgcatgggcctgtgtccattgtagatttccttctagatttctgtgtacacacacttgattgttctggatgaatgtcttttttaatactccgaaaatttcatcatctaagaaaatgattccatacaaataactcagcacacaagtgacccaggacatatgcctgccaaagggatgtgttagaaggctgccttctcatgcgcattgtcacttggatcttgtggtgaggacggccccatctttcttgccacagattgaggccacttttgagcaagggagatcctggagttaagacaggtgttgggggcagcctgtattttaccctaggggcaggtctgcatggtgaccccacattgcactggtaaaccatttgagtcccactcttcatcctggaagtgggaactggagtcccacccacagtgcattcagaaagcatgctgtgtgggggctgcttctcaggaggccaggcccttctgagcggaaccgtcctggagagagcctgccctcgtttccaggctgcagccgtaacgcactttctcccaggctgagggcgggtgttctggggtgtctgccctctgtcggccctgcttcctgccaggacgtggcctcttccgatccttttctctcagacactggaggtctcttctgccattgtgctggtcccatcccaagaattgtaggacagagaccacactgggtcggcggacacaaagtccatccaggacccaggccgcagagggagcaggaagagatgctgatagtttgatctagaaaccagcagctactggctcaaattcaggttctggcgtcaaatagcgacatttccagtttctcttaaaaaccgtgtttggtttcagttgggataggcttgttttgtctgttgaaaatgtttctagttttttttctttcatttttctctcattccatttctgccttaactttagtttgttcacagggaggcaaagctgacatgaaccttttgtcgtgggacttcaggccacattggcttgaaggcattcgtttccttctggggtggggacaggccctcatggcaggcttgttcccgtggctctgagcgaggcctcttcctgctgggctcccagactcctgcatccaggcccccaccttctcggcttctggtttttctttctttttggtagaacacaacatctaccattcagttaaaccttctttatctcctcctttggcatccatttttccaaagaagagtcgagtcctctgaggtctgtgcttgaaagccgtccgaaggcattcttgttagctttgcttttctccccatatcccaaggcgaagcgctgagattcttccatctaaaaaaccctcgacccgaaaccctcaccagataaactacagtttgtttaggaggccctgaccttcatggtgtctttgaagcccaaccactcggtttccttcggattttcctccctttgttcggggtttggtttggctcctctgtgtgtgtccgtatcttgttcggtgtcctcgaggttgagcttcactccactgcggcagaggcagcgtgcacactcggatttgctacgtttctatatatcttgaagctaaatgtatatatgagtagtttgccatgagataacacagtgtaaacagtagacacccagaaatcgtgacttctgtgttctctccatttgagtattttgtaatttttttgaaatatttgtggacataaataaaaccaagctacactacaacccttgg

SEQ ID NO: 1565 - protein, 1259 aa, Homo sapiens
MDDPFSPCRRLNSTQGEIRVGPSHQAKLPDLQPFPSPDGDTVTQHEELVWMPGVNDCDLLMYLRAARSMAAFAGMCDGGSTEDGCVAASRDDTTLNALNTLHESGYDAGKALQRLVKKPVPKLIEKCWTEDEVKRFVKGLRQYGKNFFRIRKELLPNKETGELITFYYYWKKTPEAASSRAHRRHRRQAVFRRIKTRTASTPVNTPSRPPSSEFLDLSSASEDDFDSEDSEQELKGYACRHCFTTTSKDWHHGGRENILLCTDCRIHFKKYGELPPIEKPVDPPPFMFKPVKEEDDGLSGKHSMRTRRSRGSMSTLRSGRKKQPDDGRTSPINEDIRSSGRNSPSAASTSSNDSKAETVKKSAKKVKEEASSPLKSNKRQREKVASDTEEADRTSSKKTKTQEISRPNSPSEGEGESSDSRSVNDEGSSDPKDIDQDNRSTSPSIPSPQDNESDSDSSAQQQMLQAQPPALQAPTGVTPAPSSAPPGTPQLPTPGPTPSATAVPPQGSPTASQAPNQPQAPTAPVPHTHIQQAPALHPQRPPSPHPPPHPSPHPPLQPLTGSAGQPSAPSHAQPPLHGQGPPGPHSLQAGPLLQHPGPPQPFGLPPQASQGQAPLGTSPAAAYPHTSLQLPASQSALQSQQPPREQPLPPAPLAMPHIKPPPTTPIPQLPAPQAHKHPPHLSGPSPFSMNANLPPPPALKPLSSLSTHHPPQNLPPPPASHPPTGLHQVAPQPPFAQHPFVPGGPPPITPPTCPSTSTPPAGPGTSAQPPCSGAAASGGSIAGGSSCPLPTVQIKEEALDDAEEPESPPPPPRSPSPEPTVVDTPSHASQSARFYKHLDRGYNSCARTDLYFMPLAGSKLAKKREEAIEKAKREAEQKAREEREREKEKEKEREREREREREAERAAKASSSAHEGRLSDPQLSGPGHMRPSFEPPPTTIAAVPPYIGPDTPALRTLSEYARPHVMSPTNRNHPFYMPLNPTDPLLAYHMPGNVDPTIRERELREREIREREIRERELRERMKPGFEVKPPELDPLHPAANPMEHFARHSALTIPPTAGPHPFASFHPQPLERERLAGPQLRPEMSYPDRLAAERIHAERMASLTSDPLARLQMFNVTPHHHQHSHIHSHLHLHQQDPLHQGSAGPVHPLVDPLTAGPHLARFPYPPGTLPNPLLGQPFHEMLRHPVFGTPYPRDLPGAIPPPMSAAHQLQAMHAQSAELQRLAMEQQWLHGHPHMHGGHLPSQEDYYSRLKKEGDKQL

SEQ ID NO: 1566 - DNA, 6326 bp, Homo sapiens
cacccgcggccgcctccgccctgcgctttgtggagccggagcccagtgacaggcgacggcctcttgccgccccggaccccgggcgcttacctgtggctgctggggtcggccgcccgggaccaggctgggagccccgagaaacgcttcgttaagggactcaggcagtacgggaagaacttcttcagaattagaaaggagctgcttcccaataaggaaacaggggagctgatcaccttctattactattggaagaagacccccgaagcagccagctcccgagcccatcgtaggcaccgcaggcaggccgtgttcaggaggattaagactcgcaccgcgtccacacccgtcaacacaccctccagacccccgtccagtgaattcttggacctaagttcagccagtgaagatgacttcgacagtgaggacagtgagcaggagctgaaggggtacgcctgccgccactgcttcaccaccacctccaaagattggcaccacggaggccgggagaacatcctgctttgcaccgactgtcgcatccacttcaagaaatacggtgagctcccgcccattgagaagcccgtggacccgccaccgtttatgttcaaacccgtcaaggaagaggatgatgggctcagtgggaagcatagcatgaggacacggcggagtcggggctcgatgtcgacactacgcagtggtcggaagaagcagccagccagccctgatggtcgcacctcacccatcaatgaagacatccgctccagcggccggaactcccccagcgctgccagtacctccagcaatgacagtaaagcagagacagtgaagaagtcggccaagaaggtgaaggaggaagcctcttcccctcttaagagtaacaaacgccagcgggagaaggtggcctctgatacggaggaggctgacaggaccagctccaagaagacaaaaacgcaggagatcagcaggcccaactcgccatctgaaggtgagggagagagttcagacagtcgcagcgtcaacgatgagggtagcagtgaccccaaagacatcgaccaggacaatcgcagcacgtccccgagcatccccagcccccaggacaatgagagtgactcggactcgtcagcccagcagcagatgctgcaggcccagcccccagccttgcaggctcccactggggtcaccccagctccctcctcagctcctccagggacccctcagctgcccacgccagggcccacgccctctgccactgcagttcccccacagggctcccccacggcctcccaggcccctaaccagccacaggctcccacagcgcctgttccccacacccacatccaacaggcaccggccttgcacccccagcggccgccctcaccgcatcccccgccgcatccctcgccacatcccccgctgcagcctctgactgggtcggcgggccagccttctgcaccctctcatgcccagcccccactgcacggtcagggcccacccggccctcacagcctgcaggctgggcccctgctgcagcacccaggccccccacagccctttggcctccctccccaggcctcccaaggccaggcccctctggggacctccccagcagcagcgtaccctcacacctccctgcagctgccagcctctcagtcagcgctgcagtcccaacagcctccacgggagcagcccctgccaccagcgcccttggccatgccccacatcaagcccccgcctaccactcccatcccccagctgccggcgccacaggcccacaagcaccctccccacctctcggggccctcacccttctccatgaatgccaacctgcctccccctccagccctgaagcccctgagctccctgtccacacatcaccccccgtcggctcaccccccacccctgcaactcatgcctcagagccagccattgccctcctcgcccgcccagccccccgggctgacccagagccagaacctgcccccgccccctgcctcccacccccctacaggcctccaccaggtggccccccaacccccgtttgctcagcacccctttgtccctggaggccctcctcccatcacccctccgacctgcccctccacctctaccccaccggcgggacctggcacctcggcccagccaccctgctctggtgcggcggcttcaggaggcagcatagcgggggggtcgtcctgcccactccccaccgtccagatcaaggaggaggctctggacgacgctgaggagcctgagagcccccctcccccaccaaggagcccgtccccggagcccactgtggtggacacccccagtcacgccagccagtcagctaggttctacaaacacctggaccggggctacaactcgtgtgcccggacagacctgtacttcatgcctctggccgggtccaagctggccaagaagagggaggaggccattgagaaggccaagcgcgaggctgagcagaaagcccgagaggagcgagagcgggagaaggagaaggagaaggagcgggagcgggagcgagagcgggagcgcgaggcagagcgggcggctaaggcgtccagctcagcgcatgaaggtcgcctcagtgacccacagctcagtggtcctggccacatgcggccatccttcgagccaccaccaaccaccattgctgctgtgcccccctacatcgggcccgacacacctgcccttcggactctgagcgagtacgcccggccccacgtcatgtcgcccaccaaccgcaaccaccccttctacatgccccttaaccccacggaccccctgctggcctaccacatgcctggcctctacaacgtcgaccccaccatccgcgagcgggagctccgggagcgggagatccgagagcgggagatccgggagcgtgagctgcgggagaggatgaagccgggcttcgaggtgaagcccccagagctggaccccctgcacccagccgccaaccccatggagcactttgcccggcacagcgccctcaccatccccccgaccgccgggccccacccttttgcttctttccacccgggcctgaaccccttggagagggagagactggccctggcgggcccccagctgcggcccgagatgagctaccctgacagactggcagccgagcgtatccacgcagagcgcatggcatcgctgaccagcgatcccctggcccgactgcagatgttcaacgtgactccgcaccatcaccagcactctcacattcactcccacctccacctccaccagcaggaccccctccaccaaggttcagcaggccccgttcacccgctggtcgaccccctgactgccggtccccacctggctcgcttcccctacccgcctggcactctccccaaccctctgcttggacagcccccacacgagcacgagatgcttcgccacccagttttcggcaccccctacccccgtgacctgcctggggccatcccaccccccatgtcagcagcccaccagctgcaggccatgcatgcccagtcggccgagctgcagagactggccatggagcagcagtggctgcatggacacccccacatgcatggtggccacctaccaagtcaggaagattattacagtcgactgaagaaagaaggtgacaagcagttataagttatttatttgttaacgctggctgtggaaaccccagttcttggggggagaaacaggactttttacataaaataggagctgcaaaagcaaaaagaatatcttctaaagatttctttatatatttaaaaacccacaactaaaaatgtatccacatagtagtgttcgtttgtcgagaggatttcctgagactggtttggatctccctgcatgacagtcccccagaaacttagtgagtcctggactggactgaacatccagaaagcttccctgcaatcttggggtttggctttagttttcttttccttgatttctcagtaggtgctagaatccagttcacacccttcactgtgcgtgcagacacactgacacactccgccacgagtgctccagagcccacgaggcttgcagatcgggggcataggaatttggaatccaagagctataatttttaaaaaaaaaaatcttttattttaatacattgtaggaaatcttcataattggagaaagttctgcagcatggctttttacgtctgtaaataaataattttagaacagcctttttttcttccataaactactattgtgatctattttttccagccatgtcactaattgtgaattcctaccaactattgacagaatacagagttgattttttaataaaaagttatatataattatccctttaattaaagggagcaaaggggcgttccacatggacagaggcttggaccgaggcctggtcacagcagcgagcatccagggtttgcagggacgatgttacagactctgttttctgcctggcgtttcacttgtgtctgctcctagcctgtgctctgccagcagcacagacatctgctccatcagacctcttccattttgcacagggagtgcaggaggtgaatgttcactttctgttctccagtgtcactgttctgtttccacgggatggaaagcgcatgggcctgtgtccattgtagatttccttctagatttctgtgtacacacacttgattgttctggatgaatgtcttttttaatactccgaaaatttcatcatctaagaaaatgattccatacaaataactcagcacacaagtgacccaggacatatgcctgccaaagggatgtgttagaaggctgccttctcatgcgcattgtcacttggatcttgtggtgaggacggccccatctttcttgccacagattgaggccacttttgagcaagggagatcctggagttaagacaggtgttgggggcagcctgtattttaccctaggggcaggtctgcatggtgaccccacattgcactggtaaaccatttgagtcccactcttcatcctggaagtgggaactggagtcccacccacagtgcattcagaaagcatgctgtgtgggggctgcttctcaggaggccaggcccttctgagcggaaccgtcctggagagagcctgccctcgtttccaggctgcagccgtaacgcactttctcccaggctgagggcgggtgttctggggtgtctgccctctgtcggccctgcttcctgccaggacgtggcctcttccgatccttttctctcagacactggaggtctcttctgccattgtgctggtcccatcccaagaattgtaggacagagaccacactgggtcggcggacacaaagtccatccaggacccaggccgcagagggagcaggaagagatgctgatagtttgatctagaaaccagcagctactggctcaaattcaggttctggcgtcaaatagcgacatttccagtttctcttaaaaaccgtgtttggtttcagttgggataggcttgttttgtctgttgaaaatgtttctagttttttttctttcatttttctctcattccatttctgccttaactttagtttgttcacagggaggcaaagctgacatgaaccttttgtcgtgggacttcaggccacattggcttgaaggcattcgtttccttctggggtggggacaggccctcatggcaggcttgttcccgtggctctgagcgaggcctcttcctgctgggctcccagactcctgcatccaggcccccaccttctcggcttctggtttttctttctttttggtagaacacaacatctaccattcagttaaaccttctttatctcctcctttggcatccatttttccaaagaagagtcgagtcctctgaggtctgtgcttgaaagccgtccgaaggcattcttgttagctttgcttttctccccatatcccaaggcgaagcgctgagattcttccatctaaaaaaccctcgacccgaaaccctcaccagataaactacagtttgtttaggaggccctgaccttcatggtgtctttgaagcccaaccactcggtttccttcggattttcctccctttgttcggggtttggtttggctcctctgtgtgtgtccgtatcttgttcggtgtcctcgaggttgagcttcactccactgcggcagaggcagcgtgcacactcggatttgctacgtttctatatatcttgaagctaaatgtatatatgagtagtttgccatgagataacacagtgtaaacagtagacacccagaaatcgtgacttctgtgttctctccatttgagtattttgtaatttttttgaaatatttgtggacataaataaaaccaagctacactacaacccttgg

SEQ ID NO: 1567 - protein, 1002 aa, Homo sapiens; identical to SEQ ID NO: 1563

SEQ ID NO: 1568 - DNA, 32724 bp, Mus musculus
  misc_feature (1)...(32724): n = A, C, G or T/U
accttgtcttccctaggattcaaaatgtctcctcccaaaatccagcttagtccacccatcacattcttgggaacagaaatttccctcacttcaatatgccttctcaaacccaccgtttccttccctcaaaccttaactctcacccccctccaaagcttttgggaaaacccatcaccaaggccccctcagtatttactgacagaggaacgaggggagccacagcaataatgtactgctctcccagggatgagcccacattattccattccagagagctgtcccaccactcccccaatgaaaggaaccatacacaatttctttagctctcaaagacgtcaatgggctctttaatcttttctcagtgtatatgctgctgttaatttgcttccatggttctcaagagccttttaaaattagatgctaacccactattccccccacaccccatacatgtctccatcctcttacagggaaaagcccctcccctctccatccagcatgtcagagctcacagtcccctggcaggtctaatatctgagggaggtgctctccctgattgtaaggtctgtacaggacaggaaggagtgttcacagcctccactttattgttttatttcttaacaaccctaggttcccttcctgtcagctggttgcttgcttggtctcttgacctatggttgactttatttaatcctgtttacaatattcaagctcttggattaaaggtgtgtgtgctaaggctgagccacaccacaactaaaaacaggtttttccagtaaataacacaatctctgggttcacagtgtgatcaaatatcctgcaacactgcagcccaaatgggagaacgttcaaaaagatgacttcaccacattctctccacctttgccttcatgagaattcctcaacagataaaaactatctctcaattactagctcccaattcaagaccttctgctcacagtgagagataaccatcatatggggattccttacaatcctcagagccaaggtatcatagaaagaatgcatcaaactctaaaatcccaactttaaaagcaaaaaaaaatctcctacctccctaacatgccattagcaatggccctggctactctaaatatatttaatatttacaaagtctcccaacaccctcctatatccatccactgacacacaccaggactaactcctcccatcctggtatgactgtgtgttcccttagacagaatatggaaggtacctgaccctctcctcatgattggacaaggtttgtgtctttccatgagacctgcccaggcctatctgtatcctagacagaaatgtctgatagataccactgcaccaaccaagaagatggcctgtttctccctgatgggtcaaggactgaggaggaaaaggaggtgccactcccgaggaaacagaatgtcctggaaggacatccatgacctggtagctgcacaggcctctctctcctccactctaacagttgtttttgcgattctccattctaactcggctaccacccagcccctccctgatcttcccaacacccaccactggagaatttttgttagagaaacctattgtagatacaacagagtttcaggaacaggagattgtcctccaacagtgccaggagcctttgctccttctggtctgggttcatcaagtctctgaaacacacatcagcaaccctgctgaagtcactaccagccaggttctgcctcagtaccaaaccagtcccaacctagaggcagggctctgaagatttctccccgttacaaaacaagggggggcggggggggggagaaagccatgagaccagaggagccagcctggagctagagccagttgagatgtgaccaaatcctggaaatcttgtcctgagattggcaggaggggctttcaccatggaggaggtcacgtagccggaagtcaagctaaacttcctttccccttataaggtcatgtccagcagcacctattcctggaagcagagcctgaatgacgcacattaggtcttacaggcctggagcctgaggcagagaggggttagtaatttgctcaggaatactcagactgcaaggggctgggtttagcctctgcaggctgacaccagagggggcagggtttccaagggcaaccaaagttgagggagatgcccggatggaacccaggacttttcattcagaagccaacctgagcccgggacaggagagatgactgactccggatctgctgagtaggttttactcctgtgaatgaaaaaaaaaaaaaaaaaaaaagaggggggttgactcagtgatttgagggcacaggctgaaaccacaactacgtgaatgaatacccagaaatggagaaatgaatacccacccaccttccacagacgtgacaaggagcagcatcagaggctacatggagcctcacttttacaaatcctggctaggagagagagctgtgtgctactggctggtcttctgagcatccaatccctgactggaaggaatctaaacccctcttcacacacacacaaactctttttatcctagcttcatttctgttgctgtaataaaaacatcctggaaaaaaagacaacttaagagaagaactgcttattttatctcaggactccagagcacagtctactcaagggggctcacagcagcatgaatgagagacagctggtcatgacatatccacagtcaagcagagaagaatgaatgggcgcatgtttgcttgcttgtgctcaactcagtttttcctcttggacggctgcagacccctgcctagggagtggtgctgcccacagtgggcttggttggtcttcctccatccactaacaatgtgcccataggccaacctgaccaagatggtcccttattaaggactcttcccaggtgattctaggttgggttaacagttaagctaatcacagtggtacaatgtaaacttgatatgttcggggttcaattctcagaaacaagaggaagaaatcaagagcacgtgaccaaaaaaaaaaaagcaaataaatataaaatatgctgtgtttattttagaaagtaattgaatgtcactcaaaagaaatatattcaccggactgcggtgacaattgtgacaagcccaacagaatcatctgcaagcaataactagaattgtatgacttttgtgtatcaggttttaccactgcacgggggtgggaggtgggaggtgggaggtgggagaggaacagggagggataaacaggagggggacatgacacacacacaagacactatccaaaccaatccccaaattcacctgattacttcataggttcagctcttgtcaactatgattcaatttttattgttattcaaataaagaacaagacaatcaggaggttgatccctcttctgccctctttatatactcccagtgggcctggcctagccattggcttgacagactggtcagagagcccagaggatcctggtctccaccaccccagtgctgggatcacaggcacatgccagagtgtttggcttatttattcatttactacatgagttctgggataaaaagtgagtccttgagtttctgcagcacgcctgtggacacatctgagccatgtccccactacccctgagcttttaaatcatcatttaaataatttcagattaatctagctctccctgcatgtccgtctcctattctcttacatttctttcacgatgaaggactgatgtataagcattgctttttggtttgtttggtttttttttttttttcagttaaatgttaccacactaaatcaaagttttaaaatacctgtgtgcaacttgtcttacacacacacacacacacacacacagagagagagagagagagagagagagagagagagagactcattatattcaaccacaagtaatttccaagatttatattatcgtaattaagtttttctgggagcttccagtatcacttggaggcaaagtgtgtgtcaactaccaaaaatagacacataaagtgttcttctcaagtcagcaaaatcactccacccagcatccgtgggctgtaggagcatccacacctggtcctgactgcttctgctcagcatgccaccctgtgttctcctttcttgcctgtcaacacagcaaatacacgctgtggcaggctggcctgttcatggctgctctctagtttgaaatactcttcctcccactgtgtgagtcataccccaatcttactcatgtttccatctcagagcagaaaaaataaactcttgactgctacagatgcacacacacacattcacctgttcatcctctggggtccttcatggaataaataatacatactacacacacacacacacacacacacacagagtgaagtgctgcatataatagcaacagaccacacacaccagcctggtcccagaaggtgctcgcttaatgatgttgatgctgagtgtgcatatgtgcgtctgtgacgtccatacaaaaccgacaatggagttctcagaacagttctccgtcatcagtgacacagattgggtattatcttctctgccgtcagtttctccccactgaacagaatctgataaccagggaaggacactgtttgtccactgttccatcccttggactcagagaacaatatatactgccatgaacgtcttcctgttttgtgaggcgtgtttggacacagcactgcttcacagctaggagaggagggagcaacatacgtgatgcacacagctttattgttttgggacaaagggccttgagactacagatgttgagccaagctgtggaatgtggatgaaatgtggctggcactcttcctattaattgtaatgcctacctaggggtcattgcccaaatctgcagatcagagaactacaaataagcacgcctcacccaaggatttctttgtcctggggggaaccactgcttaacctacaacagaaaggtcctagttatatttaactaatatccatcttgactgtgtgtcaaaatctgttccccaaggaaggtcgggccacttgtcctcaatgagctaattaagcgttgaattaacagtaaaaagcagaaagggaattcggtaaactgtcattttctggccagcccatttgcagtagtcggcagcaagcgcgtcccaccttcaagccgccttcttgccccggaagtccgcaaggtcgcggtactcggtaaccccagggtgcccagggaccgcagtgtcctccccagaaactttccggctgcgaaccgggtcggagtgaagctgcgcaagcgcactgagtcccgcaagagcagttcgcgcgcccgcccactacgattaggctcagccaatcgacggcagcgccctgacggaagtgagccgtgcgcctctggcggtcagccgactcacttccggcaagcgttgctctgtgggaggcgttctgggtggtccacccccgagaagcgttcacagcgtcccggccgaggcgaggcgggtctagtcccctcgcaggtctccgagtcagaatttccccctgcgccagcgtggccttaaaggtcagagctcgcccactctccgttcgcgccgacctgacctttcgtgggctccgagggggaagttctccgcgatattgaaaacaggaatatcagcggggcgtggtggcacaggtctttgatgcacagtacccgggaatcagaggcaggaggatgcccgctaattcgagttctagttcactgaactgcaatgtgggacaatctcaaaaaaaagttttttttctttttttggtaaaggtcccaaaggcctttcctctgtctgatatctgcgatttagattaagggaagcattaaagagttgaaaatgttaacttcccgcttacagatggcacgtgctatagtcacgatctgcacagacggccagtgttacagtcacgatctgcacagacggcctgtgttacagtcacgatctgcacagacaacagtcctgatgtgagcaatgagattaaatatgtcaattgcttcaactcaccgacttacttgaaacccaagggaggttttagcttgtacgtctccccacaatgcataatgacctgagaaacattgggtgaaaaagttggtggatggcatggggcgtcgtcatgaccagaattacagcagtatattttggtaaatggttgggggtttttttggctttgttctatgaatacgtagtgagaaatatgtttgagctgtcctgggcgttactggcagtattaactaatactggcagcctgtgtgtggtgggcagagtgtgaattttggcttcagaacatcaaaatttgcccaagactgcaagaccttatagagtcattttattttcctcttcatatctgtaaaatgaaaattatgatactgtatcagtcactctctccttgctgtggcaaaatacctgacaagaagtaatttagggaatggacggtttattcttgcttacagttggaggggccctggcccgtcgtgagggaaagacatccctgcaggagcctgagctttggtcacacaagcaatagatccgtgaacaccagtgctcagagtccacgtcttgtcaagttgacaatattaaccaccacagacagacaccttcgaaagtcaaagagaaaacaaacagcgtcctagctagaagtcctgagaccgagtcgggggtgtggcacatgcttttaaccccaacacttgagaggcagaggaaggcagatcaccatgaggccagccttggcagaataaagagttggggtaggaaggactggtgggcgatgagctcctgctgtgtcagtcagcagttacttgatagcaaagtctgttgttccaccggtgtcatttgaggaaccatggcagttgctttccgtcaggccatggctctccaaagctttgctcagtcctgggctgacattgccttggcaagactggcagagggaagggaaggaagcacaccctgcatgcagctggaagggggaaggattatttctggggacacagggataatccaactcccagaagtaacaacattccaggattttaaaaaatatttatttttaattatgttcttcttttgtgtagttgtttgtgtgtgtgtgctcctgtgtgtgtgtgcatgtgctcacatacaagtgaaaatgctcttggaggtcagagagtggcatgggagcccttgacatagtcgttccaggcagctgtgagccacccaatgtaggtctgggaactgaatgcagattctctgctgcacttaaccactgagccatttttccaaccccaatatgtgtgttttaaaactgtgcacagggtattcactggataaaaccagactgctctgtttcagttcctgctggtggtgtggagatgtcaggagtgtgaacttctgtgtcccctcaaagtgttgtcatggcattgccaccagcccaccacgggtcttacctttgttttttttttttcttgagtttgtttcttgccacagcagccaacctctcagagccttccttttcttgttcttccttctaggctctggagtttggaatgaggggccctgacccatggctatgcaggctacagctttagccacattattgctttgagacaggctctccctcagttgcccaggctggcctggtactggaaatcctgcctcaactttccaaatgatcctgtctagaggtgcaggaatgggttcataatctctgcaaattagagacttaggaggcagaaggatgagttaccacagatcttgggaagtctctgtggagttatcatagagactgtggataatcaggatctcttcattactaaaataatttaagactggatcaaatgggagcttgaggataatatagcagagtttaaaagaaaaaccccagctgggtgtggtggcgcacgcctttaatcccagcactggggaggcagaggcattcggattactgagttcgaggccaacctggtctccagagtgagttccaggacagccagggctatacagagaaacaccctgtcttggggggggaaaaaaaaaagcaaacaaaaaaaaagaaaacccccagagagtcaagctattcatcttgaagctacccggagtaagaaaatagaaaagttaagatggcactgaggtcagcacatggctgcaggggtcagcacatggtagcaggcagctacacgatgcggagaggagctttagaaaagagtgaggaagccagcgtcagaaagagaaacagaagaaaaaggaacagttctgcctttccattccagagactccagaaaggagatgcacaccttctcaaggtgaagctgccttcatggagtgtcctagtggggtcctggactgcaccactgaattaagccctaagggaagagacaagggcctgtgttcccctggaggcaggtttcactccttacttaagtacttggggttgcaggcatgagccaccaagcccaacaccctctgtggatcttgaagctcacatctgacaagctgtcctggtcttctttctgtcactccagctttccgtaccttcaaagctgaaggggctggctctgtcttttccctttgcacatagtgaagaaccagtccattccacaactcctaaagcagttgcccaagttttattgtatatatacatgacttagcaatttttaagaattaaactactcctactgtaagaatttccagtttgaagctgggcgtggtggcacacgcctttaatcccagcattcgggaggcagaggcaggcggatttctgagttcgaggccagcctggtctacaaagtgagttccaggacagccagggctacacagagaaaccctgtctcgaaaaaccaaaaaaaaaaaaaaaaaaaagaatttccagtttataagatttccaatatgaacctatgatggaggtcagccaatgtatgtgaggtattcaatctccatataggaaggaaagcaagtttatatcctgtcgggggtttgtataaaaagtactgagacttgccaaacgagctggctttctctgaggtgggtacagataggaccaggtgagggtgggtctccctcctgtaagctgaaagataactattaaaaactcaggagagagccggtgggagggctcgacaggtaagggtgcttgccacacaccggaggatttgagttccatccgagaccttgtagtaaagaaagaacacactaaggcgagtggtcttctgtgagtttccacgtgcaccctttggcacaggttgagatgcacacacagtaactgtcaacccagaagtgtaaaaagctgaaataaaatgagataattaaataatttatcttatcgtagatgatagcattgctccaacccgagggtgcagtaggacattttattatttgtgtgcatatgagtgcagtgcccgtggaggtcagaagatggcattagatcctcaggatccggagttaggcagtggtgagtctccccaaatggatgctgggaaccgaacctgggtcctttgcaaaaccagcaagagctcttaaagcttgacaccgtcctgtgacccaggggacagggtgaccaggcctagctgggagggacaggcctgggatgacgtggaacgaagactagcaggccaggggcaaatagaggggatgtcacagtaaggggcaagaaaggcaaacggtccacaaaaaccgtaatgtaagacggcttccaaaaatgactgaacttcagcctgtgaattcgcatgtgctaggattacaagtgtggggttcaggctgtagcccagccaggcctcaaactcggaaccactatcaacttaaacgtcgaagaggcagagaggggcaattgcgcaggcgcccgcagggtgggcggtaccgttgtctgggggcgagatggtacaagcgctgcgcagccgcagtagcctctattcgctcctccccccacccccaccccggggcctgggctcagccggacatgacgcaggccgaggcggaagcgaggggttgtgcgcagcctcagtgcgggtggcgcgcatgcgtgctgggtacacgtcgggtgcgaggttcctgcggactagcggtggcttcgcgtgggtggaggaggcgcggctgcaggtcagcgccctggggctagaggccgggctgtgatccgcccgctgccccggagggtcccggctgggcgggctgggggcagcggccgcagtgcatgccgggccaggctctgcacagcatcctccgggttggagcgagcgcagttactggaaggcttgaccaaagttgtgatgcgtggggagcgtgcagggaaagcacgcggaaagtgcctccgagtggcggctagctgttcccggccgcagcagggctgacctcctaaagagatagtccatctttattaatcattagcagtgtggtcagagatttagcacctttggactcccccaacccggtcctgacattttagcagtttattggaacatcaacaacaagaacaaaaccttcgaaatttacaagttggttttttaccagtgaaattgtggatttggggttttttgttttgctttgcttttttgttttggtttgggttttttgagacagggtttctctgtaaccctggctatcatggaactcacgctgtagaccaggctggcctcgaactcacagatagatactcctgtctctgtctcttcctcccaagcgctgagactaaaggtgtgcgctcgactcgctccccctcccctccctttctctctttctcttatttctcttattcttttccttccctccctccctccttcagagtattttaagaaaaccagcctctccacagtgtgactgatatgcagggcccgttatgtgacctgtcttcgttagagattggtcctaagaaagcacagtaagggaaaatgcaaagaatactagcacacattggcaatcccacatttattattttttttaaaggatttagattttggttggttggtgtttgtttgtttgtttgtttgtttttcgagacaggatttctctgtatagccctggctgtcctggaactcactttgtagaccaggctggcctcgaactcagaactccacctgcctctgcctcccgagtgctgggattaaaggcatgcaaggatttaattttgatgtatcagcattctgcttgcatatatgtatgtgcagaggccagaagagggcgctgtatcccctggacctggagatgcagacaattgggagcagccctgtgggtgctgggaactaaaccttgatccagtgctcttagccacagactacccaccccagccaccctgttttcatcccgggattagagtgctgaaactctgccatgtgaaccagttttaatctaagctgcttgcttccatggatcccaacctgtcacacagaagttatttactctgcgtgaacagatggttgttacagaggcaacattttgaacacttttttttcctgtttttttaagtctttaagaaatagaaatggcttccaaaagagctctggtcatcctggccaaaggagcagaggagatggagacagtgattcctgtggatgtcatgcggcgagccggggtgagttcccctcatgggctagctctccctgttttaaaaacgaggggactccaagtcacttttatttgtttaatgtgtgtgagctgcatcccgtggtgcagatgtggcggtcaggggctgtgcgctgtcttccgtgttagcctgggctccccactctgtgtttatgtaacacggtgagcatgggatgcactcaggtttgccaggctcaccctgagcatttcctcactcagacctggcagcagcatggtcagctctctgcctcttttcacaaaccccaggcagagacgctcagcagcactgatttccagttagagcagggctcagacccggtttcttcatttcacatcgctgcacagttgggacagcataggaaagccaccacccctcccctccagtgacaaccttatgacactggagtaaatacttcgaggcgttcattcatcttttgtgtatatatgaatgtttgcccgcatgtttgtctgtgcaccacatgagagcctgagagcctgatcccctggaactagagttagaggtggttgtgagccgccatgtcggtgctgggaaccaaaccccagggtgatcttaaccactggccatctctgcagcctctttaataaatattctcttgtggggtttatttgtgcaaacgtgaggatggtttttcaggctcagcaccggaaagtgggggttgctgactgtgtagtcagcatcactgggttctgagaagttgcctccagtgcactcacctgtcctcccccaggactgtcgggtatctcctgagcttcggggactagcaactggcagtgtcacctactcaatgtgttacaggatgaagtgttgtttagttgtgtgctgtgcacttctactttaagaaaagcccatacggttgtaatgataatgccaccctcaacccgtgggttattattaggacggcccggtaactcatctcccaactcaacacttgtggaatagagggtgttctagccaggcagagccagagtagtggctcagctacaaattagggctgtccctggcaaaccagaagagaccaggtgttatttaccgttgcctgggcttggtcttgtactccccgacaggttacttacaaaccacagaatgggtgtcaggctgcccggagtctgtgctttcatggtcttgaacatctatctgctctttctctagatcaaagtcactgttgcaggcttggctgggaaggaccccgtgcagtgtagccgtgatgtaatgatttgtccagataccagtctggaagatgcaaaaacgcaggtttgttttgtccacctggactctttcttcttggggcttattagttctctgaacggcttttggctgtatccgtgactgcagttagaacagacttcctttaggagaaggacttggcctgggtggagggtctggatcctgtgtcagaaggtgggtggggatgggcacggtgtggctcagtgggagaacacttgcttagctaggctgtgggttccatgcccagcaccataaagactaaataaatggcacgtatggcagtttatactattatgatagtgctctcacactctctctctttgttctttttaatttcagcaagtttaaaatgaattaggtttcttggatatttgagtgtttaagtcactacaatactgtgatttttctcttcacaaagttttagattgctaattttttttctttgccttttaatatttgggtgttttgttttgttttgttggttggttggtttaaacttttaaaaatcactacctgggctgtagagatggctcagtggttaagagcactgtctgttcttccagaggtcatgagttcaattcctagcaaccactttgtggtgcacaaccatctgtaattgaatccgatgccctcttctggtgcgtcagcaacaggttgctcatatacattaaataaataaatcttttttaaaaaatagttttaaaaatatcactatctgtatttctactgaaaaagtcacatggtaaagacgtttatatataaagtcagagtgacacacccctcttttctgtgggtatttttttttttttttagatttatttatcatgtgtaagtacactgtagctgtcttcagacacaccagagaagggcatcagatctcgttatggattggttgtgagccaccatgtggttgctgggaattgaactcaggaccttcagaagaacagtcagtactcttcatggaccgctgagccatctctccagccccacacccctcttttctcaggctggtccctgtcagctaccgggtgtctctccaaggcctgtgctccgtgtgggttcctcgccactcaagtgcatttacactacacatgctcacagggcctcctctcagacaggttccatcgcagttttctacattttaaataagacactgtgtgtgtgtatgcgcacacccagggaacagggtagggtgttggatcccctgcagctggagttagaggcagttgtgagccactgtgtgggtggcaggacctgagctcctgtcctctgcaggagcagcaagagttcttgacaactgagccatcttgccagccctcagacctacagttgttgttttggtttttttttttgttttttgttttttttggttacaatgttccaccagagggatacacctttatttatctgtttcattttgggtggtttgttgttgttattgttttgagacagggtcttgtgtacctggctggcctcacactgagtgagtagctgagggcagccttgaacccttgaccttcctgcttctacctctttctatgggtgtgcactactatgcctagcacttagtcacttttggtgttagagtcaaacgcagggcctcatgcttgctaagaatgggctctgccacaggggtacatgtagctccgcccccacccaggcccccaccccaggcacacatagttttctttggcagatactgggctgccatttaacacagtaaaaatgaaatgtttccttttatttcccaactcgcagggaccatacgatgtggtggttcttccaggaggaaatctgggtgcacagaatttatctgaggtaaaagctgcacagtcatgcctaagcgaagggcttgtgaggaaagtcgcagcttctgcttcgctgtcttgcgtttgcccttctgtgcttcatgggtgtgctgtaggcacaggagagacagcagaggttggcagtgagtgtctcacgctgcagagcacaagtcagtgggcccacgatcatggaattcactggtcttaccacattccccatcatcctgaagcagctggtctgatagaaagatggaatggccttttgaagacgcagttacagcgccaattaggtggtaacagcttggaaggctggggcagagttcttcagaaggcagtatatgctttgaatcagcgctggatatatggtacagtttcccccatagccaggattcatgggtccaggaatcaaggggtggaaaagggaatagttccacttactatcactcctagtgaccctctaggaaaatttttgcttcctgtccccataactctaggttctgctggcttagaagttttggctccagagaggggagtgctcctaccaggagctacaacaaacattccattgaactggaagctcagacttccccctggtcattttgggcttctaatgcccttaaaccaacaggctaaaaaaggagtaacagtgttaggaggggtgatagatccagattaccatggggaaattggattacctcttcacaatggtggtaagcaagattatgtctggagtgtaggagatcccttagggcgtctcttagtactaccatgtcctgtgattaaagtcaatgggaaactacaacagcctaatgcaagcaggatgacaaaggacactacagcaaggttagccaggtcagtggaccagtgctgcagcagcggagtgggttaagcctagaaagtgctgcctgctcagccgagggtccaggaccgctgtgggaccacagtgacagtgtgaatgcaggatggcatcagaggcagccattgcttctcgtttccagctctatgtgaagagtcatgcaggaaaggaggcaggagtagggagtgggctgttccttctggggtctctgccatctgtagctgctgaaccccgtgtcccctcgcttctgcctctcctggagcacaggacagggttacgtgccttggtgacattgctttttccttcctgtcgtcactgtggtgggcctttcccttggggtgagtgccattggctgggcttgagagcacggacacgttaggaacctggccacttttgtacttccgggttagagcgctttctgggaaacagctagaagcgagttaagctgggagtgagggtcccagctttcccgtgagagaccgtgtctcgatggtgactgggtgcttgggttctctctctagtcgcctatggtgaaggagatcctcaaggagcaggagagcaggaagggcctcatagctgccatctgtgcaggtgagtaagtgcgggtgtggagctgtagctggcgaggggctggcctgtctctgggagcttgactgcacacagcttgccttcaggaagccaaaaggcgcccacactggctgtttggtttgggtggcatgaactcgtgtcatggcagcactgagcccaattgttgagctttctgtctctgtctgccctaggtcgctaatctgtgaaactcagtgtttgccctgtttggttgacctcagggaaaaatcaggcttctggaatccagcaaacagcttgttccggcgcatctctgtgccagcagttaggcctgccaggagagtcagcaagaatctgaccggcacaaacgccacacatttcccccggcctcgcctgcctgggtgcgtgctgagtcttggcttgggtgctcttgaaacccatggcttcagatgagctctctcgtacatatcctgagccttgagactataacagtttgcttcctggcccatttcaaatccttgatgtggctttcctctcaggtgacggtctggcatccggcgtcttcctcgtcagatgccttttaagtgtgtcacagaacaggtgaatcagtgactgaggagtggatggttttgtttggggaccaagggactctatcttagctctggtgcccttgcctcccccaggggacaaagcagatactgtagagacatctgtggctgctgtcttactgaaatgacatcagactgacaagcgccatccttcgggcaaaggctgtgtgctcctcccctgttttaagatccttcctgggagctggagagatggctctgcaattaagagcactgactgctcttccaaaggatccgggttcaattcccagcaactacatggtggctcacaactgtcagtaactccggttccagaggatctgacacccttgtgccaatgcatataaaattaagttaaattcaaaacaaaacaaaacaaaaaatcacgtttgggttgtctgggagaccaggctgtaactgccgtgctgagggagaggcagggctgctgtgagttcaagaccatccttagctacgtaagagagcctctctccactgaaggaaagaatggagggaaaacatgtggaaaaagctctaaaagttcccagtttaggaccaagcataactgagctgtatgtgcctagcatgtgagaagctccattcaaaaccgacatacaaagccattctaactccctgaagtgacagaggttgtgggcatcatgggatgccacgattgcatgcttgagagcacattagagagccactgggagcacctacgcattgccctgggcatcccgtcttaggctcccacagctctgacttcctgccgtgccgaggcccagggatttctgttggttggtggtcttgcaatccctgtaacctggactgtcctgacggtgggtacgaagtcatcagggggctggtgtccttcgctgacctgggagaccggcctccctagggtttgcctgggtttgttcctagacttggctgaaggtaaactgcagtgtcatcgtgttccgagtcgctgactggaacagcagcagctggctcgctcactttcgctcagtcagacctgagggcctggccctcctccgaaccaagtcactgttaaaaaaagaaacattactagcagactgtcctgtgtcacggtctcgggatgataaacagaaaactggggtggcccaggcagggagtggagctctgtaatgaagcctgtcttcaatcagcagtcaagagtgaccgtgatgttacagtcaggagctccgttgttagcatcaccctcggtgctgctgagtccagaagaaagtcatcgcagggaggctttcctgaggggagagaaggaagcttgcagtgaagcttgtaggtggccagaagcagggagtggaaggacttaccaggaaccaggacacccaaggacttgtagttggtggggtgttcttcaagtgtccaccaggtggcgctgtaggaaagggtggggtctgctgccttgagcttgctgccggttcccagagctaactcttggcatggccttctttttgtttgttttgttttgttttgatttttcgagacagggtttctctgtgtagccctgactgtcgtggaactcactctgtagaccagactagcctcgaactcagaaacccgcctgcctctgcctttgcctttgcctctgcctctgcctcccgagtgctgggattaaaggcgtgtgccaccacgcccggctgggcatggccttctttagaggctcagataatggcagtggtaagttgttttgtcttcattttcaaatcaggcctttgaccacattagttagtcacttactatgacaggaaggcggccgtgcacaccttgcccggtgctcacggggctcatggcgggaggatgcgcctctgttgtgtttaagcagtgggatttagagccgtgactgttcagactcgggtgtttgctttagaagaatacttctggtaaactctttgttttgtctttgtttttctggggcagagccctctttgtagtcctcactgacctgggacacgctctggaactgactctgtagaccaagctggcctggaactcacagagatctgcctgcctctgcctcctaagggctggggtcaggcgtgcgccacctcacacgctgtatttctgttttacagcacaggttctctctcccctctcatctgtatatatacatcttcttcctaggtcctacggctctgttggctcacgaagtaggttttggatgcaaggtcacaacacacccactggctaaggacaaaatgatgaatggcagtgagtatatccctccctccctgtgcttccctatatgacagaatcctagccaagtggagggctcctggctctgcacgcacttctcagcggcgccagcccagcctcagcctggccaccagaaccctgactcgacagcggggagggttgtgaagtgctagtttaggtagtgtttttaccgaatccgtgacagcagtttcagcaaatgccttttgcccacagtgcacagtgctgcagacctttggcaatgtcttcagtgggcggccagcttgcttggtgatgcgtttccttcctatcagctaggcatttgagttttattaaccctctgaaagcaatttctctttctggtgaagtgagcagacagggtaggagggctgacgcgaggctggatgcccctccccttgcgctttcctccttgcgcttgtcagtaaggcccgtgacgtgtcctctgtgactctaaagctccgctgtagcctttccaggtagtttgttattcagatctagttaggccattctgcagcctgcttttgtgtttgagatgggccctcactgtgttgcacaggtagctttgacctggactgaagccatcctcctgcctcagcctaaatgggcgtgcaggtgtgtgccatatgaggctgcaccttctcacctcaacctcgtcattacctttttagctttggcaggttgacttcactgctagttggatttcctgtgtcttgcttgtttctttggctcctgggtgtgggctgtggttggtttctgcttctttgcctatgtgaacccatgctgtcgagaaacttccttaagttgctatttaattttcagttatgtgtgtgcatgaggaggtgtgcacagaagccaggagaggatgttctgtcccctgtgagccgagttacaggcagtggtgagctgtctggcgcgagtgctgggaatggaacccgggtcctctggcaatagcgggacatgctctaaccactgagccatctctccagccctgagaacattcttaaatacatacctgggcataactagagctccctttttgaagtaaaatagtgtacacgcagtttttaaaagttcgtacctttttgttttagaggctaagattcagcagtagagtgtgtgtttggtgtgcagcgacacatggagttgctctgtgactgcactttcgcgtgttcttagctttgtcccaagtgttgtttccctgaaagcctgttgctctgtttcagttattagagggagactgactgtcaaactgggtgaaaccgctctgttatgagctctggctcttgggagttgagtttgtgtgagcctcaggaagtgaggtcagggtaggaaggatggcacgaactcaggctgcgctgtgcaccgtgtgcgccatgtgtaccatgcgcacaaggggacaaagcacgtgctggtcctgtgtcacctgagcttctgaaacacgggtactgagggcacacagtgggacctcagagcctacacagtgcccagcttacctggagcctacggtgtcttggcaaggcaaggaacccggctcccctcccctcctctctgtaatgaaggctctccctcccctacatcattgccagggtcagtaagtcctggttttaggacactctttgtccattgtaccctttgaaagcagtctgagggacagtagccatcctccacgtgactcttgtaggcgaggttcttctgggggctccgtaacacttggcttgggctccccctgcccatggcagcagcagtagtcctcagaagtgtgttggatgagtgagtactcaggcagcaaggcctgagggcaggctgaggaggcgcgtgctcagaggctgactgccttctcttgagggatcaagggccaaggacttgggctctctgggctttgggtctctatggaaactgctctgcaatggtgttccctgattgtcatagacaggcctaagtagtgagtgcctttctctgaagagattctttcatgtctgcaaatctatcctgaccgccaaatcctcttccttcccccaggctccacagcagccccggctgcgttggtacactttgtgaggctgttcctcactgtggccactaggtgggggccgtggacaagtggtaaccctgtttgagacctttaaacttcctggttaaggccgaggctgggtttctagtgtttgatttaaaaggtcttgtcctggtttagccatcagaaagtagggctgggtgaaccgagacgtcccttccagtggcggtctctgttttctttaccgtcctgtaagtgggaaggttctggtatgttctgtctggtcagcagatgcagatggagttttgaatgagatagagaggcaggctcctcctggtgtggctgccccgcttggaggagaaacgcgcttctgagggctctcagtgaactctggatgtcctgggttcttcatttcgggcagaaacagggtacatgaagctgtgcccaagcatctcaggttggggccatgctggtggttcccacagggctgcatgtggagctcctgatcatccttggtgtccgccctcacgtccgcacgtgaccctgctcctgcaggagtccttgcctggaggcctcccgtactctggccgccctcccttcccaacatccatctcttccctaaagttctgtctccgaccagcccttccactccctgcctctgtgccaaggcccaagcccagatatcctgggcagagggtctcctacaggaacctgagagagtgaggtcctccacacagtgccctcggtgcggagggagacagagctggccagggtgagatgctggtgcagagcccttcttcaacagtagagagactgcctgggggactgagtcaggaactttcaccctggacgaaacctgcttccgtgttctggtcagagaccgagaacagaagagaccccaagcactttgaatagcagatgatataagaaagcaaagggtcccagctgctgcgggtgctggaggggacaggcagcaggccccagctgtggccccagcaggcctgcttcaggaccacactagattggcccaagggccggatgctgggaacacggctaggctcccggaaagcaactctggcctgtggggtgagggtgtgagatgagtaaggccccagagggcaggcgggtgcttggagcctgggtcctgtcgtacgagacagaaagtgggggagacgtggggagtcttggtggagcccaccacattgtttcagaggaacagggagaggcagaggaagagacctcatgtgctggtcttgtgtggtctgggactgcagaggaccaggcagtctctgtcctcaccgctgccctgcctctgccacagcagccctgtggcaaacaaagtaggcagtggagaagtccatcaccagtgcccacagagctctcccacgtgcgctgttggtcccttccagccacccttgcagtcactttaccatcgtccccacagtacccggtagtctggagggcagaggagacagacctcgggaatggcggcagcagtgtgtgtagagtgactgtctgctccctgtaggtcactacagctactcagagagccgcgtggagaaggacggcctgatcctcaccagccgcgggccggggaccagctttgagtttgcactagccattgtggaggcactcgtggggaaagacatggccaaccaagtgaaggcaccgcttgttctcaaagactagagcccaagccctgggccccacgcttgagcaggcattggaagcccactggtgtgtccagagcccagggaacctcagcagtagtatgtgaagcagccgccacacggggctctcatcccgggtctgtatgtttctgaaccttgctagtagaataaacagtttaccaagctcctgccagctacctttgtgtctggggtcttttgtggctggctacatttgcaggtggttgctgttggtgcagctgcagactgacggagcagctcggcccctcctgctgcggagacggacggcctctgatggcgggcgcttcctgggctcctcaggcgctctgagagtcactgggctctcactgaggagtaaaatgtgctggggctgggcctcatctgccctgaccatgtagcccaggctaggctggtcagtggacaaggctcagcttgggtattctctttctctgctgggatagccacgaaggaacttaaagatggagtactggcagccatcttgtcactgtgaagaaagaacacacctgcagtcctcaggagggacctggcagctcctgtcaagaaagcaaagctggaaactgcacattgttttgagacggggactcactatgtagctctggaactaagtatgtagagcaagctggcctcacacagcagaggcgcgcctgcctctgcctcttgagcactggggataagtgcacaccgtaataaacactagtaaaaataatacagagggctgggcagtggtgtgctcacctttaatcccagcacttgagaggcagaggcaggtggatttctgagttcgaggacagccagggctacacagagaaaccctgtcttgaaaaagaaagaagaaaaaaaaaaccaaaaaaataatacagaggctgctgagggagaaacaacggggacttcattgatgtggtggtagtggtgggcagcctgaggactgtgtttactgtgggggttggggctgtggcgggcactgctttgaccctagtactaggaaggctgaggcaggaggattgtccacaagttcagctctctcacagtgagctcagagacggcctgggctacagcaggacttttcattcagtccctcttccaccgagtaatgtgtgccaggtccggggagtcagtctgtgggctcaaggcacactcgtgtcctatggtaaaacatggagtttcctgcctgctagcacaagactcctgatgagggtctccgggaaatctgagaacgaataggctggtctctgataagaggcctcaagcaaacctgaaagaaaaagcacaaaggccaagcagccgctggctaggggtaatggaggagcagggaggcgtggcatgagaaggagccggtgaatggaggctggagaggtgaccaaagctagccaaggagcaggtggcgggggcccagttgccagcctcaccattggagcaagcagcacccctggccagctaaggcagggttaatgacaatggagagtgctcaggcctggaaggcagccggaagctgctcacatttcagcaggtagaggagatggcagagacagggtgaatttggggttcagcttgaatttgaggtacctataaatatacttcatatggtcatgaaaaccaaaggccaggggtggtggctgacatctggaactgcaggtctgaggttgagaccagcctgggtcacatggttccaggccagcctgagctagagacccttgtctctggacacattatcccgacagtcacaaactattctctgtaagtaatttactgttggtgatgactgtcctcagactccaaatcccgagtagcacccctggctctccatggtttcctggaatgccatctatagcgggagagatgtgtgctcctgtcccaccctggagcagcaggaggtgattggacagccaaccctgaaagtggtatcgatctgcacatctggagtgtggagcgggctcctccaggaagctagctcatcacaccctcagctctggccaattgtggcctgctggctctggggttttaagagtctagcccctggggtgtggagtggactcttccaggaagctagctcatcaaaccctcagctctgaccagttgtggcctgctggctctggggttgataagagtctagcccctgggctactctgtagtgttagtccagcttgcttctctccaacaggtggctggggacctggaactgagggggtgggggagggttgggtgtggcctgtcagtgggctgcctctttctcagtctggagtggctcagactgtctgttcgatccttttttttttttttgtaaaactttgttcacctcagagtgctatagcgcagccaccccaatgccccaagcctgtgctgctcctaccaaatccaatcctgacccttgcccagagctcagctcccgtgactgaaacaagatcatcttcatggggccaggcactcagagcgttaagccagctgcaggagtggctttcctcagctgagttccgagccagctctgtgggctgctggggggggagggggatgggaggtgtgggggagtaggtgggggtggcaggatggtagggaccattgggtgcaaagtggtatcccacaagaggaagactcagcacttctgtacctagcacctaagggtgggggcccttccgttgggagtggccttggtacctgcagtttcctcctattggttttgtaaagacagctcacagtgctcctgcgtcagcctgagtgctggacatccttacccccaatacacaaagcccgggtttgatccctagtaccacaaagcaaacaagccaacgagagttgtacacgcatccaactccaacgttgggcacgggaggtaggagaatcagacttcaagatcacttttagctacatatcaaaaacgaggccagcctggatcccatgaaaccgagtctcaaaaggtgacagaaaagctcagagagccgggctctgcccgtgagtgatacaggtaccggctccatccgacaggtcagcctgtctggcaaccagacagagagccatccactgtgaaaagaaaaccttgatttagaagtcatgactccatctgtcctctgtcatggtgtgttacaaaagccacaggatgtagcaaaacacatttctttttttttttcttttttcttttttttttttattcttttttttccattttttattaggtatttagctcatttacatttccaatgctataccaaaagtcccccatacccacccacccccactcccctacccacccactccccctttttggccctggcattggacacgcaaaacacatttcttaaagcatttagtgtgtggccaactgtgtcatcctggaggctggtcccttggtccatgttctattcatggtccacagaggatgaagaacgttaacttccaaagctctttctgcaaaggcctctgggattttttaaaggaatatgtctcccatttgccttggtgagtgtacagcagccaggcctcagcccccgaggagctgcaggactggctcacacatgacagtctgtggtacagaccagctccaagcctgagcccccatgggacaagagagtgagggccaagggcaggagcccttccagttcacctgggggctgcgagtacatttcccagtgcccagtgttccctgggcgtggagccctgaggtagcctgaacagttctgagcctcagcactgagaaggggtcagatttgggattcggcataaacgccttcaacatcaccaccgacatgtcactcatctgctcctgagcttttatgtcaacttgacacaagctagagtcattttgaagcttcaatggagaaggcgtccctgcctagactggcctatgagcaagcctgtggtacgttttcttgattcatgtaagagaactcagctaccgtgagtaccgtgggccgtgctacccctggactaagaaagcaggccaaacaaggcagtcagcagcgccccgccatggcctcagcatcagccccctgcctccgggttccgggttccgggttcccactcttcctgccctgacttccttcagtgagggactgggctgtggaagtgtgagctgaaagaactcttacttctaacggtgcttttggtcatggcgtcttatcacagcggtacaaaccccaactgagacaagttggtcccgagctgtggggtgttgctgtgatggacctgaccacgtgttttgggaggatcgtggaaagagtttggaacttgaggccggaagagccacggagtgctcgcgtctatctcattgggccggtctgtgggagctcggcttcctggaggattaggtggtgcacctgagagcagcctggctggccaaagtcccagcggaagcttgagagcgagcgccttaaagactcttctctgggccgctgcttattttgagtcaggaatctgtggttctggtcagctggggctaaagagtgagctgtgattagcaagagaccggccccactgaagtgaacgaaagcctaaccggtctgagacaattggcatccattagctggctctgagaagtgagcggatggcaaatccagatgcgcttccttagggtcagcacacagaagctgtgatccagagggggccaaggctgcgtctcacgtgctgtttgaacttgatcatgtgtaggagtcacccaggtggtactggttttgaagacatgaagggatcacggggaacagctgtggctttgtgtggtgtggcctggagtccctatagagagcccaggagaggctgtgggtgaaggtgcagcccggtgggcagtaggtgccccgggattgaaggggtcatggatacaagttgaggcttggaaccatgtggcagggttagagctcccgagagagcccaggagaggctatgggtgaaggtacagctggttgcagagacccccatgttttggagatgtcagtaccatggaatggccaccaaggactgcggcagtggtggcacggatccggcctgagcttaggggacgagctgctgtgacaagccctttggagcccagagaatcatgagtatggcaagtctgtctttgcgccttaactattagatttttggctgtgtcttgatctgattgtgccctggttccgtcctctcggaataaaaatgtatttaacttactttgatttttctctgcaggagcccacagctgagagannnnnnnnnnnnnnnnnnnnnnnnnnnnnnnnnnnnnnnnnnnnnnnnnnnnnnnnnnnnnnnnnnnnnnnnnnnnnnnnnnnnnnnnnnnnnnnnnnnnnnnnnnnnnnnnnnnnnnnnnnnnnnnnnnnnnnnnnnnnnnnnnnnnnnnnnnnnnnnnnnnnnnnnnnnnnnnnnnnnnnnnnnnnnnnnnnnnnnnnnnnnnnnnnnnnnnnnnnnnnnnnnnnnnnnnnnnnnnnnnnnnnnnnnnnnnnnnnnnnnnnnnnnnnnnnnnnnnnnnnnnnnnnnnnnnnnnnnnnnnnnnnnnnnnnnnnnnnnnnnnnnnnnnnnnnnnnnnnnnnnnnnnaaaaaaaaaaaaaaaaaaaaagttgggatggtttgaattgtgatattgatataagatcttgagaatgaggaagtaaggaaatttatggtttctcggcgatgtgcttgtgtgacaagaagtcaattgagcaagccataagctgtgttctttcctagcctctgcatcagctcctgcctccttgccctgcttgagtttctgccctgacttcccttggtgatggactgtgtgacctacaaataagggaaataagctcttcccttggtcatggcgtttcgtggaggcagtagaaaccctgactagggcaactatcatcattgccatcaacaccttccccttctccccccctccccctccccctttcactgagtggccctgactcaaacaggcaagttttttgtggctgttgttttttatttttaaattcagtatgtttgtagaagtttttaggtggcttaaaattaaaatcagagggactgagattagatggctcagacctgctcttgcagaggaaaaggtttagtttccagcacccgcatgctggctctcaactgtctgtaactccagttcctggggatccaacactctcctccgcctccgtggtcaccaggcatgcctgtggtgtgcatatacatgagtgcagacagacagtactgcatgtcaaaataaaatgtaagcctcaaaaagcaagctaaaaagcgggagggaggggtcggatctgtcctcttggatttgtgtcttttgggggatttgtgttttttgggggaggagctcttttgcatcatggcccgtgaatgggagactcacaccttgaaagctgccctgcccgagcctctgtcttcccaagcagaatactggacccaactggtatgtggtggtgttaggtcaggtctgcgtcccacagacctcccttctggagggaggttttcctgggctggcgagcctgcaggctgagccgtgctgtgtggtcagattgcatgtgctagtggacggtcagccctaggagccaagtggggaggcttggtcccttgtcctcagcttgcagccacctacccaggaggaaaggaagtgtgcatagctcacaggcgagaatgaggccgccatgtaaaggacctggttatgtggccttctgcagtagccacagccactccgtgcacttacaacaattctccctggtggcagataataccatggcatttagtctgcaggacatcagctcagtgcccagtcggtctcagagcacttggagatgttttcattatatgcatacatctgtagaaagatctcaacctgtgaaagctgtatatagcgagacttgaaatgtctccttcctccccgcccttgtcctccctcctcttctccaggcaagcccaccttgtcctccttccagcctctctctatgaacttagaaagcgcgtaatggtgcgagttttgacccacaggggtttcgctcttttccacatgtgtggacatatttatttttaagtgcgtaaacaatgggagccattgtgtacactgctttgcaaactggcttgttttacaactcagtatgacttggacgtgtgccagggtcaggctgcctttgcatgagcgtgggggagtatttctacgggacacctatgctgtcgtgtgtttaaccgtacttctacgaatgggttactcccttaaaatccaacacgctggtggaaggatagagagaaatcaagtctgcccgacctgaaaacttcctccaggtgccgacattcgccgtgcaggcctctggggaagaaaaagtcgtcagggatctcacagcaagctcttcctgctacagttcccggtcaaagatgagccgcgaaggttacagggataaccaaacgctgtggcccgctcagcaggagagaattcctgcttggcgctgtgaacctggaccaaagcccacggctccagaggttataggctgcggtagaggaaagtgctactgttgtttgctaaccggatgtgttgtcagacttccttttaaatattcatgtttatgccccctcttagttagggtgtctattgctgtgataaaagatcgtggcctaaagcacgcgggagggaagggtttactgcggcttacaccccacccaccacgctccctcactgagggaatgatgctggaacagaactgaggcgtgaaagcagaccatttactggcctgctctagcctgctcacctactttcttacaggagtcaggacagcctgccccagggtgggggtggggggaggggggagctgaggtacagaggtcagaggaaaacctgcagaggtgggggcccagggaactgagccaccacgcttggctgtcagaacctgctattcttattctttcctttctgggctttttctgtctaaaactagatgcttatctcattaattttgagatttttttcttttcagcgggactgtgggtgcacacacttttaatcccagcactcgggaggtagaggcaggcagacccttgagttcgaggccagcctggcctacatacgggagtgagctccaagacagtcagagctacacagagaaactctgtctccaaataaatacgtttaaattaaataaataaaaggattttcttctcttctaaggtaaacattcaaagctacattttatataatcacgtgggcaatgtacatgcaattctgattatttccaagtttatgtagactttgttttgtttctatagttttatagtgttttatagtgttccctgggttcttctggtctttgacttgagtataaaccagtcagggagcctggtcgtggttctctcacctttacagtgggtcattttggtcaatagttccctgtgtggtagggaagaacaggccttctcctgtccaagctgcaccaagccctggggcaggggaataactggaacctcacacagcagctgggaatgaaccactttaggcagctgccgtgcagtatctgaaatcagcaaatatcagtgaagcagcacaccctcccccaaggaagacctcatacaggaatgttgtccaaccagattcacctttggtcccctgacacaagagccaacagtgtcctgggacctcctcctctctgtagtagcactatgacagggggtgaatatggccagagtcggggggggggggggtcagggggagcatgcacatggcaaaacatcatgtacaactaagaaatgctgacttaaacaaacaaacaaacaaacaaacaaactttcaaataaagaaatgggagtttcaggattgcactgggtctggtctctttggttggtgctctgtttgtgacatcctaatagtgagaaatggttttccatctttcttatttatttatttatttatttatttatttatgagacatggtttctctgtgtaggcctggctgcctggaaattgtcttccagactggccttgaactccgggatccacctgcatccagaggtctgtgccaccaccacctggtttcgttctatagctgccctcaccatttcaaggttccaggctcttaaactgtgcgggatgaggtagcctccagctgttccactctggctcctctggcctcaggacttaaccaaggtgtaacaaaagcgcttcaccaacttgggaaacaggctttgagctatggccccgcccatccctagggaagccttaaaaataaggggcttctgcctcctccccacatctctcccccttcctctctacccctgccccccttttatgggaaccatggttcctatggtcacctgccatctccccccagctttcctcccacccagccccattaaagctcattgtctggagggtaattttgtatccactccccagcctctttctctgtctgcttaacaatcagagtagctctcctatcccctctagagaggagaaacttatatatccatcagctgagtgttgggtaactaagtccaagtttgctttaaagaacaaagccagtggcccacgcttttaatcccagcactagggaggcagaggcaggcggatttctgagtttgaggccagcctggtctacaaaatgagttccaggacagccagggctacacagagaaaccctgttttgaaaaacaaaaaaaaaaaaaaaaaaaaaagaaaagaaaaaagaacgaagccaggtagtggtggcacatgcctttaatcccagttctctaaaggcaggaggatctcctagttcgaggccagcttggtctacaagctaacagagaaagcaattatctttccaaaagatggaaaaaccatttctggctattaggatgttgcaaacagaacacctgccaaagagcccagattattgtgagactccatttctttttttgaaggtttttttttttttaaatcagcatctattagttgtaagcaatgttttgtttcgtcatgacattttctttttccttatttatttatctatctatttatttatctatctatctatttatttatttatttattatgtctacaccattctgcctgcatttatgcctgcaatccagaagagggcatcagatggttgtgagccaccatgtggttgctgggatttgaactcaggacctctggaagagcagccagtgctcttaaccactgagccatctctccggcccccacaaccccccatcatgacattttca

SEQ ID NO: 1569 - DNA, 823 bp, Mus musculus
acacgtcgggtgcgaggttcctgcggactagcggtggcttcgcgtgggtggaggaggcgcggctgcagtctttaagaaatagaaatggcttccaaaagagctctggtcatcctggccaaaggagcagaggagatggagacagtgattcctgtggatgtcatgcggcgagccgggatcaaagtcactgttgcaggcttggctgggaaggaccccgtgcagtgtagccgtgatgtaatgatttgtccagataccagtctggaagatgcaaaaacgcagggaccatacgatgtggtggttcttccaggaggaaatctgggtgcacagaatttatctgagtcgcctatggtgaaggagatcctcaaggagcaggagagcaggaagggcctcatagctgccatctgtgcaggtcctacggctctgttggctcacgaagtaggttttggatgcaaggtcacaacacacccactggctaaggacaaaatgatgaatggcagtcactacagctactcagagagccgcgtggagaaggacggcctgatcctcaccagccgcgggccggggaccagctttgagtttgcactagccattgtggaggcactcgtggggaaagacatggccaaccaagtgaaggcaccgcttgttctcaaagactagagcccaagccctgggccccacgcttgagcaggcattggaagcccactggtgtgtccagagcccagggaacctcagcagtagtatgtgaagcagccgccacacggggctctcatcccgggtctgtatgtttctgaaccttgctagtagaataaacagtttaccaagctcc

SEQ ID NO: 1570 - protein, 188 aa, Mus musculus
EIEMASKRALVILAKGAEEMVIPVDVMRRAGIKVTVAGLAGKDPVQCSRDVMICPDTSLEDAKTQGPYDVVVLPGGNLGAQNLSESPMVKEILKEQESRKGLIAAICAGPTALLAHEVGFGCKVTTHPLAKDKMMNGSHYSYSESRVEKDGLILTSRGPGTSFEFAIVEALVGKDMANQVKAPLVLKD

SEQ ID NO: 1571 - DNA, 43578 bp, Homo sapiens
aaagttttgctagattcaagtgtctaccgctgggtggaatatggattttgccttgcccattgacagaaatactggtgtaactccttgatcactgtatgtctccaaagcattggaatttgaaagcattatggaaacagaattagagaattataacaggaaatagtaagggactcaacatttcaactcctttgagcttgttttatgtaagatctcactaggtcctcaccaacctctgggcaggcattgctattcacatttgcaagtaagttatcgtaaaggctttttgataacccctgactgaaaccctaagtaatgggatcttactctcacttcaagaaataagatcctctccctctccctctccctctccctctccctctctctccacggtctccttccacggtctccctctgatgccgagccaaagctggacggtactgctgccatctcggctcactgcaacctccctgcctgattctcctgcctcagcctgccgagtgcctgcgcacgccgccacgcctgactggttttcgttttttttttttgtggagacggggttttgctgtgttggccgggctggtctccagctcctaaccacgagtgatccgccagcctcggcctcccgaggtgccgggattgcagacggagtctcgttcactcagtgctcaatggtgcccaggctggagtgcagtggcgtgatctcggctcgctacaacctccacctcccagccgcctgccttggccccccaaagtgccgagattgcagcctctgcccagccgccaccccgtctgggaagtgaggagcgtctctgcctggccccccatcgtctgggatacgaggagcctctctgcctggctgcccagtctggaaagtgaggagcgtccctgcccggccgccatcccatctaggaagcgaggagcgcctcttccccgccgccatcccatctaggaagtgaggagcgtctctgcccggccacccatcgtctgagatgtggggagcacctctgccccgccgccctgtctgggatgtgaggagcgcctctgctgggccgcaaccctgtctgggaggtgaggagcgtctctgcccggccgccccgtctgagaagtgagaaaaccctctgcctggcaaccgccccgtctgagaagtgaggagcccctccgtccggcagccaccccgtctgggaagtgaggagcgtctccgcccggcagccaccccgtctgggagggaggtggggggggggtcagccccctgcccggccagctgccctgtccgggaggtgaggggctcctctgcccggccagccgccccgtccgggagggaggtgggggggtcagccccccgcccggccagccgccccgtccgggagggaggtgggggatcagccccccacccggccagccgccccgtccgggagggaggtgggggggtcagcccccccacccggccagccgccctatccaggaggtgaggggcgcctctgcccggccgcccctactgggaagtgaggagcccctctgcctggccagccgccccgtccgggagggtggtgggggggtcagccccccgcccggccagccgccccatccgggaggtgaggggcgcttctgcccggccgcccctactgggaagtgaggagcccctctgcccggccaggaccccgtctgggaggtgtgcccagcggctcattggggatgggccatgatgacaatggcggttttgtggaatagaaaggcgggaagggtggggaaaaaattgagaaatcggatggttgccgggtctgtgtggatagaagtagacatgggagacttttcattttgttctgtactaagaaaaattcttctgccttggaaaaaaaaaaaaaaaaaaaagaaataagatgctggctgggggcggtggctcatgcctgtgatccgaaaactttgtgaggccaaggcgggaggatcgcttgagcccaggggttcaatataagccttggcaacatagcaagaccccgtctctacttctcagaaagaaaacaaaagaaataagatgccatggaagggatggcaataagcgttttccataaacaacccgagagagagaaacagaaaacgctgtccaagctaagccttgcttccacactgggctttgcagattttccaatgagccaccaacgaggtggttaaaacatcagagactgcatccgattccccaagacaccaaggctctcgggatgggaacaggcaaatcgtcgtcgttctttgctgagcctgcgggctgcggtcaccagaacgaatctgggcccagcaggtgccaagggctcgacctcccgccttgcatccggcaggccgcacacacccctcggaagtcggcgagatcgctgaggcaaagcgactccagggcgcagagacccacacgcgacgctctaaaggaagtgacctttaggggctgttactctcagaccaggcccagcagcacccggcgcatttacgtcggatctgacccctgcaagcaccggcgcgaccgcgctagcggctgggaacacgcgacggtcccgcccactgcgacctgactcggccaatcccgggtggcgcatgctgcggccgccggaagtggacctacgtcatgcaggtcagtcggtaggtttccggcgcccagcgccccgtgggagttgtgtctggtggcccacgctgggggggggctcttcacactggtgggcgcagaggcgaagccgttcccagggcccctcacagaactcggtgtcagaatttccccccttgcaccagcgccgcctcaaatgtcagggctcgcccactcttctccggtctcgccgacataaccttttgggggctccagaggggaaatttgccgtttctgccggaccgctctagagcgtgcctgaacccggcctttatgggatgttgacagctacgtttattcagtgccccagaggccttctttatgcccagtaactacaatttaaattccttctctgcttcattttgtagtcgtctggtgaatttgacgtgagaaataagattaaaataggaataagaaattagttgaaatcacattgtagagttctgcaaatgtaaaatattaatttatagcaataaagcaggctgtcaaataacagaggatgaaagcaggataatacttggtcagaacctgctgtatgccaggggctgtgacagatgctggggattcagcaaccaccaagacaagaaggttcttccggcgttcacaggactaggggaagacacaataaataactaaaggcaaaatgctagaatgatgcgctctctctcaagatgaaatatagaacatgatttattttttatttttattttattttattttgagacggagtttcgctcttgttgcccaggctggagtgcaatggtgcgatctaggctcactgctacctccgcttcccgggttcaagcgattctcctgcttcagcctcccgaaagtagctgggattacaggtgcctgccactacgcccggctaatttttttgtatttttagtagagacagggtttccccatgttggccagggtggtctggaactcctaacctcaggtgatccacccgcctcggcttcccaaagtgctgggattacaggtgtgagccactgcgcccagccgagaacgatttattttagagtgtttacttaatgagatgcctaatgtaagagtgacccatggaaaaataataacttggcagcagttttttttgccgctaagatcaggacaattctgaggggagttttgttttggaacgatgaccagatggccatgggtggctattactaacactgtcaatgccatttctctgttattgccttgtgacctccacaggcagagcaatatttcatcattaaaagttgcaactgctatgagaagctacgttccttgaaaacagagtttttggccaggaatagttgcttatgcctgtagttccagctacttgggaggctgaggcaggaggatcccttaagcccaggaggtggaggccaacctgggcaacatagccaggcccggtctctaaaaatgaaataaaaccggcagtttcttccttcgtacctcccgcagtgcataaagagttgtcaaatgttgagttaaaaaggtagtggataggatggggcggttctgcctggaaattggagactgaactaggaagtgtcttcgttgtcagtactacagcagtattttttggtaaatggtttaattttttggttttatcttatgaatgtgtgatgagaaatatgcatgaactatagagtgtcttaagtgtaactgacttttaatattgacagtatatggtgggtagagtgtgaaatttagcatcagaaatctgaatttgaccaagactgcaggaccttatacagtcatttcacccttctggacctcaaccttcacatccgtggaaggaaaattgtaacacctgccaggaagtcaatatataaggtctaaagatgataaatgagaaataaaatattagcatactgtttcaaaatactgatacactaccagaagaaacagttgaaagagttgaaaatacttgcttctggggagcagggctgaggggaaggactgagttagagggctgctgctgcatggattcactactgctctgtagcaaaacctggctgctacagttcaccgttgggttgtagtaactctgtttcaggttgttagttgtgcaggttggctagggccgctctgttccacatgttcattctgaaacccaggttgagggaacagcagcaacttgcctgggggaaaagctcttcctacagcaattcaaaagtagaagagcacaacctaataatcagggcagacttttcaaggctttgttacaggtgtctgttaacattccatggaccaaaacaaggccaaacccaaaatcaagggacaggaagtagactccacccatgcaggtggaaggggagtgactatttctgaaaaataatccaatctgccgcaagtaatacttgactttttaaaactgtgcagtgtattcacttggtaagaattaatgctgactgtggtccatttcaggtcttgatggtgatgcgtatgtctcaggaatgttaactccagttcattctctctggctctcactgctgaaacatctgtcatctttaggctatcgtggctgtctcatgctgtagcagaccaggagcaggagcattggtgactccttttaggagtttaccacggggcccgggctcggtggctcacgcatgtaatcccagcactttgggaggccgaggctggtggatcacttgaggtcaggagtttgagaccagcctgaccaacatggtaaaaccctgtctctactaaaaacacagaaaatttagctgggcgtggtggtgcttgcctgtaaccccagctactcaggagtctgaggcaggggaatcacttgaaccccggaggcagaggttgcagtgagctaagatcatgcccccacactccagcctgggtgacagagagactcaaaaaaaaagtttaccacgcagactggatcaaaaaagcctgtcttcttttggttttccttccatctaactgtatccctccttggttctagaagcacacatctgaccacttgtctttcctctttctctgtcattcctgttttccacactccttcacagctgcttcctttgcaaatagccaaaagtgaagtcattccagaactcctaaaagtttcttcttaaatgtcatatgattaaagacatttcagacttttgcacaagttcagtgttcatcaattattcacattttttttttttttttttagagacacagtctcactctgtcatccagcctggagtgcagtggcatgagatcatgacccactgcagccttgacctcctgggctcaagtgattcccccgctgcgctgtcagcctctcaagtagctgggacccataggcgtgtaatttttaaaattttttgtagagacagggtcttgccatgttgtccaggctggtccccaactcctgggctcaaacaatcctcccgcctcggcctcccagagtgttgggatgagacaccccgcacagctccaatttttaaaattaaataaaataacacactcaccatcattgtaagaatcacatgaaatataccaaagtgctttgtaaactaacaaaaaatttatttcttgaaataaatgtggccaggtgcagtggctcacaactgtaatcccagcactttgggaggccgaggtgggcagatcacttgaggtcaggagtttgagaccagtttggccaacatggtgaaaccccgtctctaataaaaatacaaaaattagttgggcatgatggtgcacgcctgtagtcccagctactcgggagactgaggtacgagaattgcttgaacctgggagacagaggttgcagtgagccgagatggtgccactacacgccagcctggatgacagagcaagactctgtctcaaaacaaaaacaaaaacaaaacaaagaaaataaacgtgattttttttttttttttgagacaagagtctcgctctgtcacccaggctggagtgtagtggtgcgatctcagctcacttcagcctccgcctcccaggttcaagcaattcccctgcttcagcctcccgagtaattgggactacaggtgcaagccaccatgcccagctaatttttgtatttttagtagagaccgggtttcaccatgttggccaggatggtctcgatctcttgacctcgtgatctgcccaccttggcctcccaaagtgctgggattacaggcacgcaccaccgcgcctggccagaaacgcgattttaatatctaaattgaaaccttaaaaacactgatgtatttaggccaggtgctgtggctcacacctgtaatcccagcactgtgggaggccgaggtgggcagatcacttgaggtcaggagtttgagactagcctggccaacatggtgaaagctcatctctactaaaaatacaaaaattagccaggcatgatggcaggtgcctgcaatcccagctactctagaggctgaggtgggagaattgcttgaacctgggaggcggaggttgcaatgagctgagattgcaccattgcactccagcctgggcaacagagcgagactctgtctcaaaaaaaaaaaaaaaagaaaagaaaagaaattactagaagaaaacactgggggggggggggccaggcacggtggctcacacctgtaatcccagcactttgggaggctgaggcaagtggatcacctgaggttaggagttcgagaccagcctgggaaacatggtgaatccctgtctggactaaaatacaaaaattagacaggcatgatggagggtgcctgtaatcccagatactcgggaggctgagacagagaatcgcttgaacccaggagacagtggttgcagtgagccaagattgcgccactgcactccagcctaggcggctgagcgagactccatctcaaaaaaaaaaaaaaaagaaaagaaaagaaagaaaacactggggaaatgttccagggtattgatctgggcaaagacctcaaagcacagacaacaaaagcaaaaacagacaaatggaattacatcaaactaaaaagtatatgcacagcaaaggaaacaacaaagcaaagagacaacacacagaatgggagaaaatatttgcaaactatccatttgatgagggactaatgactagaatatattaggagctcaatagcaagaaaacaatcagatttaaaagtgggcaaaagatctgaatagacatttctgaagagatacaaatggccaagagatatgaaaaagggctcaatgtcactaatcagagaaatgcaaataaagacagtaagatatcatctcatcccagttaaaatggcctttatcaaaaagggaataacatgctgagatggatgtgaagaaggaacctcatacactgttggcgagcatctcaattagtgcagccactatggaaaacaatatggaatcctcagaagattaacttctgagaaatcataagttctggaatcataactaccatatgatccagcaatcccactaccggtatataccaaaaagaaaggaagggccaggcacggtagctcacgcctataatcccagcactttgggaggccgaggcaggcagatcacttggggtcaggagttcaagaccagcctggccaacatagtaaaaccctgtctctactaaaaatacaaaaattagccaggcatggtggcacacacctgtagtctcagctactcgaaagactgaggcacgagaattgtttcaacacagaggcagaggttgcagtgagccaagatggtgccactgcacttcaggctaggcgacagagcaagatggagtctcaaaaaaaaaaaaaaagaaagaaaatcaatatatcaaagagatatttgcactcctatgcttattgtagcactgttcacaacagtcaaaatatggaatcaaccaaaatgttcatcaatggatgactggataaataaaatgtaaatatacacaatgaatactattcagccataaaaaataataaaatcctatttgcaacaacattgatggaactggaggtcattatgttaagtgaaacaagccaggcaaagaaagacaagcatcacatgatttcactcataaatgggaagttgaaaagtggatatcatgaagataagttggtggttaccagaggccaggaagggtagccaggagaaggggatgaacagggtgattaataggtacaaaaattggtagaagtgctgggcaaggtgtcaagagccccagcatcagaaagtggtcgacttgctggttggtaagaagaatttatcgacaacaatataggtttgaaaaaggaaagttttattagaacgctgcagaagagtgcagcctcagcaagagagaactgagcatgccgcggtggatttttcatgtcccttttcgaatgtctcattttttgcaaattcaatccaagttgcgttcatttagccaggatccttctaagctcattcaagaattttgggctttaactatttcctttgatttaacctggtaccaggtgccaactttagataatagggatatctaattacttctaaattcctcagataaggggcctgcttgatggtcaccaggtgatctgtgctctccttaagagggaataagacctagcgttggcagagttctgtagggtgactatagttaacagtaatctgttgtatattttaaaatgttattattgaagagagtaactggaatgttcccagtataaagacaaatgtttaaggtgatagagatctcatttaccctgatttaatcattacacattatatgaaagtatcaaaataccacatgtacccagaaaacacatacgtctcttacatatcaataaatacaacttgagattatgatgtaaatacatctgaccaacttggtacttattagacttatgtgcgcagcactgctctagtcctgtgggtgcagcagcatcaggatcgttaaagaaaacaaacaatgctgagaaaaaaactcacacccctgagacatccgggtgtgaataaatgcggcagagtcgcccgagatcgggagaccaggcgtgggggagaggtccgggaggcctggaccagagtcctaacagaccagaggcgaaacgggaaggcgcgccagaaaaggaacaacgcaaagggagcaggcgtgcacggagcgcgaactaaggaacccctctgacaaccccagtccctcggcagttccagagaccggctcctcacggagggtggcggtagagactgttaagccccgcgggcgccggggcaggccggactgtgccattcgtggggggtaccatgtgggaccgagccgcctcacccagggctgtccagctagaaactccccggtgccacccccgcctcagtccgaggtagactcggccggacgtgacgcagcgtgaggccaaggcggcgtgagtctgcgcagtgtggggctgagggaggccggacggcgcgcgtgcgtgctggcgtgcgttcattttcagcctggtgtggggtgagtggtacccaacgggccggggcgccgcgtccgcaggaagaggcgcggggtgcaggtcagcgccagcgggggcgcggcgcatgtgtgggccgtggcgctgggcggcgtgggggtgctggacggtgtccctgtgctggacggtgtcccgctggctcagaaccggcgcggggcctgggtcggggccgccctcgcttccggcctcccagtcgggccctgtcgctggcgttggatttgactgaccgccagcgtggtggcaacgctgaagcgtccagaatcttctgcctaacctctcgccggcatggaactggctagccgttttattaaactctgttttgcgtggacggtaaaccctccagataatctgtaaataggctaaaaaaaattcggaacctcgttgagctgctgtcgttggcagtgagaactccgcgcagagagacagatgtagttgggttgacttcagtgaggggatttccatctttctcagtcattaaaaaaagtgttcagacatttaacactgttgacccccacacacaattttttagtacagttataactaagaaaacaaaaatcccctccaaaaaattacaagttaattgcgaaagaccacatttaaatttttgcccatgaaattcagtttagtcgtttctctgaaacagtgcttcaaaaaagactgtttccccgcattgtgtgaaatgcaggagacccacgtacttgtatttttaaaaaacccatttgcaacatactattaaagttggatttaagagaacatggtagaagaaaatctaagcaatactacaccttttagcaccctcattatgttttcatctcagagcaattaaaactgctatacaaatcaacgttaagataactaaactgctgcttttttcgtattcagttgtctatgaaaaccgtttccctaggaagtacttactctgcttgaaaatgctcctaaactttaaattttggggtatctcagggttgcaatgaaagttttttgaaatctttttttttttttttttttaaggcttgtaaacatataacataaaaatggcttccaaaagagctctggtcatcctggctaaaggagcagaggaaatggagacggtcatccctgtagatgtcatgaggcgagctggggtaagtcccacatcgatttttagccattcctgttttaaatgtttttggatttttaaatcattttgaataaaatattcaaagtgctctatgaaatatttcaaatatacacaaaatttcagagatgacataagaataaatacctgttgatccactgctcacatttaacgcttgttaatgtcttgccatatttccttcagacccatttctcttttgttttgagctctgtcgtccaggctggagtgcgatggcaggatcttggctcatttcggtctctgcctcctgggcccaaaccatcttcccacctcagcctcccaaatagctgagactacagatgcgtgccaccacacctggctaatttttgtatgttttgtagagacagggttttgccatgttgcccaggctgctctccaactcctgagctcaagttgtccacccgcctcaggcctcccaaagtgttaggactacaggcgtgagccactgcactgtccttagacccatttcttttttcttctttttttttttttttgagatggtgtctctctgtgtcgctcagcctggaacgcagtggtgtgatctctgctcgctgcaacctctgcctcccgggttcaagagattctcctgcctcaccctcagctgggattacaggtgtccgccaccacgcccggctaattgtatttttagtacagatggggtttcaccatgttggccaggttggtctcgaactcctggcttcaagtgacccgcccgccttagccttttacagtgctgggattacaggcaggagccaccatgcccggcccctcagactcgtttcttaaagagcagatgcttcaaagaaatacatttgaagccccctttgtaaatttctccaatcctatgccccttcttccttccttaaagataagtgctatcctcgcactcttgtgtatccatgcatgtgtgtctttttttttttttttaagacagagtcttgctctgtcacccaggctggagtgcagtggtgtgacctcagctcactgcaacttctgcctcctgggttcaagcagttctctgcctcagcctcccaagtagctgggattacaggtgcgcaccaccatgcctggctaattttttgtatttttagtagatggggtttcaccatcttggccaggctggtcttgaactcttgacctcgtgatccacccacctcggcctcccaaagtgctgtgattacagatgtgagctactgcacccgcccccacgcatgtctttaaggtagcatttgaccgtggttctcattttgcgtgtttatatattatctctctctatctaaaaatagtgaacagtgaagtgaagtagaactaactctgtgccaggcagcattctaagtgccgataaaccttacaacaatgtcgtgagttagatatcaccatcctcattttacagttgaagaaactgaggcacagagacataaataatgtacccacatcacgtagtaagtacaaaagccagaactcagacccaggcagcctggccccagagtctgttaaccctatactcctctggttctcagaaatgaagatacatgtcgattaagtttatccacttaaaattgctgcttggtgttgcactgaatgccacaatctacccattcctctaattacagcattacaattctgtaatacgtattcttgtgtaggtttctttgtgcaaatgtgaggaaatttttccaggttatatatctaaaagtagaatgactaggccgaaggatagcccgtagtcagcatgactaggttttgccaagttgctctccagtgtcccagtttgtagtcccaccagcagtgtaggaaaattcccactttcccagtgccagctcttggtattgttgactttaaaaatttttgaaagataaagcagtatttcgttgtttggacttgcatttctattttacaaaaataccatgaggtttaaatggcaacagtaaacttgcaagatgagttattaataggatgatcatataactggtcacccaaaccagaacatttgtgggagaaagggtgttccagtcccacagagtacagggcagcagctataagtagggtctgtcccgggcaaaccagggtagacctagttattaaatatatttagccagtgtattagcttaaatttggtatagttgtggtgcagtatttcctgtcatgttactttcaaacacagggcagctgtgtaaacgttactctagctgggtgtggtggctcatgtctgtaatcccagctacttgggaggctgaagcaggaggatcatttgagcccaggagctggaggctgcagtaagctatgattgtgtcactgccctctagcccaggtgacagggtgagaccccatctctcttttttctttttttttaaagacagtgttactctgaatttatgtttcagtgttcttaaatatgataacatctttctcgtagattaaggtcaccgttgcaggcctggctggaaaagacccagtacagtgtagccgtgatgtggtcatttgtcctgatgccagccttgaagatgcaaaaaaagaggtttgtaatccatacatggagttattccttcatatggcttctttgtttcttgaaatgtcttaagagtgttgttagcacagactcattttagaaaattattttgcttgaatgtcttcccctgacagattaagagggtgaggactttgtctttctattctgtatctgtagaatgtggcaattgcttgatacagaatgtgcttagtaagtgggtggctggatgggtaggtggccggttggatgtgtggccagatgggtgggttggtgcttagatggatggctgcattgttttcccatcagtatttttctggcttacacaggcatccttgcctcctattacacatttttacctgacataaatcaactgccacattttccattttttattattattatttttgtttagaggaatggtcccactctctcccctaggctggagtccagtggtgcagtcacagctcactgcagcctcaacctcccaggttcaagcaatcctcccacctcaaccccccacgtagctgggactacaggcatgtgccatgcccggccattattttttctaaagatactttcagagttccactgtagttgtgttgttttttcagtatcgttggaattatggctcttacctttaaggacgatggacacttttggaagctagcatccctttcctcagaaacatgctcccccacaggcgcttttgcacactccgtcgtgcggtcagcgtgacaggagtgtggactgtaccctctgacagcagggtcatggcaggaaaggaggcagagtcggctcacagatggctggttgcacactgctgaggaacctggagtgcggttccctgggccgagctgtcctcagatacataggaaaaagtttaatcctttctaataagtttagatttttcattactggattgtagaaaattagactgttggtatttacatgtgatttgttgaaacaaattaaaaatgacaagcagaagtaagtattccaggccaagtgcagtggctcacctgtaatcccagcacttttggaggccaaagtgggaggatcacttgggaccaggagtttgagaccagcctgggcaacatagcgagaccgtttctctttaaattaaaaatttgtaaaagccaggtgtggtggtgcatgcctgtagttctagctacttaagaggctgaggcaagaggatcacttgagcctagacggttgcttgagcccaggaatttgagacagcagtgaactgtgattgtgccattgcccttcagcctgggtgacagagcgagaccctgtctcaaaaataataataatactttttttcatctctgtttgtgtttttgtcatatgatgtctgggcattttaaaacagtggttacctttattttcaatcgacagataataagtgtacatattcatgggatttgtgatgtttccatgcataatatatagtgatcggatcagagtaattagcatatccatcatctcaaacatttctttgtgttgggaacgttcaatatcctccttgctatttgaaactatatatgattgttaactatagtcattctacgggggtatagaacaccagaacctattcctcctatctagctataattttgtatcttttaacaaatctctccctatccccactttctcctatcctccccagcctctagtatcctctgtcctacattatgcttctatgtgatcaatttttttttagctttcacatatgagtgagaacatggagtgtttaatttgctattcctggcttctttcacttaatataatgttctctagttccattcttgtagccacaaatgacaagatttcattcttttttatggctggatagtatcccattgtgtataaatgccacattttctttatgcattcatctgttgttggacctaggttgatttcgtatgttggctagtgtgactgttggtgtagtaaacaagggagtgcaggtgtctcttcagtatactgatttcctttccattggatacatgccaagtagtgggattgctggaccatatggtagttccatttactgtagttttttaaggaagtggttaccttttgtgtgtttttatttttcagtgcagattctaaaaggagtaaaataaattctatactttacacattttcttttgagttttgagctttgcttggttttgaatcaacggtaggatgtttatggtcttaaaagtgattctaagccagccacagtggttcacacctgaaatcctagcactttgtgaggctgaggcaggaggattacctgagcccaggagttttgagactagcctgggcaatgaagcgagaccctgtctctacaaaaataaaaaaaattagctggctgtggtggtgcatgcctgtagtcctagctcctgcagaggctgaagtgggagagttgcttgagcccaggagttcaaggctgtagtgagccacgattgcatcactgcactctagcctgggtgacagaggtgagggcttctctctaaaaaaattttataggttgcactaaatacataatacatttttattttgtaatttgtttaatgactagattttttttaaccactttttaaagtactaaagtattgttggccggccacagtggttcacgcctgtaatcccagcactttgggaggccgagatgggtgtatcacgaggtcaggagtttgagaccagcctggtcaagagggtgaaaccccatctttactaaaaatacacagattagccgggcacagtggtgggtacctgtaatcccagttgcttgggaggctgaggcaggagaatcgcttgaatccgggagacggaagttgcagtgagctgagatcactgcactctaacctgggtgacagagcaagactctgtctcaaaaaaaaaaaaaaaagaaaagaaaaataaataaataaataaaaagtcctaaagtattgttaaaacaatttccgttttgtaatttcaggaagtttgaaattaatttgatttctaggattttttgggggggatactaaaattctccccccgttacatttttcataaagttaagaaaaattttttgtgccttttacttaaaatttgtttctctattaattttatttgtttttttagacagagtcttgctctgttgcccaggctagagtgcggtggtgcagcctcagctcactgcagcctctgcctcctaggttcaagcgattctcctgcctcaaccccccaagtagatgggaccacaggtgtgcaccaccacacccagctaattttcatatttttagtagaaatgggggttttgccatgttggccaggctggtctcgaactcctgagctcaggtaatcttcctgccttggcctcccaaagtgctgggattacagacatgagccagtgtgcccagcctgtttttctattaattttttaagttgttcatgtacattcttgttgaacaataattcaaacaatatagacacatataaagtcaaaatgttaaatgtcctgttctcattctccctctgccccatcccacactactcccattagcaactagagtgtcttcctttgtctgtgactacctgtatacagaatatgtggggtggggtgcttgtggtgattgtacacatacacgcatacatctacacacaaatacatatatccttgtcttttacaggaaggagattatactacccctgctactctgcagcgtggacatccttgcatgtcactacatacaggttttctgcattttttgctagttaaaacaccattccgtcatgtggatacaccttaatttatttaactgttctattggcagataggctatctcctgtacttcccacatttaaaataggaaagtattattggactgtcaatttaatgcacagttgaaatgaaatgtttttgttttctttatgttttaaactgttacagggaccatatgatgtggtggttctaccaggaggtaatctgggcgcacagaatttatctgaggtaaaaaattctactcaattatacctcaataaagctggggggggggaaaaactaaagaatttcagcatctgcttatgttctgttaattttgttattattcaaatatttcgggaggaggctgtgaaaaaaaaatagaaacaactaaaattaacaaaatggtgttatagcattaactcaaacttttttttttttttgagacagagtcttgctctgtggcccaggctggagtgcagtggcacaatctcggctcactgcaatctccgcctcctgggttcaagcagttctcctgcctcagcctctgagtagctgggattgcaggcatgcacccccatgccctgctaatttttatatttttattagagacggggtttcaccatgttggccagtctggtctcaaactcctgacctcgtgatccgcccacctcggcctcccaaagtgctggaattataggcgtgagccaccactcccgacctcaagaaaacatttttaatattttctatggaggtcaggtgcagtggctcaacgtctataatcccagtggtttgggaggctgagacaggaggattgcttgaggccaggagtttgagaccagcctaagtaacacatcgagacgccatctctacaaaaaattttcttttaattagctgggcacggtggtgcacacttgtagtcccagctactcgggaggctatggtgggaggatgacttgaggccagggatttgaggctgcagtgagctgtgaatgcaccactgcattctagcctgggcaacaaagcaagaacctgtcttatcagaaaaaaaaaatgttgccatggaagtaagctgaattggtggaaccgttatgaacagatgtcgatgaatacagtccaaagtaagatgatttggtttttttccaccagcagaagaatgatcagattttgtgttttgagaagggcaaattgtctactcaaagtcttaactgggggaagctgtggggctagggctgccagcaggaatggcaaatgccatcagcagagaccattgttcctcattttaagtcgtatgtgaggagtcagaggccagggtgaggggcacacctgcaggcagagttggggctgccagaagtaagaagtgggttgtgtcagacacaagggatcttttcctgctagattctgttcctctctctgccatctgaaaacacccaaaacaccacattccctcccatttctttctccctggagtacaaaatggcaagggtcaaattgcttcttctgatctttaaatgtggaagagtgcgtttctcttatgagaaatgccttgcttgggtttaagaatataatatagacacattttgatcatttttataccaatgatttagaaatattgttggaaaataggtcagagagcttgtggtttaaactaaaattaaattcttccaaagtttcctagtgagtgattggttagtggcttaatgataactttatgtatttttggttttcttttcactagtctgctgctgtgaaggagatactgaaggagcaggaaaaccggaagggcctgatagccgccatctgtgcaggtgacgtgcaggggcagcctgtgttgcagcgtcattggtgggtggggtagcctttcattcgatggtttgattccaaatagctcttccccttcataaagcatgcagggcatctgtgttggtgtatttagtttgggtggcatgaagttggtgtcatttcagagatgaggacaattgttctgttttctgcctctccatgcctttggtctacatgctgtgaaacttagtgttttccgtgtttggttgacctcggaggaaaataaggccctctggaattcagtaaacagcttgttacagcaagtctctgtgccagaaagtctttgtgccagcacacaatcagcaaaatccatcaaacatcaacacagcagctctgtcctgtgcttgccctgcaaattcagaagcccccatggtgctttccgctggcttctcgggcgtttctgattgtctcagtaccgagtgatcttgggcaccgcattatctgccacataatttagaacaaggacatttggtgcttcgcagatgtcctcttctctttgtaccttagtaatattttattttctcataaccattttaagatccattcttgttgctttcctatcagatgatgttctgccattttggttttttcccatgctgtaatttttgccagcaccttccttgttgtataggtcttcattaaatatttgtcagggccgggcgcagtggctcacgcctgtaatcccagcactttgggaggctgaggcgggcagatcacctgaggtcaggagttcaagaccagcctggccaccatggtgaaaccccatctctactaaaaatacagaaattagccaggcgtggtggcgggcgcctgtaatcccagctactcgggaggctgaggcaggagaatcgcttgaacccgggaggcggaggttgcagtgagccgagattgtgccgttgcactccagcctgggggacacgagcgagacttcgtctcaaaaaaaaaataaaataaaataaaataaatatttgtcagaagagtgaatgaataaacgaatgaatgagtggatggtttggtaaacatcaacatcaaaacatgttgctgttgctattttgttcaatacagtaggcttttcaaaagaagttatgggccagaggtcctggggacttgatacattcgagtatcagtggttctcaatgttcttttggtgcacttgcaaggtcaaagcagatgctactgaggggccaggtgtggtggctcatgcctgtaatctcagcattttgggaggccaaggcagaaggatctcttgaaagccaggagtttgagactaaccttggcaacatagccagacccccatctcaacaaacaaacaaacaaaaaattagccaagcacagtactgcatgcatgtagtcccagctactcaggaggctgagatgggaggatcgcttgaaggcaagagttagaggctgcagtgagctatgattgcactccagcctgggcagcagagtgacaccatgtctttcaaacaaaatgttattcgccttttttcttctcagtctttcaggagtgacatcagagtaggatgataccatcatctgagaatttattattgtgttttaaaaatttcccagttttattaggttgatgtaaaagtaattgtggtttttgccattaaaagtaattggcgtggcacagtggcgcatgcctgtaatctcagcactttgggaagctgaggtgggcagatcgtttgaggtcaggagttcaaaaccagcctggcaaacgtggtgaaatcccgtttctactaaaaatacaaaagttagctgggcatggtggtgcacgcctgtaatcccagctactcgggaggctgaggtgggaggatcacttgaggtcaggagttcgaaaccagcctggctaacatggtgaaaccccgtctctactaaaaatacaaaagttagctgggcagttagctgggtatggtgatgcattcctgtaatcccagctatcaggaggctgaggcaggagaatctattgaacccgggcggcggaggttgcagtgagccgcgattacgccactgcactccagcctgggtgacacagcaagactgtctcaaaaaaaagtaataatttttaatatggcagatgttcatagatataacccacataaaagctaaagggattctaagacctaaatgtttgagaaccgtggcattaggggctgggaagaaccacagaggttgaccaccctggcaggtcttgtacgtgggcttactacaagagtcaccactagccttttgacctgccctgaggctcaggtaattatctctgccaaagggcactgcagtcactgcagcccaagcagctgctcccctctttggagagaaagtcacagatccttgagtttggttttctttggctctgctgctgtgaagcaagcctcagtcctagattctttgaccaaaggaagaaagagtttgggctgagtttgtttccttatgattctgctgaaagtaaaaaccacatgtcagtttgtcctgtgccacaaaagtagcaaaatcacttaaggtcaggagttcgaaaccagcctggccaccatggtgaaaccccatctctactaaaaatacagaaattagccaggcgtggtggcgcgtgcctgtaatcccagctgcttgggaggctgaggcaggagaatcgcttgaacctgggaagtggaggttgcagtgagccaagattgcgccattgcactccagcctgggcaacaagagtgaaactccgtctcaaaaaataaataaaataaaataataaaaataaaaataacaaaaattagcagggcatggtggcgcatgcctgtcgtcctagctacttgggaggctgaggcaggagaatcgcttgaacccgggaggcggagattgcagtgagccgagatcgtgccactgcactccagcctgagcgacagagcaagacttcgtttcaaaaaaaaaaaaaaaaaatcaaccacatttggcttactgttttgtgctgaggctagatggaatgccatgctaagaagcatgggccttatagtactttaaatcaacattaaaaaataaacaggctggctgtggtggctcatagctgtaatcctagcactttgggagactgaggtgggaggatcacttgaacccaggagttcaagaccagcctgggcaacatagtgagacccccccaccgacctctacaaaaaaatattttaaaaaatcagcctggtgtggtggtgcacacttgtagtcccagctactcaggaggctgaggtgggaggatcactttgagcccaggaatttgaggttacattgagatgtggtgatcacaccactgcacttgagcctaaaggacagagcaagacttggtctcttaaaaaaaaaaagtaaaaataggccaagggcggtggctcacacctgtaatcccagcactttgggaggccgaggcgtgcggatcacaaggtcaggagatcgagaccatcctggctaacacggtgaaaccctgtctctcctaaaaatacaaaaaattagccaggcgtggtggcgggtgcctgtagtcccagctactcgggaggctgaggcaggagaatggtgtgaacctggggggcagagcttgcagtgagccgagattgcgccactgctctccagcctgggcgacagagtgagactccatctcaaaaaaaaaaaaattatataaaaaacagtaaaaatagaaaacacactagcagtgtgtttataccattgaatatcctgcaccactgttgtgggcactacaccagaaataggaaaaaatgtgatgatgagctgagctaattgagatgagggttatgggaatggaacagaggagtgatggaagagatttggatcttttaaattggcaaacagaaaaataagattcttttttttttttttttttgttgaaatgggagctttgctcttgttgcccaagctggagtgcagtggtgcaatttcggctcactgcaacctccacctcccaggttcaagcgattctcctgcctcaggctcccgagtagctagaattacaggcacctgccaccatgcccagctaatttttgtatttttggtagagacggggtttcaccatgttagccaggctggtctcgaactcctgatctcgtgatccgcccaccttggcctcccaaagtgctaggattacaggcgtgagccaccgcacccagccaagattattctgaagtgttgcagttagggattggaaacattttgaacacaaagaatattagcctagtccttaatattgagtgaatgaggaacgcaaattggaagggagtctatgttgagaagaaaattaaatgatatttactttgagtaggggagggggaggaagtgtggagttggaggagtggacagttgtcagctgagatgcccaggtctaggaatgaggcctctggaagcaaggtcttggccacctggaggagctggggagttggcagaggtggtcattttgcatgttaccacagggtggtgctgttggctgcagaaggggacatggtcagctgcgccctctgcactgtagtgcagagtacagagcgttttcatccatcagaatcccaggtcctgggagagtgaaacgtctcttctccagtattccaaatagggttctgacgccccagaaagcagtgattatgagcttacctgataagtatgaaagacatcagtaaattcctgaatccaactgtaacataaatttattcacatcgtagcagtgattttattaccaccttgaagggagcagcctaaaaattctcgttcaccgatcactttcctcactgtgctatcatctattaaagtttactttaaaatgcaagatgatgtaggaatttcttcttaaattcttaccaaataaaaattaaaaacaatttataaatccattcaaataaaaattgataattattcaattcttacggacttctaaaatttgctaccatacatagctgtcttgtgtgtaaaaataacgtggagaagagacatttgaggcttttgatttaagagctataaatcaggacttggtctgaaactgacagctgatattaggcagaaagcttatgtaattaggtagtatttgtgtgatcttcctgtttgtaacagctacggtctgagtagcttgtgggtatattatataattccttccttggagtcttgttgaaaaatgaaaggacagtaagaccaagacctctcaggtttgctgacactaaaagtgtacaaactgtgccacaggatcttagccatccagggcaccttaagtgtttccaagatcaaggtgctgttctgaaacgtatccttctaagtgtcatgtgaggccttagaaagaatgtttatatgtgtggcttagaggaaaaaggtagaatgaatactttgtaaaaagctttaagatgaaataacaatgaaaggtatataaaatctttgtttttaatccttatttaggaccattacatacgcaatatgcttgtgaccctccctgaagttggccgttttcagtgaatacatttaaataaaaatctcaagttaggacctgccaatttggaaagacttcatcaactgacacttccatgtggttctttgcttaagtagctttcatcacgtgatgctagtgcctttatatctcacacttccaggcacttcacaggctatctccttcaaggacagtgtgctgtccattttaatcctaccacctggcatacttgggtggataggtggatgaacgagtgttaatttcccattttatttatttattttttatttattttgagacagagtctcgctctgtcgcccaggctggagtgcagtggcacgatcttggctcactgaaagctctgcctcccgggttcaccccattctcctgcctcagcctcccgagtagctgggactacaggcgcccgccaccacgcacagctaattttttgtatttttagtagagacagggttccagcgtgttagccaggatggtcttgatctcctgacctcatgatccagccgccttggcctcccaaagtgctgggaatacaggcatgagccaccgtgcccggcctaatttcccattttcaagtagaaaataagattacaaaagagcaataaaatccagaagttcagagagtaccagttgcctttagcatgtaactaaatctttccttttactaagagtgaggtaagaagttgagcccgccccagtgatcctccccctcctttggactcctggtatatgtggtccctgttctggggatggggaaggtgagagaggtgagcacattttgtttatctgtgtatgctctgctggtatcaaggtaaatcttcttgagtaaatggttattgaagtattttgagtttctgtgcttttgccagatgtgctcagcaaatcgtttgttataaacatactttatctctcatactaggaagtgtttcatttcagaatcgtagctgtatgtttggtaagagcctcttgattttgaagaatactttgctgttgcagtttttgttgttgttagagaaggggtctgtgttgcccaggctgatgttgaattcctgggctcaagcaatttttctacctaggcctccccaattgctgggattacaggcatgagccactgtgccaggcactattgcgattttttaaacatgggcttttctatatctgcacttagatctttttatttttattcttaggtcctactgctctgttggctcatgaaataggttttggaagtaaagttacaacacaccctcttgctaaagacaaaatgatgaatggaggtaagtatatgcttgtttttgtttgtttgtttgttttttgagatggagtctcgctccatcgcccaggctggagtgcagtggcgtgatcttggcttactgcaatccctgcctcccgggttcaagcgattcttctctctcagcctcctgagtagctgggattacaggcgcatgccatcacacccagctaatttttgtatttttagtagagatggagtttcaccatgttggtcaggctggtctcaaactctttttttttttttttttttttttttttttgagacagagtctcgctctgttgcccaggctggagtgccatggtgcgttctctgctcactgcaacttccgcctcccgggttcaagtgattcttctgcctcagcctcctgagtagctgggatcacaggtgtgctccaccacgcctggctaatttttgtattttttagtagagatggggtttctccatgttggtcatgctggtcttgaacttctgaccttgtgatccacccgcctcagcctctgaaagtgctgggattacaggcatgagccaccgcgcccagtctcgaactcttgaccttgtgatctgcctgcctcagcctcccagagtgctgggattacaggtgttagccaccgcgcctggcccatatgcctgtgtgtggtttttttttttttttgagatggagtctctcgctctgttgcccaggctggaatgcagtggtgtgatctcagctcactgcaacctccgcctcccgggttcaagggactctcctgtctcagcctcccgagtagctgggattacaggcatgtgccaccacaagtttcttgtagactgggcacagtggcttccgcctgtaatcccagtactttgggaggctgaggcgggtggatcgcttgagccccgagttcgagaccagcctgggcaacatggttaaactccatctctactaaaaatacaaaaaacattagccaggcatggtgatgcacactggtagttgcagctgctcaggaggctgaggtgggatgatcgctttaagcctgggaggtcaaagctatggtgagctgtgatctcgccactgaactccagcctggaggacaaagcaagaccctatcaaaaaaaaaaaaaaaaaaaagtttcttgtgtacctgtagaattttatctatcacatactcattatcctttttattttaactaaaatgagatctactaaatgtattgttctgcagcttgctttttttaacttaatgttaatatcttatgttatcttttaacagcacatgtagatttagatttgcttcatccttgttaagtacagctgctagtccagtgttggaatgtgccatgctgtatgtaaccttctcctgggggtgggcatgaaggtggttttctgcttttgcccttgtaaaccatgccataatgatcatccttgaatgccgctgtgagcatatctgagctccactttaaaagtgatgcacttttcattatactgcatgttttttaattactaaactttagttttttagagcagttttaggttcacagccaaattcccgtctaccttgacccactcgccactccccaggcccccgcccctggccatgcatagcctcccctactatcaacatcctgcaccagaatctgtacccacattgacacatcatcatccagagtccacagtttacatgagggttctctcttgctgttgtacattctacatacagttacatttgatccagagcagtgttttcctgaaaatccatggtttgtttatttatttaatgtatttgagacagaggcttgctctgtcacccaggcaggagtgcagtggtgtgatctcagttcattgtaacctccacctcttgggatcaggcaatcctctcacctcagcctcccgagtagctggaactatgggtatgagccaccacacttggctaatttttaaatttttttgtagagacagggtctaaccatattgcacagtctggtcttgaactcctggcctcaagcgatccttctggcttggcctcccaaagtactaggattacagatgtgagccactgtgccccgctcatggttttattttagttgctagaaagatactatgttatcattaaaacgatctgtttgaaaattggtactttttgctggatgcagtgactcacgcctgtaatcccagcacttggggaggccggtgggggaggtagatcacgaggtcaggagatcgagaccatcctggctaacacggtgaaaccccgtctctactaaatgtactaaaaaaattagctgggcgtggtggcgggcacctgtagtcccagctactcaggaggctgaggcaggagagtggcgtgaacccaagaggtggagcttgcagtgagctgagatcgtgccactgcactccagcctgggcaacagagtgagactccatctcaaaaaaaaaaaaaaaaattggtactttttaataaaagtctctggtttctgggcattttaaatgtaggaatttaatttactttaagctcatggagggattttagagcgttgaaagaaatggaaagaacagaactgggctccctttgtgatgtcttcagagggaagacaagcggagcgcgctcctgcactacctgaaggtgtgcctgttgcatctgttttcctttagtgcctcaaaaacattgaggttggtcaggcatagaaaaagatcagattgttgatgctcacacttggagtttacaaagcacgttcccgtacgttatcttggtggagcttcctggtccccagtgcccagcaaggcaggtggcatcatcctggcttcacaaacaaggagagactgaggccagagctcaagcccagccctctgccttgcatccagttttggcttcctgcccctcccctgctctgtggtagcaaaaggctcccacacatttaagttaccaggtgttggatttagtcagtaacctctattataagaaatggatacttgaaatgtctactccttcaggacacttcgagaggtagggctgcagtcatcacctgggggtctgctctgggtgaggcccttgtcctcactgtgaacttgaaagatcagtgtgacagtttcttctcagataagcaatcccatctgaagaccatagtcttttttctttttttcttatcttttttttgatagattcagggtctcactatgttgcccaagcagtacttaaactcctgggctcaaatgaccctcccaccttggtctcccaaagtgctggaattacaggtgtgtgctaccagctccagtccccataatcttttaattcctccgattttagaataagtcagttataactgtaatgtgtgattccgtttctcatttgtccactgtttgatggcatccgcatgcctggtcccatacccgagcactgaagagcagggtctctggagcctggcatcgtggggtggccctcagcttccccactcactgtgggaagtttccttagtttctctgagcctgtttcctcatccgttgcctgaggataaacctgcttcaggattgttggtgaaaagacttccctcacctagcttctgtaacgccactgcatgccaccactgctgagtactgtttgtttgctaggttggtgtcattctcattttaccagaaagtgaagctctgagaggtcagacagccactaaatggcagacctgggatttgaacccagaactctgctcaggggtcaactgactgctccccaaaggccaggtggtaaatattgcaggctttctgggacttcagatctctggcagctactcaactgttgcacctccacaatagctacagacagtactaaacacgcagggtggctttgtgccagtgaagctgcatttgcaaaaacaggcagcaacctggcctcggccctcaggcttgtcgttgctgacctgtgtcctgtgtcttttgttttttttttttttttgagacagagtctctctctgtcatccaggctggagtacagtggcacgatctgtgctcacggcaagctccgcctcccaggttcacgccattctcctgcctcagcctcccaagtagctgggactacaggtgcccgccaccacgcctggcttattttttgtatttttagtagagacggggtttcatcgtgttagccaggatggtctcgatctcctgaccttgtgatctgccctcctcggcttccccatgtgctgggattacaggcgtgagccactatgcccagcccccccgccttttttttttttttttttttttttttttgagacggagtcttgctctctcacccaggctgaagtgcagtgacgcatctcggctcactgcaacctccgcctcccgggttcaagtgattctcctgtctcagcctcctgaatagctgggattacaggtactggccgccaggcccagctaatttttgtatttttttttttttttttagtagaggcggggtttcaccatgttggtcaggctggtcttgaaatcctgacctcaggtgatccacctgccttggcgtcccagagtgttggaattaccggcatgagccactgcatccggcttcccattgctttttctctgaagagactttaagacttggagtctggtttaaaaaaaataaagaaataaaaatcaatgccttctgctggttgaacgggaagtgtaaaatctgaattcgctatagggtcacaatcccagcctccagttcgcacagtgccttcctggtgctgatggggtgcatgttctgtcttcgccactaggtggaggcagttggtaaccttaaaccttttgcttctcgtggttaaaagtctgacaagaaccgtagaacctttaagcatatttaaccagtttaagccctgtttgcgatgttttagccacaaagatactgttcagtgaaccatttacagttgtgcctcgcgttgtcccactctcagctgtgcatctcactgtcgctctggaagacctagcccagccagtttctaggttagcatttgaaatggtcttggcctggtttaaccatcagtaaatgaggccagattatgataaaccttttcccctcaaactagggatcctctttttctctacaatagttaaattggaaattgtttatgtactctattcatttattttggtgggtgacctgattttttaaattttttagattagtcaagcacagtagtgagaagaggagaaagagtagaacaaggtgtaactgcctgtgaacgatcaattgagataactcactgccttcgaccagcagtggcttggtttctaatgacagtaagacaagttcctatagccattgttaatctccttggaaaagaaatgaacactgtgtggtttcagaagctcattaatatagcagaagcactctgcttctgtttgaagggaggttttcagatgaatttttctgcgtgttcattgaacagacgtttcctaagctcctccttagtgcctggcactgggaacagaagaaggaagaagagaaagctgtgccctcagggtgttctcaggtccgcactgagcggtggtgaccagagccacccgcctgcctgcgtggccggtgcatcaggatagagcaggagttcacagaggagctttgtcacttccccctccgctaaatctgttctgtggccccacatcactgagtggtgtcaccatcatccagtcacctgggacaggcagctgggagtcatccttgaagcctcctcacctaggccttcattgcaaacctccatttcctctggatcactgtcaccagcctagtgcaggcaccaccagcttctacccagagagcaggttcctttccatctccttctggtcccagcccagtctctgtgcgaaggccagaccgcagagggctccaggccccgtgacatggagttcagcgtgaccttcaggtgctggagagagttggcaagggctttccatggggaactggctatgccctgctttgcactctggacagttagcttttgggtgctgggcatggatcgaaggggcgcacagccggaagggagagctgtaatcatgcagagatccttcccctttaaagcaggggacaggcgagaaaggagatcgagtcaagaatggtgtttggtgcctttgacctcacacttcaggggtgcctcctgtgtgccatggatatcattggccagacagggactgatgaagacccagcctttttaaagagtaaacaataaacaaggaaatgaaatgttcatagattgtgatagattgtatcaatgctgcgagggcagtaaatagaatgcggtgatagagtcaatagaggtacctaatttggggaggtgggggtggtcacagataccctctctgaggggtttttgttgatgctgaaactgaaggagcaaggaactggaaagagctggtctctgggtggagggagcagcccttgagctcttcctggagcaggagagaacgtgttgtatacagtaagggaagctccaggtgggagagtgatagggatgggtgtggggagggaggttaggctctgtgtgcagtggagaggctggtgactacctgctgtggaggggcagagctcagggcatccatgcttaagagtcccagttttggtattatatttgccaagaaatagccaaccggcgggcctggaggtgcggggatgcggaaggaaagtagtccttgagagggaatgtggtttctacctgcacacgcacactcacatgcatacccgcctccattacgttgtgctgtggttgtttttgaggcatcagagggtgtgcgtgccgccacatgttgattggggtggcttctgcgttcagcgctgccgcatcccttcacccttccccggcacttcagaattgacacttgagctttgttgtaaatagtgatgtgagtaactgtcattcaccgacatctcccccaacacttaaagtcttagcagctgcatttaactcacgcatatttgtttcattctaacagtggtttctgtcaccctttgctctgcacagttttaaaaatacctttgtagggggcttctaagagcttggagtgcctagtaaatgtttttgaatggttagctacagtgttgggtttatatgctgtaatagtgaatttaattggtaagtaatcgtctttctcgtcacatagcccattaggatgtcaccttttctgtttctactttgcaggtcattacacctactctgagaatcgtgtggaaaaagacggcctgattcttacaagccgggggcctgggaccagcttcgagtttgcgcttgcaattgttgaagccctgaatggcaaggaggtggcggctcaagtgaaggctccacttgttcttaaagactagagcagcgaactgcgacgatcacttagagaaacaggccgttaggaatccattctcactgtgttcgctctaaacaaaacagtggtaggttaatgtgttcagaagtcgctgtccttactacttttgcggaagtatggaagtcacaactacacagagatttctcagcctacaaattgtgtctatacatttctaagccttgtttgcagaataaacagggcatttagcaaactactgattgtttcttgttttgtctctcatttcttttgtgaaattaaattccgtatcaccttcatttgcagctcttaactgtccatatggcactgaaataaaagaacagtgaccacattttacacagcaaggaggaaaggcatacaaacagaatttaagaggcttgtgattttctctgcttattagctgtgtgtttttaatgtgctattaaaaaataccaatgagggctgggtgtggtggctcatgcctgtaatcccagcactttaggaaaccgagccaggaggattgcttgaggccaggagttcaagaccagcctgggcaacatagcaagtctccatctctacaaaaaaatacaaaaactagccaggcatggtggcatgcacctgtagtcccagctacttaggagcctgaggtgagaggatcacttgagccccagggggtcaaggctacaatgagctgtgatcacaccaccgcaccccagcctgggtgtcacagcgagaccctgtctccaaaaaaaaaaaaaagaaaaaaagttggctgtactggtgaatttttatacaccagttcctttttccattatggaaagagtacttggataaaaacttttcaaggttggcccaacatctcttttcccttccccaggtaatagcacccagcattccttgtgaaccacccagttcctcctgggcgggcacatgatccagacccagccaatccgagccctgtttaccactggccgtgtgacccaggtgagctcagtcagtccacgagactccatccgagggtctcatagctgctggagtggccaagaggatatgctggcaacccagagcactggcagccgtctcgtcactgccagcgaaagacctgcttgggacggctctcacgctgtgggtggctgaccctagtccagaaggctgggcagatgttaacttttacaatgcaaacacatgtgtaattgtctattttagtaagtgctttaacagatgataatgctaagggagagacgatttccatggtggggagtggggagggaggcttctgaggaagtgacatttcaggtgtgaagtaggagcagtgcttaggctttcattccttccccagctgtgtgctcagtcagtacctactgtgtgccaagtgctgttcctgctgctgggaatacgccagggagaaacacagcctttgtccttggggagcttatgttgtgggtgccggggagagatgaaagcaaatacgaaaatacccacattctatgaagaaaattaaggagggtaaggaggcagtgacaggggaattgcatgatgggaagtgaaggcctctccgaaaagagatcttagtgggaatctgaggacttttgggtgtgaaagagacaagtaggtgtctgttcagagcataccaggcagcaggagcagggagtgtagaggccctgccgcaggagcattgagaggcgggttagagaaacatggtaggaggtgaagttggagaggtagccagggccatggtgaggtgtcaagacagagacagaaccaccagagagagacctgacccacctcgttcaaagactggccctgcagagaagagacccttctggagcaggcacgcaggcaggcgggatgctggggccagtcaggtggcagcattgggcacccactcagggtgtgagaggaagggcgtccgggacaacccccactttttttttttttttttttttttgagacagagtcttgctctgttacccaggctggagtgcagtggtacgatgatcccggctcacagcaacctccacctcccaagttcaagcgattctcctgcctcagcctcccgagtagctgggattacagatgtgtgccaccatgcccagctaattttttatttttggtagagacggggttttgccatgttggccaggctggtctcgaactcctggcctcaagtgatccacctgcctcggcctcccaaagtgctgggatttcatgtgtgagccactgcgcccggccacaacccccacatttctgacttgaacacagatcatgtggagattcaatgtcttgagtttgtgaaggagtccttgggggaggggctgggatgaatttagagttcagattggtgaatttgaggtaaaatacacttttgttgtttttttctttagagacaggatctcactctagtctgctggagtgcagtatctcgatctcggctcactgcaacttctgcctcctgggttcaagcaattctcctgcctcagcctcctgagtagctgggactacatgcacgcaccactgtgcccagctaatttttggtattttttgtagagatgaggtttcactgtgttacccaggctggtctcaaactcatagcctcaagtgatccgcctgcctcggcctcccacagtcctgggattacaggcatgagccaccacgcctggccttgttttgtttttgagacagggtctcgctctgttgcccaggctggattgtggtggcgcaactatggctcactgcagcctggtcctccccagctcaagcgatcctcatgccttagccacccaagtagctgagactacaggcacacaccaccatgtccagctagttatttttttgtagagatagggtttcagtatgttgcccaggctggtctcaaactcctgggctcaagtgatcctcttacctcaacctcccaagtgctaggattgcagcgtgagccacagtgcccagcccacttttaataaggaaagaaaactggacacctgctgtttgtttactggatacctgctatttgttttgtttgtttgagacggagtctctctgtctcccaggctgaagtccaatgaatggccctatctcagctcaccacgacctccacctttcaggttcaagcaattctgcctcagcctcccaagtagctgggattacaattgcctgccgccatgcccagctaatttttgcatatttagtagagacagggtttcaccacattggccaggctggtcttgaactcctgacctcaggtgatctgtctgccttagccttccaaagtgctgggattacaggcatgagccaccgtgcccggcggatacctgctatttgaaagtcacaggctgggtgcggtggctaatgcctgtaatcccaacactttgggaggccaaggtgggtggatcacgagttcaggagttcaagaccagcctgattaagatggtgaaaccctgtctctactaaaaactacaaaaattagctgggcgtgatggcggacgcctgtaatcccagctacttgggaggctgaggcaggagaatcgcttgaacccgggcagcagagtttgcagtgagccaagatcacagcactgcactccagcctgggcaacagagtgagattctgtctcaaaaaaaaagaacaaaaagtgaaactgctgatctgaaaaccacttattactaatagtgaacaactgtaaactctctcaagtttgctaggtgttttgccagcatcccttacctctgaataagctccttggaattttagagatatctacaggaagggagatagtgaaagaaattggctctttgagtttttgtgccctcagggcagcaggaaaaggtgtttctagatgagcatttctaaaagagcatctctaaggtaaatcagtattatcagagcccaggcattgtagtgaagattcatttccctttctctgacagtgtttgggatgggggctccaggaaccagctttatctaaaccttgggctttttctggtccttcttgaatgactagcttttggcatgttgataacatttttaaaacctccactctctcttatctgtccacttctttcccaggctgaacaaacttgcttcctaaacttctggtcggggaggggacaaacaaaaattgggaacttaagtgggaggggtgctatctacagttgaaaagtgacctggagtcagaattcagatgtgtgattaagatgtgtggcaggtggcttgactgtgctcctcctgatttgggggtgagggtgtgacaggcgtgagccactgtgcccagccgattttctttcactctttatacaaaaggatcaacttctatccagaatcccaagaggggttgcattcttctgcccctgctttttcacttgtcatatcttcgagaacttctaccagtttgtggacatttatgtgctgcatctccaactctgtctgaccagtaaccctagaaaaagtggtcattggtatcatccattgcagagaagaaagtctttctagaggtcaagagcctactgggcctatgccataggattcatttctgtaactgcaacatcaaatgtaaaatatgattttactttagtagccaactgtatcatctgagtctggttacttactctatattctagggtgttggtttcctaaggaatgaggaggacatcatgttctcctgcagtcagttctcctgtagaattagcttgttttttttagaaaacaccctccctttttagagggaagcagcagcagggacctgggcattcaaggagtgctgggggggatctgggctgctctcagactcttccctgtttattagctacagcatcttccccatgcacacaaggagtctgtcagcacagtgcagaggaaggggctgttccttttcacatctgggctggacacattcttcacggttccagcatgaggcctttccagagctggcccttttcccagaccctagcttgagtcccaaggcatccaggctggggccaagggctcttatgggactgagcactaaggaaggtctttagcactgggaagaatgtgaatgctggattcaccaccatcaccatcaccaccaccacaatcactatcaccatctccatcatcatcaacatccccactgttgtcaccaccaccaccatcactatcaccatcattaccatcaccatcaccatcatcaccatcactaccaccgtcatcaccatcaccctcaccaccctcaccatcaccctcaccactatcaccacactcaccaccacatcaccatcaccaccatcattaccaccagcatcaccctcaccaccatcaccatcaccaccaccatcaccttcaccaccaccaccaccatcaccaccagcatcaccctcaccatcaccctcaccaccaccatcaccacactcaccaccaccatcaccatcaccaccagcatcaccctcaccaccaccatcaccatcaccaccaccatcaccttcaccaccaccaccatcaccaccagcatcaccttcaccatcaccctcaccaccaccatcaccactaccaacaccatcaccctcaccactaccatcatcaccatcaccaccaccatcaccatcaccctcaccaccaccatcaccatcagcatcaccaccaccaccaccaccgtcaccatcattatcaccaccatcatcatctttttcacttcttgcagcttgcaggttcccaaacaagtcccggaccagctgatcagatgggatctccccacagggctgcatacctgctgggcctcagacattcagctacttcacagagctgctttattttgctttgctgtttcaattctgcatgtgatcacattctcagggtttcttttctttttttttttttttttttttttgagatagagtcttgctcttgtcgcccaagctggagtgcagtggcacaatctcggctcactacaacctccacctccctggttcaagcgattctcctccctcagcctcctgagtagctgggattacaggcatgcaccaccacgtccggataatttttatatttttcctggagatggggtttcaccacgttggccaggctggtctcaaattcctgatctcgtgatccacccacctcagcctcccaaagttccgggattacaggcgtgagctaccgcgcccggcaagtattttgtttttaaattcagcctgctcctggaggtttttacttggcttaaaaataacatgagacttgaaagttcattgtcttaaaaaataaagaagaaaagacaaaattgtggctaatggaggtgcaacctccagacacaaaacttggattgatgatggtaaaatctgagagcctgtgttggaagacagcagccaggagcgagatgttgccctctttagatttcacatctttgcttcagtggttttctttaaaggcaagcaaaggtaagtaagccataacaagtgtgcttggttcagatttcttctttccagaagagaataagatttcacaaagtatactgaagagaaagttatgtttcctttttttctttgagatagagtttcactcttgtcgcccaggctggagtgcaatggtgcggtctccgctcactgcaacctccgcctctcgggttcaaaggattctcctgcctcagcctctcaagtagctgggattacaggcgcccaccaccacacccggctaatttttatatttttagtagagatgggatttcactatgttggccaggctggtcttgaactcctgacctcaggtgatccacccacctcggcctcccaaagtgctgggattacaggagtgagccgctgctccaggctgtttccttgttttttagacctagatggaatgtggcctggcgacagtcccgtattcacctggtcctgaaaattcctccctccagccctccgtatctgttgtgcggcggtcttaggccctgcctgcctggcgcctggggccctactgtgctatgtggtcagtcttacaaaatgcagaattctctctatttgcattgctgagtgactagctgaggcaggtagggtgactgggaggaagctttgttacagataacttgacagccgggggcaagttaaaggatgatggtaataaaaggatggtcaggcctcaaatttgggcttcagcagtaaatcagtgcaagaataaaacttacaaaggtcacaggcaagagtgagatcatcctcttttctaatacttgcttatgcttctacatcccttattgaggaatgccagccactcagcacacttatgaaagagtaaattatctccggatggtggataataccatgtcattagtccatgaggcatctagctcagcgccacctgggtcttaaagcacttaaaaatgtaattatacaacaaatacaccaatacctgttcattgggaaagactcaaatgatacatgaatacataaagcaagacttgaaagttctctgtcccgccctccctcccctacctcctcttcctttccccaaagtcccactttgaggtctcgcttacagtctgttttctaggaatttacaaatatgtaactctacacacacatccacacacattatgttttatacatacacagagattgtacattattgtgtcaattttttaaaaataaagtaaggccgagcacagtggctcatgcctgtaatcccagcaccttgggaagccgaggtgggtggatcacctgaggtcaggagttcgagaccagcctggccaacatggtgaaaccgcatctctactaaaaaaaaaaaaatacaaaaattagctgggcctggcgtccggcgcctataagcccagctactcaggaggctaagacaggagaatcgcttgaacccgggaggcggaggttgcagtgagccgagatcacgcaattgcactccagcctgggcaacaagagcaaaactccatctcaaaataaataaataaataaaaacaaaataaaatacataggatcctattgagtatattgttttgcaaattgaattttttgaaacagtatgtcttagaaatctgctcatgttcaagtccactttgtttatgtaatggttgaacagaatgttatagtataaccacactgtaatttaacctttttttttttttttttgagactgagtcttgttctgtcacctaggctggagaataatggtgcgattaagactcactgcagcctccacctcctgggctcaagccattctttcacctcagctgcccgccccttcacccccagtagctggaactacaggtacctggcactgcaggcacatgccaccacacccagctaatttttttgtatttttttgtagagatggggtctcactatgttgtccaggctggtctcaaactcctgggcattcctctattaatggatttcccccattaaatttttttattgcagtaaaatacatacaacatgaaatgtaccatcctaaccattttaagtatacggttcggtggtattagatacattcatcccgttgtgcaagcatcagcaccatccatctcccgaactctttttcatcttgtaaaactgagactctgtatccagtaaacactaactttccttccccctacccctagcccctggcaaccaccattccaccttctctctctgtgaatgagagtaccctcagtacctcctctccgtggaatcacatagtatttgtctttctgtgactggcttattttacttagcaaatcatcctcaacgtccatgttgtggcatgtgttagaatttccttccttttttttttgagaccgagtctcgctctgttgcccaggctagagtgcggtggtgtgatcttggctcaccgcaacctccgcctcccaggttcaagcgattctcctgcctcagctcccaagtagctgggatcacaggcgcgcgcaaccacaccaggctgatttttgtattttttgtacagacggggtttcgctgtgttcttcaggctggcctcaaactcctgacatcaaatgatccgcccgccttggcctctgaaagtgctgggattacaggcgtgagccactgcccctagcccataatttccttcctttttaaggctgaataaaatttaagtgtatgtatgttccacattttgcttatcctttcatccctttatagattcttgggttacttccacctcttagctattgtgaataatgctgctgttaacatggtgtccacagctcttccggaccctgctttcgattctttggggtatacacgcagaagtggaattgctgaatcatatggtcattctcattgtggttttggtttgcattttcctaatgactaatgatgtggagcatcttttcatctgcttattggccatttgtacatcttagatatgtctattcaagtgctttgcccattaaatttttttttccaggggccatgctaataatctgtgttgttccatttttagtatatgtgctactgaagtgtgcactttgcccagttttgaatcgggtttttgttgttgctgctgatatgatttgtttttttttttttttgaaacagagtctcactctgtctcccagactggagtgcaatggcgcgatctcagctcactgtaacctccacctcccgagttcaagcgattatcccacctcagcctcccatgtaactgggattacaggcatgtgccaccatgcctggctaattcttttgtatttttaatagagatggggtttcatcatgttgaccaggctggtcttgaattcctggcctcaagtgatccacttgcctcagccacccaaagtgctgggattacaggcgtgagccactatggttgacccacgcataagccaactttaatgtttttcaataaagttttgtaatttccccattaagcgtttacacatcttttggatttattgttggtattattaggtctgtctttttttctttcttctttctctcttctctttctttctcttttctttctttttctttctttctctctccctttctttctttttctctctttccttttctttctctctctccctttcctttccttttctttttctctttttttccttttccttctttctctttctttctttctctttctctctctctctttctttctctttctctctctctctttcttcctttctctttctctctctctccttccttccctccctccctccctccttccttctttccttctttctcctttttctttctttcctccctccctccctcccttccctccttccttcctttctttttcattgttaattcctt

SEQ ID NO: 1572 - DNA, 822 bp, Homo sapiens
gcttgtaaacatataacataaaaatggcttccaaaagagctctggtcatcctggctaaaggagcagaggaaatggagacggtcatccctgtagatgtcatgaggcgagctgggattaaggtcaccgttgcaggcctggctggaaaagacccagtacagtgtagccgtgatgtggtcatttgtcctgatgccagccttgaagatgcaaaaaaagagggaccatatgatgtggtggttctaccaggaggtaatctgggcgcacagaatttatctgagtctgctgctgtgaaggagatactgaaggagcaggaaaaccggaagggcctgatagccgccatctgtgcaggtcctactgctctgttggctcatgaaataggttttggaagtaaagttacaacacaccctcttgctaaagacaaaatgatgaatggaggtcattacacctactctgagaatcgtgtggaaaaagacggcctgattcttacaagccgggggcctgggaccagcttcgagtttgcgcttgcaattgttgaagccctgaatggcaaggaggtggcggctcaagtgaaggctccacttgttcttaaagactagagcagcgaactgcgacgatcacttagagaaacaggccgttaggaatccattctcactgtgttcgctctaaacaaaacagtggtaggttaatgtgttcagaagtcgctgtccttactacttttgcggaagtatggaagtcacaactacacagagatttctcagcctacaaattgtgtctatacatttctaagccttgtttgcagaataaacagggcatttagcaaactac

SEQ ID NO: 1573 - protein, 185 aa, Homo sapiens
MASKRALVILAKGAEEMVIPVDVMRRAGIKVTVAGLAGKDPVQCSRDVVICPDASLEDAKKEGPYDVVVLPGGNLGAQNLSESAAVKEILKEQENRKGLIAAICAGPTALLAHEIGFGSKVTTHPLAKDKMMNGGHYTYSENRVEKDGLILTSRGPGTSFEFAIVEALNGKEVAAQVKAPLVLKD

SEQ ID NO: 1574 - DNA, 911 bp, Homo sapiens
tggcgtgcgttcattttcagcctggtgtggggtgagtggtacccaacgggccggggcgccgcgtccgcaggaagaggcgcggggtgcaggcttgtaaacatataacataaaaatggcttccaaaagagctctggtcatcctggctaaaggagcagaggaaatggagacggtcatccctgtagatgtcatgaggcgagctgggattaaggtcaccgttgcaggcctggctggaaaagacccagtacagtgtagccgtgatgtggtcatttgtcctgatgccagccttgaagatgcaaaaaaagagggaccatatgatgtggtggttctaccaggaggtaatctgggcgcacagaatttatctgagtctgctgctgtgaaggagatactgaaggagcaggaaaaccggaagggcctgatagccgccatctgtgcaggtcctactgctctgttggctcatgaaataggttttggaagtaaagttacaacacaccctcttgctaaagacaaaatgatgaatggaggtcattacacctactctgagaatcgtgtggaaaaagacggcctgattcttacaagccgggggcctgggaccagcttcgagtttgcgcttgcaattgttgaagccctgaatggcaaggaggtggcggctcaagtgaaggctccacttgttcttaaagactagagcagcgaactgcgacgatcacttagagaaacaggccgttaggaatccattctcactgtgttcgctctaaacaaaacagtggtaggttaatgtgttcagaagtcgctgtccttactacttttgcggaagtatggaagtcacaactacacagagatttctcagcctacaaattgtgtctatacatttctaagccttgtttgcagaataaacagggcatttagcaaactac

SEQ ID NO: 1575 - protein, 185 aa, Homo sapiens; identical to SEQ ID NO: 1573

SEQ ID NO: 1576 - DNA, 64580 bp, Mus musculus
  misc_feature (1)...(64580): n = A, C, G or T/U
aagtaatgcagggactggagagatgggtcaggggttaaaacacagactgctcttcaagggcacccgggttcaattcccagtatccacatgccagctcacaactgtctgtaactccagttccaggggatccaacaccctccctcgacatacctgcaggcagaacactaaagcacacaaaataataataataataataataataataataataataataataacaacaacaacaacaacaataataatagaaaaccaagcaatgcagagggaaggcagagatggtcatgagctttcctcttctctcagattaggaatcctgctagttcctctggacttcaaagctgatcttccttccctgtgacctggcctgcacactgcaggttctgccttctaccaggagcagaggagctttaccagttgttaccacgaatactttgtggagcaagggtcaaatacacacaaaattttttaaacattttgaacaaattaaaaaaaaacattttttactcaataaaaatccactgcaaaagcaactaaatagtcaggggtggtggtgcgcacctcatcacagcgctaaggagcagaggcagggggaccagagtgctaagccaacctgggcgacacagtaaaaacaataaaactcttttttaaagagatttaaaagcagttagatggtttcctactgtcctagaatctgttgttcaatggcatcacctatttgttgggcagctgtgccacagactcagccatcctgtacctcagaagcgcctcatgagagctacttggcagagctgaggggtatgtgactcacatctggctacataagctttcttctcccactctactattaatggcctgtggcaaatggtttcttttcagagtggctgcttctattcataagctacacacacacacacatacacacacacacacactggtttagtttttgtttttgaaatggaatctttctatatagctggcaatgatcctgactttctgaccctcctaactcatagtaccagtgcttgcttagactacacgagttccaccacactggcttatgcttggtgctggacctggggcacggagcatgctgggaaagcactccatcagagtctaaatgaaaagatgcctaaatgaaaacctaagtatgagatgctggctaaatatttatgtacagtgtactagaacataccagtgcgtgcatggtggctcatacctatctgaggccagcactcaggggctgaaggaggactgatacaaactcaagccagctttaactacccagtgagactgtgtctcaaatccctacaaaaacaccagttacagggccaaagagatggctcagcaggcaaagtgcatttcaaatagtacaacctgatttcatccagaacccatataaagggttaaataaaaataaatataaatcagaattgacttcacaaagttgtcttttcatctccacaatcacgccatggcaggcacacacccccacacacacacacaatacatacatacatacatacatacatacatacatacattcatacatacatacaaaccaaacaacagaaacactacaaggccagcaggatggctcatttggtacaggagttgctgaaaagcctgatgccctgaattcaacccctggaactcacagtgtagaaacaacttctgcaaactgtgtgtcctgagatgtgcacatacacacacatgtgtacacacacaaacacaaagtgtaaaacaaatgcataccatctgtctgctgctgggtattccttctctctcttctccttgctccagaaaacattcttttccctttgttctatttaatttacatgaattaaaatattttggtgctgagggtgtagctcagtgatagtgtgcttacccaccctaagcaaaaacccacatttaattctcagttctacaaaaataatgaatcaataaagacacactggccagcaacatggctcagcaggtaaaggcactttccatcacggctgatgtcctaagtctgagctcaagacacacatggtggaagaccagagctaactcacaagtcctctgatctccacacatacactatggcatgcaaacacacacacacatacacaaaaataaaatgaaataaaaaactttatttagaaagaagaattagaagattgtttgcagacatgaagagcaagaggccactggtaggagaaataaaacaaggctaagtctcaacttccaaactactaaataaataataatgcctgcctcagcctataaagattaaaaaatgaaactaaagttcatgctttcagaccaaaactctattgtctactttatatattaacagaattggtttttctgtatctaaattttaataatatctgacatagatgggaagttcagggtcatcttcagctacatagaaagtttaaaaccagcctggggtacacaagacacagtgtctcaaaacacagaataatccaactgcactcacgtcctgataagaagataatctttagaatcatccataaagccagtaagttgtggtgtgtatccacagacttgagctctgtatctgaggcggctaatgctaccttcacttgaaacaaaacccacacgcaccacatgtaactatttaaaggtgcgtactacattctgaagcatgtgagatccttcaaaactatacagagattttttattacctatttctgtctgttcatttgcttttgagaaagatctcatgtatcccaagctggtctcaaacttgccatgtggtagtcaaggatgactttaatgtcaatttctaatcctcctgcctccacctcttgggtgctgggattacagtcatgcaccatcatacttaattttatctgttgtttctttttttttttaaagattgatcgattgactgattgattatatataagtaccctgtagctgtctttagacataccagaagagggcatcagatggttgtgagggcatcagatggttgtgagccaccatgtggttgctgggatttgaactcatgacccctggaagagcagtcagtgctcttaaccgctgagccacctctccagcccttatctgttgtttcttaagacaggctggagaaataacagctcttgtcgattttgtagaggaccagggttggattcccagagctcatatgtgagtagcctagaaccgtctgtagttccagttccaagtaggctgaagctgaagccctcttctggccttctgtggcaccagacatgcatagtcacagacatctaaattttaaaagcacaagtctaggcttcactattcttgcccataactttaaaaaaaagagctaaaaaccaaatacactaatatttgtgtacaatattttagatacactataattctgtgacctaacctgatctccatatcatggtaatcctcctgcctcagcctcctaagggctgggatttcagaagtgagccacacctggcttggcagatttttatgtctcttccctttcattttttataaagagcctgcacactgtcgcacagcagttaactgagccactgaagacacggacaaagtccttaacgaagtagtttgcacctgacgctctaaaatgacaattcggctgatgtcaagagtcaaggcatctgggcagacaaaagtagagaaggtttgtttgcattttttggtttgtttccttgtttgtttgtttgttgttttgttttgttctgcttttccccttttggtttacaaatgggctggcaggtatttcctaaacttttgagattttatgtgtgtaggtgttatatgtatgtctgtttaccacattagtcaacgtacatagaggccagaagagagcattgaatctcctagaactatagttacaagcagttgttagccacactgtaggtgaagtcagctcctctgaagaatatcaaattctcttaactgctaagcccattctgtctgctgctttgtttgtttggtggtgtagggctcaagttcaaacccagggctcccaaagttctaggcaagaaagagctctggcactttaacttcccaggccacttcaggctttgggttttgttttgttttattttttttaattattatttatttgtttaaggatttgttcatttgatttatgtgcacaggtgtttgcttccgtgagtttatgtgtaccatgtgtgagcaagagccctgggatggcaggactgtacatttagacttctaagactgaagtactgagctgtcacgtgggttccaggaactgaacccaggtcccctgtaacagcagcaagcactcttaagcaccaagccatctttcaagcttatcagaagccaacagtaagagcaaacttcctcctgggagccacatggaaatgtgggcaccctttctcttactgtcaaggtcactgagcttaactgttaacataagggctttttaaaaaatacttcaggctggagagatggctcagaggttaagagcactgactgctcttccaaaggtcctgagttcaggtcccatcgaccacatgctggctcaccatcacccatgatgagatttgacgccctcttgtggtgtgtctgaagacagctacagtgtacatagatataataataaataaatctttaaaaaatacttcaaaagctcctaaagaggttgggcatgtgacatctgtgaaatagaagactgtggatctggagtccaaggtcatccttagtcacacaaaagtctggggcgaacctgggttacgctccaccttggttaaagagagagagagagagagagagagattgagagagagagagagagagagagaaacaaaaacagccccttcagggtgctggattcctaataacctgctacgcttatctcaagtgaaataacaaatatccaggagtctgacatagtttcctgtcctaggtaccgggtcttttccatgtcacctacccagaccaagccctgggacctaaggtgtgggctacctgcagcaaactgtaattacttactcactgaaggcaaaagtacaattaacctattatcaaacctcttcctagaacccagtaacagtgaccagcataacccctctaaatacctgataacgagctgacagttcattaaaatggcaggtcccagtgaagccaaaccagtcactgtcctaggaaggagcgtcaatgtgctctttctatatttcacagtcttagagagacaaaagtccacgtgcaaagataactaatatttattactgtttaaacattgtacagaaagaatactccattgaaaagatagcagactaagaaatcttttgcagactctgaaaaggcgagcttcgaagggcagctagacaaaaagaactaagggtttaaagcctgcttacttttcacgtctgtgttcttcgtttcgtcaccactctcggggcagcactggcagaaaaacaggtgtagcaaacaagttagactgaagtaagtggaattcatacagcgctccgaaaggtcccatactgacgggcggagaggtcctaggcgcctctcccaggggcatgcctgacactactgccaccttcccagaggtctggaccacctccccagggtccgagttactctgcccgggcaccgaggccactttcccgccaactctcaaaactgtcatcttctgggacatcggacattgcactgtgactacctccccagggactcccttgcctgcttccggccgtgggaaccaccgccaaacacttccaaggtaacctgtccccggggcggaggtggggtctgtgccacctcgcagggtcaccagcgtcccttccccgggtttccagggacgcctcaccggggctgccggcacttcgccgatatcgtcagccgcaagcatcctgcctccgcacgaattctggattccatgcaccgccagcccggcctgcagagtccggctaaggaacacacagactgggcgaccagaccagccttctgggacgcagggttgagcgccacctcgacttcctatcaccgactctctggttccgttctcttggcctagagaggcatatctgcgcgccgctgtcctgttctgtggcgccccctgctggttggatgtcatgttggccgctcagggaacctggcagccctactgcttcccaggctgctgagttctgtgcaggagctctctccacttctttggagttactaaaaataaaattcggccctggcatggtgtctcacacttggaattccaccgtttgggaggtgaaggcgggaaaaccagtagttcaaagtcaactccagctacacactgaattcaaggaggggagaggaaggaggggaggagaaaatactcatgatacccttaggatggtgagccacaagtcgggagcggaggcgggaagattgccactagtccctgccagcttgctctataaagtgaattcggtatcagctagaacaacacctatctcaaaatggctcagcgcataaaagcatttgccaccaagacaccggagttccatacttggcccacgtggtactaggtaggagtgtcaaagtgctctttctatatttcacagtcttagagagacaaaagtctacgtgcaaaggtaactaatatttatttatttatttatttatttatttatttttggtttttcgagacaaggtttctctgtgtagccctggctgtcttggaactcactctgtagaccaggctggcctcgaactcagaaatccgcctgcctcagcctgtaactaatagttattactgtttaagcgttgtacagaaaaaaatactccatttaaaaggtagggactaagtaacctcttttgtagactcaagagtaagctttgaaggacagctagacaaaaggaacactccttcatatattttcgaactggaaggtccagatctgtttgtaggagggttgaaacattctgggagtcagacagagaaagagcactcaaaatctggcatccagtttgctgggcaaagccccctaaacctctactgttttccagggaggaggaactgaattacttagaagcaagggataggtagagaacatggaaatttgacaggcaaaccctggaaggcaatgcctttgagaccaaacaaatggggagaaaacagaaaaaaaaaaaacaacaagcaaacaaacaaacaaaaatctttagaggaaacagaaactactccgtgagaagaaaactcactgaggtgtagacatacatgcagacaaaacacccatacacataaaatgaaaaaaaataaataaataagagccgggtatggtggtgcatgccttttatcccacaactcaggaggcagaggcaggtgaatctttatgaattcaaggccagcctcatctacatagtgagttgaaggatagacagagctatatagtgaaaccccgtataaacaaacagacagacagacaaacaggatctggagagatggcttcagcaactaagagtactagcagctctttcagagaatccaggttcactttctagcacccacgcagcagctgacagctctctgtctgtaactcaattctagggtatctgactctctctctgaactctctggacaccagacacacacctggtatacagtcacacatacaggcaaacatccacacactttaaaaaataaaaataataaaatttaaaaatttaaaattaaaacaggatctaggctatattataccatatagctgtatctgagtctgctgaccttaggacattaaggtattaatttaccctagccccaagaatgtgcagctgtacaagaattagtgaaatgggctaggcatgatgccacaagtttataattgcagtgcttttgagactgagggaggaggctcttgaatttgggattagcctgggctatatactgagcatctatcttaaaaaggaaaaaaaaaaacagaaagaaagaattaataaaatgattaaagacaaatgaaagaatttaggtaggtaactacagagaataatcttagaggaagacaatgtagaagccacaagtctgaactaaatatatgtgactgtagtgatttgaataagaatgcccccataggttcatgtgtgcgaatacttggtctccagttgatagaactgtttgggaagcattaggaggagtggccttgttggaggaggtgtggccttgttggacaaggttgtcacagtcagttggctttgaagtttcaaaagcccacaccattcctgactttctccgctgtgtacttgtggacaaagatgtgtgctcccagctgctgcctacctaccagctgccaggattactgtggacacaccctctgaaactgtaagacccaataaactcttctttctataatttcctttggaggtggtgtctcatcatagcagtaggacagtaactaagaagtgactcatttagctggatctttctactaaatccatattttaaaagcaagtgtgggactcaggagacagtttagtcaatacagtggggacctgtgttcagatcctgctagtcatgtagaaagctggtcacagcagatctgtgtaatccaagcagtagagagacagagataagatctttcgacttgccagctaaccagtccagttgagctccaggatcaatgaaaattatttacaaaaagtagggtgaaggggccatggagatggatcggaggtaagggcacttgccaagcaagcctgacgacttggcttccgtccccagaaaccatgtaaggtagaaggagaggaccagcttctgcagactatgctccagcctccacgtgtacgcatgcccacatcataaacacacaataataataagtaactaaggtagagagtgaaagtggaaagcaccatgatgggcctcaggtctccacaaactcaggactgtacatggaccttagtttttgatattttgatggtcttaggcaaccccttgaaagggccactggaaccccaaggggttaaggaactactgattgacaccgttcagagttccagccagggaacgatgctggtcctgtacgattacaattaacccagtcaggatagtccagcataggcatgaccagggcttgtctccaaggtaattctgtcaaattgacaacactaatcatcacatatgcaaacctcacatatgtaaaacacatggttacaacaaacacaacacacacacacacacacacacacacacacacacacacgtctaagaggaatacaaagatctgaaataacaggattttgttttggtttggttttctttttctttttttttttctattttgttttttcaagacagggtttctctgtatagccctggctgtcctgaaactcactctgtagaccaggctggcctcgaactcagaaatctacctgcttctgcttcccaagtgctgggattaacggtgtgtaccattactgcccaggtttttgtttgtttgtttaaaaaaaaccaaaacaacagggtcttacctaggccatgtttacctgggattccttacatatcccaaagtgcccttaagtttctgatccttctgtccacatcacctgagtgcttggattatgggcttttgactctccacaaatcttgatttattttattatattttattttaccctgagttgaaatctggcaaaatattagacctgaaatgctatggagtgctttgatttggtcagttggctacttgaagcatgagaagaaaaatatattttatttttctttacgccaaagcattaaccagctatgatggaattttcttgaagacagtcctcctggggagctgtcaaaggtaagaaacccattctattaatatgcactattaaccataataaaaagccatagctgtgaaagaagctcccattcaagcacaattacaactaataaggcagtctctgtttttgaagtcctaaaggattctttgcataaggcaagtcacttcccaggcgccgatgggcggagcgtcctcgggagcggagggccggtggagcgggccccgccccggggcgtggtcggcgcggcgcagcgccgcacgtgtgcgagcccggcggctggtgggataacccgtccctgtgcgtctccacgcggtgcagcctgtgctggtcggcgctggccgccgcctcctgcgagtcaccgccgccgccctcccgcgtcccgagccgagcgtcctcttctccgctcggcccgcgccctcaggctcccggtaagtgctctgctttgcggcgtggccccaggcctccggagaggcgcgcggccggggagggagggcggccgtggtcgcagctcgcgctgctccctgtttctccgccgccagctccaccttccccgcttgtcttatttctgctccacgcacccggatccttgatcccggacccctagttcccgatccatgctccccgatcccggctattcgccctgatccccgccgttcgttaagcggcgccgcgtcccgatcctctggccgcgccgctgtgggctagaaccttctttttccacttcttccttgctttgtggtgcctcaggcactccccaaactcaattccctgttagaaaaacaaaccagccttcccccggtcctgctcagcgctcccagatcgtccgagcagcctgcactggtcccggcctggtgctgggtactgggcgcagatgttttacttgctgggcaggccttaagggccgctgctcttctcaaccacggagaagcgatcaggctgacgtctggggtcttttctccaacctctgctgggtgacagtgcaggctacttattctgtggtccataccaccaagcccttcactgaggggcctttaaaatggccagcacatggttattgctcttaattactgccagtcaaggaagaagggtttagttcaaggccatttctttaaaaaagagatctctaaaatataggtgctactttgttttgttcccactcttaaacaacaacaaaaatctgtggccatccgtaaaacactatgcctcaatgtcagggcaatggttttactaacgaaggagctgtcaaaaatcagactgtagtgagaaagaggggaaactatgtgcagtcattagcaaataaccaacagtcagaatttgttaacttaacaagtttatttgaacacataaacctcttttgtcttgacataggacttactatgtagaccaggctggcttgaactagagacacaagtctttctcagccttctgagtgctgcccttacaggacagggacgccacttgagttcccctctgaacctctctctctctctctctctctctctctctctctgggagaagggttgaggcagagtctctctgttatgtggactgtcagtcctggaattctctatgtagaccaggctggcctggagctgctagacttgggtccctgccagcgttcagcactcgtgtaggaggctggtttgatccagggcaccgatgagcctgggatttggcggcatgtctgttaccccatttcctagctgggatctttgcaagctctgttctgcccccatggagctcacacaattttcaggtctacttttttcaagtctttaaaacacctttacaggggctttacctcaggccacccctttctctgcttctaaatggctggcctgtcctaatactgggtttgtttgtttgtttgtttgtttgtttgtttgcagcaccgaagactgaacttagggcatgctagacaaatgttctgcttctgagcacatcccccacaaatttatttggttttttaaaatatccttaagtaggttgtaatcttgtttggttgcaagaagtcttccatctttctcccatctttctccagtgtctacccaggacatacttaataaatgttagagtagatgactctgatagacgtaataattttttcagattaggatgtggagtgagttttgccattaaagtaagtaatgcctgctgtttcaggcctaagcaggagtatcacaggttcaaaacctgcctgggttacattaacaaaggcattctaagcatcttagcaagaccctgtctcaaagcgagaacaggacagtgtagttcattgttagcatgcttgtttatcatgcccagcacttcatgggaccctgtctcaaaaaacaaacttctaaaagagcaaaccatggttacgatatcaagaatcaaaagctgagtaagaagtgtcttaggggggcctggtgagatggctcagtgggtaagagcacccgactgctctcccgaaggtctggagttcaaatcccagcaaccacatggtggctcacaaccatctgtaacaagatctgatgccctcttctggagtgtctggagacagctacagtgtacttacatataataaataaataaatctttaaaaaaaaaaaaaaaaagaagtgtcttagggacgtggcgtggtggcacacatcttaaatcccagctcttaggaagcagaggcaattggacacccagggctgtgtagggagaccctatctcaaaaaaaaaagggtccttgtatgtcatgtcccctctctccaggggcatagtaaatgccagtgagcaaaggtggatggcagcaggtattagactatatccaagtcatcgtattttagttttccaacaatttaagacagggtaagtgacccacttactaaatggcaaggcctggggtctgactcnnnnnnnnnnnnnnnnnnnngcacacatcttaaattccagctcttaggaagcagaggcaattggacagccagggctgtgtagggagaccctatctgactcccaagatctggtgttccttttgcatctgggagcgaggtgggtggtctgactgtaaagtccctgaggcaggctgcatgcatggcttttgctggctgtgcttgcctgtgtgctgagagttgtggcctctggacaggtatcaggctctcctggttgctgattatttggagcccggtactgtaattacccctacttggtggttgctcaggtggtcatgtgtctgctgtggagtaagatctgccaagtcttagaatttgctttaattttattacctaatatggctgttcctggtttttctttaaccttagaggactagaatatttttagagctcatttacggtgtttatggatacactcacttttcgtctctctttgtaataaaaataggaaaaaccttccattcttacttcagttttaagtaagatcaagtagataggtacacacagcctggaatatctttattggctgccctgtgttcaagcgtctcctaagctcctctttactggggacggatgtgtggggtctgagattttgttctatatattgcagatagtacagttaaataatcttgttttgggctgtgtctttatcttttttaacattttttagatttgtttttatttatttttatgtattaatttttgtttaatatttatttatgagtgctctgctgcatgtgcacctgcatgccagaagagggcgtcagatccctttatggtcatgaaccaccatgtgggtgctgggaattgaactctgagcctctggaggagcaactagtgctcttaaccactgggccatctctccagcctggctgtgtctttttaaatgtggtgaaatacacgtagtagctggcatagtggaacacttctacagtcccagcacttaggaggccgaggttgcagagttaagagttaaagcccaagctcgtatatttacaatgtatggtttgttttgtgttacttttatctggtgtcgtgtgtgtgtgtgtgtgtgtgtgtgtgtgtgtgtgtggtgttcgtgggtgtgcgtgtggaggtcagagaaccactttgggagtcagttctctcttctaccacatgagtcctgaagactttactcgagtctggcattcccactcccttacgctaagctctcttgctggctttgactttttgagaagccttgcactgaatgtggagtttgacagtttggctagatgcactagcagtgactcctagagaatccttctgtatccaccttgtcaacctccagacttaaagaagaaggggtgggagttaacaacccaacaacccatgagtgctagagatcaaattcagatgctcgtccgtcggtgctaggcaagcactttactatgtaccttcttcttgctgttttgagtcaggatctcttgtatccttcgctggccttgaactcctggcccttctatttctcccttccagtgccgagattgcaggnnnnnnnnnnnnnnnnnnnngtatggtgtaagtgtgctttcatttatgtcctgctgtattttatcagttttgaaagataatgcatatgcctagagcaagattatactgaaatcatggtggatacacaactgttattacctaaccacctgggtcctccctaaccacctgggtcctccctaaccacctgggtccaccctaaccacctgggtccaccctaaccacctgggttctgccctagaaggaattgcctcttgcagatcctaatcagttgtatctacgaattattcagcttatttattttaatttgctttatgtatatgcatgtgtgcctgcttgcctgtgtacataatgtgtgcataggtacctgcacacaccaagatggagcactggatcccctagagctgaagttacaggctttgattgtgagagttctgggaacagaacgtgggtcctctgaaagagcagcaagtactcttgacttctgagccatccatccctttagctcctgaattctgtttgtttttgttgttgttgttgttgctgttactgttttttttttagtttttaaattttatgtgtgtgagagtttgacaagcatgtgtgcatgtataccacacacacgtttggtttctgcagaggtcagaggcatcagatccattgaaacaagttagggatgattgtgaactactgtgtaggaaccaaacccaggtcctctgccagaacaataaatactgctgagccatcttgccagcccttctctaaattatgtccttaaggtaaattccttaaaacaaacaaataattctggcttaaaatggtgtgtgtgtgtgtgtgtgtgtgtgtgtgtgtgtgtatgtatacacgcactcacccacactttgtttgtttgtttgttttgaggaagggtcctttatagccctgaccggcctgaaactcacagacatctacctgcatctacctcccaatgccaccagacctggctattcttaggactcctgatacgaagtgctctgctagttttcttcttttataccttggagtgcacgcagtgtcagaattacttactatctcattagaagttacttttgtattttatttatgtgtgtgtgttggtggttgctttcgaaggctagcagagtgtctattcccctggagctgggtttgcaggggcttgggagccacctgatatgtgcgctaggaaccaaacttgggttctctgggtgctcagcaagtgttcttaaccattgagctgtctctgcacaccctgagaattattgtaataaatgatctttttaaggactctttgcacaaagttcagcgcgcttctgtttgccaaaaccagtctttatgggagattgttaactttctactctttctactctgtgaaaggttctcttaaatgttttcttggagccttaaagatggaaatgacaagcacgtccctgaaacgtgggtgccttgttgtggaagataatgacagtgtgaccccacacgacgaaacaaagaaacagaaggtgtccgagggctgtctgaccagcagtcaggatggggtagagaatgacggtctacaccgcagtgagaacgagcctgggcctccagaagctgaaagcaccgtgaaagatgacgagaattccagcgctcaggtgcaagaggaagaggaggaggaggagggaggaagacggcctttcagaagcaggggaagaggaagaagcagagagttttgcagacatgatgaaacatgggctcacagaacttgatgtgggcatctgcaannnnnnnnnnnnnnnnnnnnnnnnnnnnnnnnnnnnnnnnnnnnnnnnnnnnnnnnnnnnnnnnnnnnnnnnnnnnnnnnnnnnnnnnnnnnnnnnnnnnnnnnnnnnnnnnnnnnnnnnnnnnnnnnnnnnnnnnnnnnnnnnnnnnnnnnnnnnnnnnnnnnnnnnnnnnnnnnnnnnnnnnnnnnnnnnnnnnnnnnnnnnnnnnnnnnnnnnnnnnnnnnnnnnnnnnnnnnnnnnnnnnnnnnnnnnnnnnnnnnnnnnnnnnnnnnnnnnnnnnnnnnnnnnnnnnnnnnnnnnnnnnnnnnnnnnnnnnnnnnnnnnnnnnnnnnnnnnnnnnnnnnnnnnnnnnnnnnnnnnnnnnnnnnnnnnnnnnnnnnnnnnnnnnnnnnnnnnnnnnnnnnnnnnnnnnnnnnnnnnnnnnnnnnnnnnnnnnnnnnnnnnnnnnnnnnnnnnnnnnnnnnnnnnnnnnnnnnnnnnnnnnnnnnnnnnnnnnnnnnnnnnnnnnnnnnnnnnnnnnnnnnnnnnnnnnnnnnnnnnnnnnnnnnnnnnnnnnnnnnnnnnnnnnnnnnnnnnnnnnnnnnnnnnnnnnnnnnnnnnnnnnnnnnnnnnnnnnnnnnnnnnnnnnnnnnnnnnnnnnnnnnnnnnnnnnnnnnnnnnnnnnnnnnnnnnnnnnnnnnnnnnnnnnnnnnnnnnnnnnnnnnnnnnnnnnnnnnnnnnnnnnnnnnnnnnnnnnnnnnnnnnnnnnnnnnnnnnnnnnnnnnnnnnnnnnnnnnnnnnnnnnnnnnnnnnnnnnnnnnnnnnnnnnnnnnnnnnnnnnnnnnnnnnnnnnnnnnnnnnnnnnnnnnnnnnnnnnnnnnnnnnnnnnnnnnnnnnnnnnnnnnnnnnnnnnnnnnnnnnnnnnnnnnnnnnnnnnnnnnnnnnnnnnnnnnnnnnnnnnnnnnnnnnnnnnnnnnnnnnnnnnnnnnnnnnnnnnnnnnnnnnnnnnnnnnnnnnnnnnnnnnnnnnnnnnnnnnnnnnnnnnnnnnnnnnnnnnnnnnnnnnnnnnnnnnnnnnnnnnnnnnnnnnnnnnnnnnnnnnnnnnnnnnnnnnnnnnnnnnnnnnnnnnnnnnnnnnnnnnnnnnnnnnnnnnnnnnnnnnnnnnnnnnnnnnnnnnnnnnnnnnnnnnnnnnnnnnnnnnnnnnnnnnnnnnnnnnnnnnnnnnnnnnnnnnnnnnnnnnnnnnnnnnnctggttctggagattgagcctagggggttgaaaatgctaagccttttaaataaaatgggctttatccccaaccctaagattatttttctggtttggtttggtttttggtgaatttttgattatttgagacagtttctcatatagcctatcctggcctccaactgtgtagccaggaattacccgaatcctgatcctccggcctctgtcttcaagagctgggctaacaggctcacaccaccatccttgactactgaatcttcttccgtgtgagtgtggggggaaagatgcagaagtgcgtgtgtgctttcggaagccagtggtcagcctttggagccatccaccttgatttttgagacagtcactcacttggtctagaactaacccagttagccccggctagccggcaggtgagccttagagagctgtctctctttgcctccccattgctgggactgcaagcgtggaacactacatccagcttttttgaatgggttctagaagtactgatggctcggcaagacctgtgctagctgagttatctcctcaacccctcaggttgtacctctgcacagtgtattgccaccagtcagaagttacagaaacaaaccctgctctttaagtgctctctgtcgtctactgcttgcatggttctaatcttgctattacttttgaaatagtctcataaattatgtcctatagcttctttatatcacccgcaaaaataatgttcttactgttgaaaaggtaccaggctttgcagaattctctctagaaacagctctgtttagttcattacacacgcatcaacctgtgtggtccacacattcctgcacccacctcttcaacagaggaatgaattttttttttaaaagatttatttatttattatctgtaagtacactgtagctgtcttcagacaatccagaagagggagtcagatcttgttacggatggttttgagccaccatgtggttgctgggatttgaactctgaaccttcagaagagcagttgggtgctcttacccactgagccatctcagcagcccgaatgaaatattttttaaaaagagttctgggttgtttgtttgtggtacttgtgatcacataatttgtaaatgtnnnnnnnnnnnnnnnnnnnncctgcactggtcccggcctggtgctgggtactgggcgcagatgttttacttgctgggcaggccttaagggccgctgctcttctcaaccacgggagaagcgatcaggctgacgtctggggtcttttctccaacctctgctgggtgacagtgcaggctacttattctgtggtccataccaccaagcccttcactgaggggcctttaaaatggccagcacatggttattgctcttaattactgccagtcaaggaagaagggtttagttcaaggccatttctttaaaaaagagatctctaaaatataggtgctactttgttttgttcccactcttaaacaacaacaaaaatctgtggccatccgtaaaacactatgcctcaatgtcagggcaatggttttactaacgaaggagctgtcaaatatcagactgttcactgtagtgagaaagaggggaaactatgtgcagtcattagcaaataaccaacagtcagaatttgttaacttaacaagtttatttgaatacataaacctcttttgtcttgagataggacttactatgtagaccaggctggcttgaactagagacacaagtctttctcagccttttgagtgctgcccttataggagagggacggccacttgagttcccctctgaacatctctctctctctctctctctctctctctctctctctctctctctctctctctctctctctctctctctctctctctttgggggaagggttgaggcagagtctctctgttatgtggactgtcagtcctggaattctctatgtagaccaggctggcctggagctgctaggcttgggtcagtgccagcgttcagcactcgtgtaggaggctggtttgatccagggcaccgatgagcctgggatttggcggcatgtctgttaccccatttcctagctgggatctttgcaggctctgttctgcccccatggagctcacacaattttcaggtctacttttttcaagtctttaaaacacctttacgggggctttacctcaggccaccccattctctgcttctaaatggctggcctgtcctaatactgggtttgtttgtttgtttgtttgtttgcagcaccgaagactgaacttagggcatgctagacaaatgttctgcttctgagcacatcccccacaaatttatttggtttttaaaaatatccttaagtaggttgtaatcttgtttggttgcaagaagtcttccatctttctccagtgtctacccaggacatacttaataaatgttagagtagatgactctgatagacgtaataattttttcagattaggatgtggagtgagttttgccattaaagtaagtaatgcctgctgtttcaggcctaagcaggagtatcacaggttcaaaacctgcctgggttacattaacaaaggctttctaagcatcttagcaagaccctgtctcaaagcgagaacaggacagtgtagttcattgttagcatgcttgtttatcatgcccagcacttcatgagaccctgtctcaaaaaacaaacttctaaaagagcaaaccgtggttatgatatcaagaatcaaaagctgagtaagaagtgtcttaaggacgtgggtgtggtggcacacatcttaaattccagctnnnnnnnnnnnnnnnnnnnntgcctccccagtgctgggactgcaagcgtggaacactacgtccagcttttttgaatgggttctggaagtactgatggctcggcaagacctgtgctaactgagttatctcctcagcccctcaggttgtacctctgcacattgtgttgccaccagtcagaagttacagaaacaaaccctgctctttaagtgctctctgtcgtctactgcttgtatggttctaatctttctattacttttgaaatagtctcataaattatgtcctatagcttctttatatcacccgcaaaaataatgttcttactgttgaaaaggtaccaggctttgcagaattctctctagaaacagctctgtttagttcattacacacgcatcaacctgtgtggtccacacattcctgcacccacctcttcaacagaggaatgaaatattttttaaaaagagttctgggttgtttgtttgtggtcttgtgatcacataatttgtaaatgtgtcctgtttctcaaaataatttctgaaactagtcggacactcgggcgggcacaggcctggggccttagtgcccaggaggagatacaagagcggggggaaaggacagcagttccaagaacagccagttaacataagaccctgtttaggaaaaatggttggtttttgtttgtttgttttgagacagggtataactgtgtcgccttggttggtcttgaactcagagatctgactgcctctgcctcacaagtgctagaattaaagacacttatcacatttgtcaaaaaaaaaaaatcttttaaagtagacttgggaactctttttaaactgccgtcagtagtaagtagttcagggctcagcccagcagtttgtgtcttcagttttctctgtgcttcccaccccactctacccctgtttcctcacacactgtggcccccagctagtgagtggggaggactttcacatttgtgtttaaggatgagttgtgtagagccaggcatggtggcgcacgcctttaatcccagcacttggaagggagaagcaggcggatttctgagttcgaggccagcctggtctacaaagtgagttccaggacagccagggctacacagagaaaccctgtctcaaaaaaaaagagttgtgtataagcagttgaggctggagagatggctcagcaattaagagcactggttgttcttccagagaacctggattcaattcccagcaaccacacagcagcttgcaagtgtctgtaactcttgttctaggagagctgactctcttgtgcaggcaaaacagcaatgtacgtaaaataaaaataaataaacaagtaaacacacaaaaaggaaaaaaggaaaaaaaaccacattgggggagggggtgtgtttctagacagggtttctctatgtagcactggctatgcctggaatgtcttctatagaccaggcggctgcaaacttacaaannnnnnnnnnnnnnnnnnnntcagaagttacagaaacaaaccctgctctttaagtgctctctgtcgtctactgcttgcatggttctaatcttgctattacttttgaaatagtctcataaattatgtcctatagcttctttatatcacccgcaaaaataatgttcttactgttgaaaaggtaccaggctttgcagaattctctctagaaacagctctgtttagttcattacacacgcatcaacctgtgtggtccacacattcctgcacccacctcttcaacagaggaatgaattttttttttaaaagatttatttatttattatctgtaagtacactgtagctgtcttcagacaatccagaagagggagtcagatcttgttacggatggttttgagccaccatgtggttgctgggatttgaactctgaaccttcagaagagcagttgggtgctcttacccactgagccatctcagcagcccgaatgaaatattttttaaaaagagttctgggttgtttgtttgtggtcttgtgatcacataatttgtaaatgtgtcctgtttctcaaaataatttctgaaactagttgggcacgcgggcgggcacaggcctggggccttagtgcccaggaggagaaggaagggcaggggaaaggacagcagttccaagaacagccagttaacataaggccctgtttagaaaaaaatggttggtttttgtttgtttgttttgagacagggtataattgtgtcgccttggttggtcttgaactcagagatctgactgcctctgcctcacaagtgctgggattaaagacacttatcacatttgtcaaaaaaaaaaaatcttttaaagtagacatgggaactcttaactctttttaaactgccatcagtagtaagtagttcagggctcagcccagcagtttgcgtcttcagttttctctgtgcttcccaccccactctacccctgtttcctcacacactgtggcccccagctagtgagtggggaggactttcacatttgtgtttaaggatgagttgtgtagagcctttggtcgcgcacacctttaatcccagcactcaggaggcagaggcaggtggatttctgagttcgaggccagcctcgtctacaaagtgagttccaggacagccagggctacacagagaagccctgtctcaaaaaccaaaaaaaaaaaaaaaaaaaaaaaaaaagatttgtgtagacaagcatttgagactggagagatggctcagcaattaagagcactggctgctcttccagagaacctgggttcaattcccagcaaccacacagcagcttgcaagtgtctgtaactcttgttctaggagagctgactctcttgtgcaggcaaaacagcaatgtacgtaaaataaaaatagataaacaagtaaacacaccaaaaggaaaaaaggagaaaaaccacattgggggagggggtgcatttctagacagggtttctctatgtagcactggctatcctggaatgtcttctatagaccaggctggctgcaaacttacaaagatccctctgcttcccaagtgatgggattagaggtctcaagccagaccaatgactcattgcagtgaatatttgcaggtaaagctacttgggcaaagggtgcaacacgccacagcctccatgatgagttttgggttttgtttgtttgttttgttttcaaatttggtttttgttttgggtcttaggggggtgttgcaaagggccaaaagataagagggattggggtgtgtgatgtgaaattcacaaagaatcaatacaaaaatatttaaaaagatagtacaggtttccctttgccgtccccttgtgtacattttccatgtgtaacaaaactgttaccctggaagctgcattgtctgctgaagttgttagaagtagacgacagagtcccaaacaaaccacacggtgcagcagcgtggagggtttactgggagggagaaaagagagaggctggcagggagaccgagtctattatctgggccctgacacatgtgcaggggggcatgggnnnnnnnnnnnnnnnnnnnngggggtgcatttctagacagggtttctctatgtagcactggctatcctggaaatgtcttctatagaccaggctggctgcaaacttacaaagatccctctgcttcccaagtgatgggattagaggtctcaagccagaccaatgactcattgcagtgaatatttgcaggtaaagctacttgggcaaagggtgcaacacgccacagcctccatgatgagttttgggttttgtttgtttgttttgttttcaaatttggtttttgttttgggtcttaggggggtgttgcaaagggccaaaagataagagggattggggtgtgtgatgtgaaattcacaaagaatcaatacaaaaatatttaaaaagatagtacaggtttccctttgccgtccccttgtgtacattttccatgtgtaacaaaactgttaccctggaagctgcattgtctgctgaagttgttagaagtagacgacagagtcccaaacaaaccacacggtgcagcagcgtggagggtttactgggagggagaaaagagagaggctggcagggagaccgagtctattatctgggccctgacacatgtgcaggggggcatgggggcggggggggggcacgagtgcaaagggacagacgcaggagctgttgcctagagatgacaccaggtccctgagagctggcaataaagatgcctgattagtgtgaagtcacttctagctgtccacagatgtgcctgatgctaacacaagtttgaactttattctttttttacattcatgtttatgggcgttttacctgccagaaggaggtgtcagatttcctgggagttgtgcgctgctgtgtgggtgcagagagtggatccaggtcttctgggaggacagccattgctctttcctgctgaactgtctctacagacctcagtttaactttggtgtctgttttgttttcttttgttttctgtgcgtccctggctgtcctggacagggattaaaggcctgtaccaccactgccagggcagttttaacttttaaacagcagaaattatgggcaaattacatcaactgttaaaataattttgttgccgggcggtgagtgccagcacttgggaggcaaaggcaggtggatttctgagttcgaggccagcctggtctagagtgagttgcaggacagccagagctacacagagaaaccctgtctcgggggaaaaaaaaattgttgttgttgttgtagtatagtggtgtgggtttggttttaaatacttatttatatattttatttacatttatatataatccattatacttttatatgaacataatatgtatttgtacttacatatttatctatatattttatgtgtgtgagtgctctgcctgcatgtacatatatgtaccgcatgtatgcctggtgcctaggaaggtcaaaagagtgtcagattcttatgaaactggagttatacatggttataagttaccactggactctgggaaccaacccagttcctctgcaggagcagaaagtgctcttgactgctgagctatctctgcaaccctagttttggaaaccatctctctcaatcctagagcatatgacatgtatagtcaagctacccttgaacctgtggttgcctgggtgttgggattataggcagtgtgagccaccatgcctccctcgaacttgctaaattttcactctaaatatatgtttatattcataaactgttatttcaacgatcctgctctgtgctgtgaggagatcatttactcaggactacacttcagtttcttttctgtatcattttgtgttttgctaaggtaccgatcagttgtagcctctgggttgatgttttccactttcaggttgcaacaattcagttaagctgtgaaatcaaagtagaggtctcctaatcagtattgtcatttttctagcagtcagaggcaagggaccttgaagtggcccagttaacgcattcttttatagatttcaaaaactctcaatagtgtgtgcatatgtacacacaaggccatcagagtgtgtggttggtgcctcttgctatctcgccagccccaccatcagtatttttaagagaataaattaattctaaaatatctattcagtgagtacagaaagcatctatgcattttgagaaatctttttctctttcaaatatggcatattcagccttttatgatattgggtagaggtaaaatctgtttctaaatgagaaaggtcaaaagctgaccaaaagagttgtttaaatgataagtctgcattttctttttcttttttttactatttatttatttatttatttaatgtatatgagtacactgtatcgatcttcagacataccagaaaagggcaccagatccattacaggtgattgtgagccaccatgtgattgctgggaattgaactcatgacctctggaagagcaatcagtgctcttaactgctgagccatctctccagcccaagtctacattttctttgtgttgattttctttattgtgttagcatttcccccataaaattaatttagtatagaataaagttgagtaggaggcagttgtagcaaggggattagcttcctcacatcccagaggcttgtctgtccgcatcctgctcccccacacatgttgtctgatacgacaagcaacctctgtggtcaccacagagcctcctgcctgcttcacccccagccgtcaggccctcccacagtgtagcttcagacagccccaggaattctcatctccacgtgtggcacagtgatggattatcagtgaggttatggggagtagaggaagaggtgagtctgaggggcttgtgtagtgctcccacaacaagccctcagcatccgaaacagcaggcagctcagacgtgttttctcaagcactaggcaagcattcttgttgactttgtggagctgtatcttccccaactcgctgttattttcctgtttaatcctgttagagtaatgcctctcccgctttcaataggtcattgaggacaccaaagagaagcgaacagtcatccatcaagccattaaatctctcttcccaggactagagacaaagacagaggatagagaggggcggaaatacatcgtagcctaccatgcagctggcaaaaaggctttggcaagtaagtgtgacattggctgctctctcctcccctgctcctttgccttgccttttcatgtccatgggctgacatcttatggagagggatctatgggtcatgtcactccttgcgggtgggggagagttgtcaatagtcatctcagatgtggagtaggactgaagtctgtctgctagtgggcattcagcctcgtatgagagtgaagacacagaaagtacagtggggcctaaagaagagcagagtgaactgaagagcagagcgaattgaggaccaattcaagaagacgtggaggggtaattgctcattgtgtgcttgctcttagggagaaagaagggatgtttcataagagttcactcccctcctagggccatgttccctgctctgcttaccaaacatggatatcctcactcaaatacagaaaacatggcatttttaaggagttagccgctcacctgagtccatctctcattatttatacttcagtcaatgtaaacatactgtccgtcacttggtgtttatgtttgcttatgttctccacagccaggagactttgcatttatttataaccctaagaaaagttagatatttttgggttttttttttccccatcaaatcagtacataagatgtctgtgtctctgctgcctgtctcaagttctcctgtcagtggtctgttatttcaaagtagatgtgctgcagggaacccataggatgatgtcataggagacttgaaccccctagggcttggtcagtatcccctaaatggatttaagagatggtactgtgtagaagactccgttgttggtcagtgtcccctaatgaatttaagagatggtactgtgtagaagactccattgttggtcagtgtcccttaacgaatttaagagatggtactgtgtagaagactccattgttggtcagtgtcccctaatgaatttaagagagggtactgtgtagaagactccgttgttggtcagtgtcccctaatgaatttaagagatggtactgtgtagaagactccgttgttggtcagtgtcccctaatgaatttaagagatggtactgtgtagaagactccgttgttggtccgtgtcccctaacgaatttaagagatggtactgtgtagaagactccgttgtttgcagtgatgcttctggtgaggtgaaaggactgaagagaaagctagcttgactccctggaaacggtcaactggaagtgagaagctttgagtggctggaagggaaaggtggagatctgaggctacttctcaattggtgccaaaacaaaacaaacaaacagacagacagatagacaaaaaaaaaacaaaaaacaagggaagctaggcatggtgtcacgtgcctatcgtgaggggctaaggcaggaggatctacaatgtctaggtcacagtgtcttagccttcgtgtcagacaagcctgcaaagggctcactgcaagggaggtgatttcagtgactaagttctcccaagggcatgatgtcacttccagatggaggggacagaggtggctcatccacatacaactgtagacactgggtcttcgttctctcacggatacattcagggtttgatcagcgtttggtcagcaaccactctgcagagaggacgggcaaggtctgactctgccgtagcggtcgtgacggtgcagattgcaacgttcaccgtcgccgggaagctgtgtgtcttttgactggttgcctctttaaaaagaacttcatttcctaggagaggctgtattttgcgcaaggtcgagggagtttatagcccattatagtttgccctatctttttctttaatactgtctcaccttgttctgtttccatctggattttccttgcttatgtcataggcacctttttgtttgtttttgagacagggtcttactgtgtatccctggctggcttcaaactgtctggtctcaaactcagagatcaacatgtttccttaatcgtaagattccgtcgtaagggcgttacgtgacgcaaagcacccctccccatttgagtaacagaatattttacttttcaaagaagcatattggatcggcatttacccagatttctgaacctctcgggcttgaggccatttagacaaaggtgggctaaatctgtcttctgcagtttcttctacctcctcacaaaggctgagatagtcactgggggaaggggggttgcatttatcttttctcctcctgttcacctgtccccagttgagagtgaagtccccaaggaatcagagagaacaggtgtctggagacgccatccatgccctgagaacagagcccagtgccagtggcaggcgtgccatgcttctgggccctttcacatttggatgtagcagcctttaaagctttccttttttggagctcatctgctgccaagccctggtataatctctgggctatttgatacttagcaaatttacagcactcctttttgttgtcatgtagctcaggttgacctcaaactcactatgtagtgatcttgaattcctgatttttccaaccccacttgtgcctctcaagtgctggggttatagttgtccaccatgacacccaacttagatgtataatattttttttaattttatttttttattttttaaatgttttttatttttctgagatagggtttctttatgtatctccgactgtcttagaactttctctgtagaccaggctggccccagactcaagagagccacctgcctccctagtggtgaggttaaaggtgtgtgctgccaccaacaaccaccaagattaacaatattaaacttccctcaaatagaattatgcgttctaaaacattaacttctgaatcacagtgcccagtatccgaaataaccagccattaacctagtccaaaaaaagacacattgttttacctattcaatcatggtaaatttaataaaattattataacattatacaaccaagtaatagattgatattttggaattatatgcatcccattgcttttaagaacttttttttttaaggaaaggaaactgtatttttttttaaaaaagatttatatatttattggatgtatgagtacactgttgctgtctcaccaccagaagagggcatcagataccgttacagatggttgtgagccaccatgtggttgctgggaattgaactcaggaagagtgcctcaggaagagcagtcagtgctcttaaccactgagccatctcttcagccccaagaacttgtttttaaccacaaatttaaaaaagaaagctggggctggccttggtaacatacttgtatcatctcagctttcaagaggcaaaggaaccaagagttcatggctggcctgagctgcatagtccagagggctactgccttcaggagggaaaccttgtatgattgataatctttgaattttctaattcattgaactttctaaaataaatgggtcccagtcagggtctctggacccaggccttctcctactagggagggagaggcacagacacaaagaatctccccaggactggctgaaggaaaagaaagaaccccagaaccccagtggaatgggctccagatgtgtcgcttgagtggctcagaactgtgcccatcactgagcagcactggaacctgctgctgcctgtttgcttagctaaggttgagactggaaaagagcttacacagtaggctggggcaaaaggtaccatacagacagtgctttttaaataaagcgctaaagcaaagagaaaggaggagaaatatagtaaggagaagacataagctcgactttgacgataaggagccttgaatgtatcacatgggagagatggagaaaggagcaggtgcagacataaggacagccatgaaggcagtgggcgccgcaggatgctgagaagcagaaggctggcgtgtgggtgcttccttgaagatgaccttgagtaagcagaaagaaggctctccctgctgccctatggtgtcaccctctccaggctcccagcacctgccttccttattcacaggacctctgggcaggattcccacatttcccttgttaactgtttgctctgtgtaagtctggactgtgctgtcatagattcctaagatagcaccagccttgtgggagtaggaagcatgtctccagccttagaattctttgcaaatgaattataaattagagtgcctcaaaactgtgtgaaaagccctgtaacctcattcccattgtgaggctaggtatacattgattagttttcccaggggctagagtttttgtagagtccaaaagatagaattgttaactattcagaatattcccagtgcaaatgttactcttttatatattgagtattcctagaaaatgaatatttgcatttgttagttgcagagaccattggattcatggtctgtgcttggatcaccgaataggaggtgcacactggtcagcatcactcactggtgtcctgtcaagggaggaaccatttgggtttgtagtcttactcctgcattgcttcttgccatcgtgctcatctgtgactgcggaaggccagtggttgcagcatgtcgctacacttcagctcacgagctcaccgttcttggctttttagcttttcattatagacatatatggtggtaaagcaaggacagaaccttgcattcactggacgtgtctcatacgtcatttcttaagtcttctcatctataaattggtgaatatagaaaactaataatctgccgggcagtggtggtgcacgcctttaatcccagcacttgtgaggcagaggcaggcggatttctgagttcgaggccagcctggtctacaaagtgagttccaggacagccagtgctacacagagaaaccctgtctcaaaaacaaaacaaaacaaaaaaaaactaataatcccagtgtccaaattttaaagatttttacatttcagtgcaagaaacttataaaacacacagcagcatgaagcaaaacagcagtttctcattacccacagcatgacagacaccacttgctgtatttacagggaaaaatagtctgtagaaaaagtcattcgatatgtagacttaagaatttgctgtatcccatggctgcagacaggacagcttggaggatggactcatccattatgaagagactgagacaggaaggctgtgcctagaggggagtttcctagttgttcagtgtttgccactacaacatcccactgttcaagtctgaatggctattgactagcacagaactcttaggtgctgtggaagtcttcagtctcctgtcaccatgcgatcatgtgcatgcccctctctaaagcacgctgacagtatttattataaattaaacattgctctcttgtgctctttatgctgtgccttcggacagaggtcagagctgctgcaggtaagagcgcttggtgtttcctgtagacaggtaaagtgccagcgttgtcataagggctgagtgcagagaacttgccttaagggtagtgagctagaagaaaaaatgaaaaagatatatccattcacaaaaccctatggaaatggtgaggaattaactctaaaagctgaagaggtccttgtaatgtttttccatacatgactgtacagaatgtatctatacatgactctcaacaatcatcaagaaggaaactgattttctcagcatctatgcatactgtggttcttttctgaggagagttactgcttgtctacactggttgatggttctttacactgtaatgaaatcactaacctgctaccaagacgtgtttttgcttgacaaagccagatgtccatttaacttctgcaccaggaatatcttctgcctctgaagataaaggatttctaagtttatgtgaaaagacttatttaaagacaaaggaaattttttgaaaacaaaggattctttctagttgattgtgcaaaatcctttatgataatttttctttcatggagttttgtgccgttgaaactaaatatagtcctcgacaagcagcccgcctctgttgtgcaggactcgtgaatgtttgcagtgtcgcaaattctagctatagcttagttttctcagaatcctgacttttttactgagtagtttaaatttaaatcttgcattgtttaagatgtgtttccatattgtagcatgattgaaatgttcagttaaaaaaacgattatcaccatcaggctatcccaagtcatagagagtttttatggtatatatgatatttaattttgtttgtttgtttgtttgtttgtttttaagatccaagaaaacattcttggccaaaatcccggggaagttactgccattttgttctctacaaagaaaacaaagacaccatggatgccatcaatgttctatccaagtacctgcggttagtgtcttgttcttgttcttacaagtaagggagggtgttgtatctttctgtgtgaatgcaggggaaagagcaggaatcagatattagtaaatgacaaacgagcttcttaatggtaatgttctgggaaataaagcaataaatttaatccccatgttggtaattgaggatgaaagttctggaagtaagtaagtcacatacaattaagagttgcagtacagccagggaaaaaggacatttgctcaaaggaatgaaaatatagtagagattgtaggttttgagggtaggtgaggtgccagaaatttttttgtgtttgtatttttagtagagatgaagagatagcttagcagttaagaccattggctgctttttagtaggacacagattaattcccagcacccacatcaaagcctataaccatctataactccagtgccaagggatgcaacccctcctctggtctccacaggcaccagatgtgcttcacacatgtgaaagaagtcacataccataaccaaagcacatttctaataacttaacattcaaacactcagaagtttgttttgttttgtttttcttgtttttcaagaannnnnnnnnnnnnnnnnnnnnnnnnnnnnnnnnnnnnnnnnnnnnnnnnnnnnnnnnnnnnnnnnnnnnnnnnnnnnnnnnnnnnnnnnnnnnnnnnnnnnnnnnnnnnnnnnnnnnnnnnnnnnnnnnnnnnnnnnnnnnnnnnnnnnnnnnnnnnnnnnnnnnnnnnnnnnnnnnnnnnnnnnnnnnnnnnnnnnnnnnnnnnnnnnnnnnnnnnnnnnnnnnnnnnnnnnnnnnnnnnnnnnnnnnnnnnnnnnnnnnnnnnnnnnnnnnnnnnnnnnnnnnnnnnnnnnnnnnnnnnnnnnnnnnnnnnnnnnnnnnnnnnnnnnnnnnnnnnnnnnnnnnnnnnnnnnntgggtggccctcttgggatgtagacaggcagagctagttccccggggatacagctgggacctctgcacgtaagcaaacacttctgaggagctttgtgtatcttcatatcagaactatccagacccctgttttagcatttttaaaagtcgagttataaattatatttaaggtaaaaatcatattactgtaaatttaaatgttgagttgtagattatctttaatgtaaaaatcacattactataacatcttgaaagctgaagctataaaatgttcagaatgctatattatacctctagaatatctccccctttactgtcatagttttatgtaacttaacaaattgtttctgactgtggaagagtgcagcttgtatatttttttcctgatttagcccagtctgagcacctctgatagccacaaaggctctgactcaagccctgccgagagcagctgtggctgttttattttgcacattctcttgtgtattttcctcagtaaagtttctccttaagtagtgtgtgtattttgagacttaagttattagaaatgtgctttggttatggtatgtgacttcacattgctgtgtttgtgtctcatcagggtaaagccaaacatattctcctatatgggaaccaaagacaaaagggcaatcacagtccaggagattgctgttctcaagtaagtggagtgcccgcccagactgacagtgcacagcctcagctctgctttaacgaacttaccgctttcagctttgcatggtctctctgccttttaaaatcttgtagacgtatttattttctatgtgtgcatacatacgtatgtatgaacagacagtggcacatttgtggaggtcaaggaccactggaagaaatccgctctctcctgccctgtgcctcctttggattggactcagaaataacagcagatgccggtatttgccgagccagcacagcttctgcctttttgtagatgttattttctacttcagttttttcatcctgaatctctctctgtttccaaatctatcaaacatggttcagattttgtttgtttgtttgcttttgagtaatttaaaaagccatttgtgatagagacaaaagaattcctttctctcacttattaaatattatgtcctttaacattcacctaggaaacagtgaataagagcttttgcatgtagcagacatacagatggaaggatggtataaatagatgccgtagaagagcattagataagcaaaatccccgagactcagacaaatatcacatctccccttgctatacgcagtttaaagttgtttctgtgtgtgttgggggggggggggtgaagtaaaaagagcatgatttaaatagtcttgtggtgtatagggatataactccccctttttttttatgaaggtattatttaaagttccatggacccattccacataatgccttgtccatgaggattataaggaataccagtaatatgggtgatattaaattgtcaacagaaagcctcaaatgctcaactgcaatagccagttccattatttgttttaatatggttgggaacacccagtatagaaaaacaacacaggccataactaattatgtttttagttgcttctcctgttaaannnnnnnnnnnnnnnnnnnntgtgtggggggggattgtcatgggaggggaggaagacatctcaaaaggaaagacaggagaaaaaagagaatgtaggcatatgtgtgacaaaaatgtagagatggagacgatgttaagaaggtttggaatctcagcacgagttgggtaggcagcagggcagaaggcatgaaatgacacccatgtataaaaacaacataaggaaatttggtctctgtatgcaaaactaaagagggaaagatggaaaacagtaaaagtggattcagacgattaaagaagggaaggacgaagggaagaaaaggcaggcaaggaaagaaggtggttgagggagggatagagggagggtgtgtacaccctgctgtgtactctagtccttttcttccttgacctgaggcagtggcacgttgtcatagcaaccccctccatcccatcactgagtaaacatgaagatgctgctttgtttggaatgggggcagaggagaggagttgctaatttggggattaaaaatataataacttaaaaacaaggtgcctttaatcccagcacctgggaggcagaggcaggcagatctctataaattcaaggccagcctggtccacagagcaagttccagtagagccagggatacacaaagaaaccttgtcttgagaaaaaaaaataataataatttttaaactgaggcactgggctgtcttcctcggccagcaggtgtcaggcttgatcagtgtattgctctgtccccatggagcctgttttcattttcctgttgattttgggaggagctgcagtctaaatgctggcctcttgaaagcacattgcacttatctcaaggatataggctgcagcctgcatttgcttgagggatccacatggtgggtgagctggcctttcccctgaggaatggtgagcagaatggacctatgctgccacacagggattttaattattgccgggctgatcagtcctgggaaaagcaacttctctttccagattcttgcagctttgatctacttcgtaatctcaaactgccttaactcagagcgactcgcttcgtttcctgccagttcccatctgagcttgggccagtatttctctgttttactaaaggcttctgtgtggcaggttggtttgttggcccttactacttaaaaacaggcttgtcacacatgaattccccagagtgggtggacagtgttaacaatgagcacctttccctttaagaactaaatacagctctgggctttgctgcacacatggatgcagaggtggctgtccattatgtattggggaagaggatgttattcggcttttaaaaaatgtgaaataccagtatatcctacattgtaatgagcttaagattgttgcattgttggggatgttgtcacaggccagtaattctgccgttctacggagtgaagctgggaaatcgcaagtttgaagccagcccgggctacacaggatgaccctggcatttaaaaacaacaaaaaattacactaagtcagacatttaaaaaaaacattgatttcttttccatttatggggaagtgtgtacataaaaagcaaattgcccatcacaggggctgcagggaccgttagaggctgtggagcccatgctgcctggctgggatttctttctcaggtggtggagacacactgcacacattgtgagtccatgctgaaaacagctgaaaacaggctgtttaatgttttttaaaaaggacaaagctgggcactcacctttaaacacacactctcaggaggcagaggcaggcagatctctgagaccagcctggtctacgtagtgagttctagaccagcaagactgtatgtatagtgagaccctgtgttacaaaagaaagaagaaaaagtcagccatcaggctctgtcctggcactcgtaagaagccgtcgtccagggtcaaagctgccgtccagggtcacgggcagccaggctgataacttggttcttttggcccctatcttttgcttttgcttagttttattttatttgtttttttgtttttttttctgtttctgctctgaaacccgtcctttctctagcagtgtctgctgactacagagctccatcagttggtccgcaatctgtttatgctgaccccctgcttttgtaggtccttgtcgactttgagcatcctccctgcacatcttgattcaagggcctggaacacacctgctcaagctcgccctggtttgtgtgaggcccgactgcttcacggggcagaggggaactgggtgttccagtttcacccatttcctgacttggatggccatcttcctacgttttctattagtgcagcaactttttttttttttttttttgtaacttagtaaggctgaatacctgacagtgaacaaaagtgagaaagggagatggagcactaaggagcttccttacatagcaagcaaggaaacaaacaggctggtgcctagtacatatgtacatatgagagtgtgtgtgtgtgtgttttgttgtgtgtgtgtgcgcgcacacatgcatgcacatttctgcattatccatgtctgtgagcacagaaccatggaagctctggaggtgtggttcactgagtgtcttcagggagtagtagggcaattttgctaaagaattccaggagagctgagagtttaaggatagaatgtttgcctagcatgtatgaagccctaagctcaattcctagcactgaaataacataaattccaggagctcggatattatatagatgatttttttaaaaagatgtatgttatttgtatgtgtgtgaacagtttattaacttctacgtatgtgcactgtatgcctggtgcccatggaagtcagaataggggtcacatcttctggaaatgaaatacagatggttgtgagccactgtgtgagtgctgagaatcaaacctgggtctcctgcaagagcaacaaatgttcttagccattggccatctctccacccccaggcgaatttttcaagctttatttttaatttgtgtgtgtgccctgtgtggggtaccttcagtggccagaagagggcatcgcatcccctagagctagagtcacgggtgtttgtcagtggcctggtgtgggtgcctgagatccagcaagtactcttcagccctgtgaaggtgaattctaaaatgtacgtagtttcattttcttttttaatgtatttactttggccaaggagtagagcagagtggccccattagttcccccttgtgttaaaactggaaaggcctgttgaatgggtccatgaacagatgcgtgggggtgaagccacacccccagtgcttccacagtcctctgttcataaacacatatacacaaatgtcctcacacggaaacataagtgtacgcgagtgcgcacagacataactatactggaagccactgacagactcaagccaggctcacccccttgtctctgctgcttgacagagtagctgtcacttcagaggagacatggacatggaaaaattaacaccatgctcttgggcaccatggtgtgtttgttgcattgtttctaatcattgaaaataggaaacaattactccatgatacaaatcagagaatcttaaagacaactaatagataaataaaactggattcttagagcctagatggacctaaggattccatttgtattcaggttaatccaacgacacgaatggacgcctttggggatggtgatgtcacgggacaggcatggggcgggaaagcaatggctgacacctttcatctgtgtattgtattttgaggttttgggtgctgtttgtctgtctttaggcaggatctcactttaaccttggctgacctgcggctgaccaggaagacctccctatagcccgcacaggggcttttggccttgcctcttttgttttgttgatctaagtgtgagtgttttgcctgtgtgtataccatatgcgcaggcgtggtgcctgtggatgtcagaggaggatgttgggtctggaactggagttgtgtgttgggtgctgggaatcaaacccaggtcctctgtaagaacagcaagttctctcaaccactgagcgtctcctcagcctccattatatatatatatatattttttttttaataaaaatacaaagtttagcattttcaaaaattttatatatcaagaacatgaagccctctgagataaacatcttttgttatttatgtctgctgttcttctagtggacctgagtttggttcctagcaccacactaggcagctatggcctcctgtaactctggctctaggggtagccaacagctgacctctggagagacctgtaattattcacatgtatacgcacacacatgctcgcacacacgcatactcatgcacacacataaataaaaagtcagtctttcaaagaaaaaactgttaacagcagtgagtggggagggttatggtgtaaagaaagattttgtgtttgcttttctgcagatgtcctgtcgaggaaggcaaaagactttctaatgagacagttccaacagtatgggaaacacgtctatgaaacagcagggtaccgggttctgaatctagctccacacatcttcagtgtgcgtttaagggaatgaggaaatgcaggggtctgggccttttccagggatgaaccaatgaagtctttcttctctgtgtttttgtgtttccaaggttgtgttgtggtccagagtttgcagtatttttcttactggcccaattgtggctaatcttcttatgtgttagagaccattctttacagttatgtggactgctgtctgccagcaagcatcagcagctttgccacctcctgcccacggagggtagacaccgagtagacaccgccactctcttatgtcttctccttggtggtaaagtcccatcattctagtactgttacgcacaggaataatccagggggaaaggaaaactgcatctagctacctcctgtggcctccttgcagtcacagccctggtgtgcccttgtcttctgtcgggactcatggtccttcctctgctccttttttctttaaagaataagtgcacaaagacttgcccacctcaataagtgcctgatgaacttgaagctcgggaatttcagctatcagaaaacccctctgaagttaggagcgctccaaggaaaccacttcactgttgttctcaggtaaagtgccacagtgggagtgcagtgcagggaggtggggtgggggtggtgcagagcctgggctggggctgggcaggggcggggggggggtgcagagccggggctggggctgggcaggggcggggggggggtnnnnnnnnnnnnnnnnnnnnnnnnnnnnnnnnnnnnnnnnnnccggggctggtagcagggctccaggagtctgcacatgtcacaattgggtacagggtacctgcgtcagatagaaaggctaggagagcaaggcctgtaggcatgaggaatagatactgtgtagtatttttcctgataaatggtctttgtccctccctaaaaagattcccatagccttcagaaacactgtgtccttcagttactgactgaaagataaagagcctactattgggggctggagagatggctcagaggttaagagcactgactgctcatccaatggtcctgtgttcaaatcccagcaaccacatggtggctcacagccacccataatgagatctgacgccctcttctggtgtgtctaaagacagctataatttactcatatacataatataaataaatcttttaaaaaatgtgctttgatttgtatgaggtgcctagaatggacacattcataggaagattagagcttgctttggtggatgcttcagtttgtgattaggcatggctgcatatgtatgtaattccagcactcaggaggcagaggcaggcgatcacactgcttcaaggtcaacctggtctacatggagtgctggctggccagggcaagagtgtgcagagtgagggagtgagtggatgaatggatctggacacagggaaggagtttgggaacagcacggtggtagatgctgcacatgggcttcacgctctgataattggtactgatgaaaacaagctggaggacggaggtgcatgcctttatcccagcagtaaggattaaagcacacaggcagtgcaacctctgagtttgaggccagcctggtatacaaaagcaaattccaggacagccaaggctacacagagacaggaggtagaggcaggaagatttctgagttcgaggccagcctggtctacaaagtgagttccaggacagccagagctatacagagaaaccctatctcgaaaaaaccaaaccaaaacaaaagattgtcctcataaatgcattctatacatcaaacatattaataatattgagtattttaagaatcaaataatacataaaaatgtttcaacctatatatatatatgtatatatatatatatatatatacctttcataccctaaaatatcattaatgaatatttaatactatctgtaactgaggatcctatatctaatgttgaatactaaattgtttcaaaacatacaaaatattcttggtgagttaagcatagtaaaagagcatgaaatattaaaaatggatcattaagaaatatgttcagaagcccttatgtgataccacctgacatagtgagagagtatttaaaatgcattatatatctgtgtacattgtctaacaatcagtttatcagtgtttctaggaaagaaattattttatcagtaagtatattttaaagttttcaaaatagcaaaatctctttgaagttaaacattaagaaaatgctaatttcaagcacagtgagaaagattatcaataatatttccatggtatttgtagaacatgattttaatattttcaacagttaatattcaacaaacagaataattattttaacatgtatttcattgttgtgtctcccttttcatttctgattttattaatttggatactgcctctgtgtcctctggttattctggataagggtttatctatcttgttggttttctcaaagaaccagctcctggtttggttgattctttgaatagttctttttgtttctacttggttgatttcagccctaagtttggttatttcctgtggtctactcctcttggatgaatttgcttcttgttgttctagagctgtcaggtgtagaagttgcccttatgtgcaccataaaatgtatttggctgtccatttttttttgttgttgttgttgttgttgataatttgggtccctgcaggaatataacaggaactgatgagcaggtgcagcaagccatgcagtctctgagggagaccggcttcattaactactatggcatgcaaaggttcgggaccacagctgttccaacgtaccaggttggaaggtttgtattcagtcttttatcgtttacctttgtatcttttttatttagggtttttgtgctgtttgtttgttttagtttttttgtttgttttgttttattttgtcttgttttctgagacattgtctcactgtttagctgaggtacatactggagcacctagctccaggtccctgtacctacagaaaagccaggtgtggtggaacacttttatgacccagtgctgggaaaatggatacaagtacatctctggatcacttgaggctcgtgtgtaatgtacacactcacacacagaagaaaaagatgtgacctgaatttaaatttttcttcccactattaacagtccgtccaagaggtccaagagaatctcttaggttttggaattttgtttgttttttatattttcaatttttaagacagggtttctctgtgtagccctggctgtcctggaactcagtctgtagacaaggctgccattgaactcagagatctgcatgtctctgcctcccgagtgctgggattaaaggtgtgcgccaccactcctggcttctctgttactttttaacaggtaagtggacaccagtaaaaaccagggtaacacaaatccagactatgcaaacccaaggcactgtgtgatctctcttaacatgtgggttactcacctcccatctgccctcccccaccctttaaagaaaactgtagaagatctaatgtggaacatatgagcttggttcacatttagataataggaaagccctccagggtagagtagaaatctcatcagtaaatacttggtttcataatcatccagtgggaatcccactgtccagtagagattgcattgcataaagtaacttcctcctaggagctggcacgctggagtgcacaccgagtgtggtctgagaacatgtcttcctggttctgtctcagcactggcaggcggaggctgcgcttcagaagggccgaactagcatgctggttggacagccgtagaaacagttttctctagttcagtttcccaccatcaggttgtatttgcttgtatgattttacagggaccaagggttaactcagtctgctgtgacgtctctctcaagcaacgttgtaaaaggagaaatagaaatatttctaacttaagaccaggcaggcacagtggagtccactagaccgtggctgagcctgcagagccctcccgtagtgtacgaggggccctagacgggacctctagcacctgaagaaggaaaacccgccacactgtctccggaaacacacagaagcatgatgaagacactggctgttgtggggcagagcatttagtgaaggctggcatcagcttgtttttactatttttaattaatttcgcaggagcaaagccatgtcaccctatagttttgtacccaaagaattttttcgcgaagaaatacttgctcagtaaagtgttgccagacttaacccggaaacacaagtttcagaatattcccaaaggtctgcagaagttagttcagattttcaaattatttgttttcacaatgtccgattatttcctgccttcaaagaatgtactgttatcagcatagggtttcccagcatatagttaaacagaaggtgaattgtatccagactacataaaggcaatatatgaaaagctatattgttgtccaaaaggacaatagctttcttaatgttttttgttcaccggggtcagtcacatattctggttggtttcattgtttcatgtgtacatgttcagtagtgttctcctgcacgccctctgtcctcacgcctgccctctaatccccccaacccccacccacacaccccacccccgctcttcccagctttctttccttttactttcgtgtgttctacatgtgtccctgaagttagagctctttacaggagcatgggtaccttacggctgaagaacgtgttcatgagccccactccattctatgatggggaatcagcaagccccattttctgaggagcttgtatgaataatcacagctgctgcaagttcaagagtgctgcagtctgtcctgctcagaagttagcttccttcccataccctctccagcttatacaccctctccagcttatacgttctttctattcccttcctctttgatgctcattggaggagatgatatagagtccagaagggggcagcaagtcctctggagctggggttccaggcagctgtgcccattggagggtagatcctgagaatccggtcctctgcccaaggaatacacactccttttagagtaggtagtgacctctgaatctgtatcatcattgtactgcatacttttaaatttaataaactaagtcttacttggaacatataaagcttattatatgcaaagttaactaatgtaaatactgtctaattctagagcaattctacagaattcctggacagaagtcatggatttaatactgaaaccccgttctggaggtgagaaagatttgtgtaaaaataaaatgcatagagtatatagctagatagtcatgaagtcactttaagtaaacgtaactgcaggttgttattttaagttcttgatcttttttattcaaaattttaatgctatttttttttaaagatttatttctttaatatatgtcagtacactgttgctctcttcagacacagcagaagagggcatcagatcccattacagataaccaccatgtggctgctgggaattgaactcaggacctctggaagagcactctgtgctcttaacggctgagccatctctccagccccactattttattttcatggttttgcataggggactgaattttttaaaatctgtatcgtagtcttagctttattcatgcatggttgaatgtacttgaaataaattaatttctctatggttacttcaaattctctggcttataggaaacttttatgtatgactgctttgataaaaagtgttataatgaaatatgtgatcttggcaaagtaccttaaggatttttaaaagtggattaaaatttttccaggaaatatctctaaaactacactgtaaaagagggatttaactggtacttttttaaatttttaaataataaacttgatttaggtaacttcatttgcaagctaaaaacgtgtttttatttttaaagaaagcattaaccttgctagaacgggggcaagaaaaggagaaacttccttccggttgttctttgctggactagttgcagtgatgatgagtagtgtctctggctgacgacggagctggggagggagaagcacgctttctgtgaccccgtgttgtcgcttttgggtgactgtgagcatcttcattacacggaaacattcccccagttctaggttccctgtggagcatgttaaatggcgggcgatttctgcagggaagtttgatggcgccttctctctcccgcagctgagaagggttacttggtgaaatgcagagaagaatgggccaagaccaaagacccagcctctgctctcaaaaagctgcccgtcaaaaggtgtgtggaagggcagctgctccgaggactttccagatatggaatgaagaatatagtctctgcatttggcatagtgagtgcaatttgtgaagtgaggcggtgcctcagaagtggtcagtgctttctaaacataatcctaaaatgatcttgaaagaccagcaaagaatccttagtagtctgcagaggaatttattagggtatacctcagttttaacctgagagctgattgatgtggaaaatgctgccagtgtttgttgatattagagacacaagaaagtatctgtggggaatacttaatgtagccgagtgggatttgagacgctcggaacccactgtgtggtcatttcttccaaagctgtagtttacgcttgtgctcatgcagggcacgggcatttgctgaagcatgtggttagaggtccggagagtccactctcgctttatagtatgtccccgaggatcagactcgggtagtcaggcttggctacaagtccctttagctgctgagccaggcctggccctactgtagtcattccgtggtcatgttctcattagagctttcaactgcccgagaaaggcagtcggacaggaagtcgctaagagattgccagtgtggttgcagtaatggggaacatatcggcaagcatagcccatgtatgagtataattcatataattcatatatgagtataattcaggacgcattcccagccccacatcagttatatgaaatgtgagtctcttgtgttagaattaccacgaaatgagcaaaatgtctggaaaatagcacttttaagtgttcagaattgttcctttgtctgtttctccattcgctgcagattccaagaaacaatcgcttaatgtacatccacagttatcagagctacgtgtggaacaccatggtgagcagaagaattgaggagtacgggctgaggcctgtgcccggggaccttgttctcaaaggaggtatgacgtggaacactgctgccgtgcagctaattaggaccctgatattttatcacagtgtttttcatccagtatggtactagttaacaaagagatgtgtagtaattgggagatagaaaggccgcatgaagtcaggctgctagtttgtatcaccagtgaaaaaaatatgttagtgttttgaataagcagctaagtctgggggctcctgcttaagtatagcagaataacttttgggccagtattggctaaaagtccattacaaacattattcaatctgggtcttcaaaatatgtctatccagagagccatgaggacaccagcctggagctaactgcactggtgagcttgatagcgtaagccaaagcattcacagaggaagtacttgccaggccatggtggcgcccagcactcaaggcagaggcaggatctctgagttcaagaccagcctggtctacagagctaggtccagggcagcagggctacagggagaagccctgtcttgaaaagatgagggggtctcggcgggggagaagagaagagaaaagctaggatgaggggctggagagatggctcagcggttaagagcaccgactgctcttccaaaggtcctgagttcaaatcccagccactacatggtggctcacaaccatccataacgagatctgatgccctcttctgagtgtctgaagatagctacagtatacttacatataataaataaataaacaaatctttaaaaaaaaaaaagaaagaaagaaaagctaggatgaatctagagcttggctcagctataaagaacactggctgttcttccaaaggagccaggttcagtcccgagcacctacatggtggctcacagctgggtataactccactttcaagggatccagtgccctattctggcctctgaggttctgcccacacactgtgcacagacatacatgctagcaaaacatccatacacaaaaagtgaaattaaaaaaaaaagaagtgttaatatcctgtgcactatgacacatttaccgtgtgtcaccttcagtgtgctgcatcgctctgttttagtactgctgggaagtcttctgatttttatgagatttagccccttgcccacggttcctcagctaattaaagaaagagacacgcaagcagctgggcctctgcagctggacacctgtgcttccagcttacctagatgtgtgtgaccgttatgaacctgaactcttgaaaactcggttcttaacctgctgtttacttgcggacttgcagccacgcccacctacattgaggaagatgacgttgacaactactccatccacgatgtggtgatgcctttgcctgggtttgatgttatctaccccaagcataaaagtaagttccatgtctgagccagctcgttaagacaagtgtaatgtggctgagccagcagtagctaaagttgaagcagagtgggaagcggtacttgaaggctaatcttaaagctttctttctagcacattttctctgtgaattctaggctagcctggcctatacattgagttccaggccaatcagggcgacctagagagcccttgtctaaaaatttaaaaacacacacacacacacacacacacacacagagacactgctcagatatattttttatggtgaaggtcttccaggaaggaatgtattcaggggggtactttcaattagaagctgccgctctgtgtgtcatgagcctgtgatcttgggtgctcaggtgttggggggagcatagagggaggacttgtaacttctgtggttctggattcagaggcaggaaaaagcagctctgagtggtttggaagaacacccaacacttactctcagccagcactggcctgtggacagtgtatttcctgtgtaagttagaactgactgggactgaggtccttcttggctcaggattcctctagccagggttatagagtatgccatccatgtggctctgtttccagtgcttgtactggctgagttcactgacgaaaaggcagtggacgggagccagagaggatgaggaagatagacagggactgtctgcttccctgagaagcagagtgctgttggttgccacagccgccgtgcgggtctgttgattctgcttgtttctgaggtgtttgtctcctttttctatctgatgcaggccagagcacaggtatggattctccgatactttgggcttccttactctgtctctgaaggcctccctccctcctttttgccacatgagtgacctccatgcctgactcaaatggcatggctttctctcttcctgttctcctccccctggataactgctgagagctgcagctcgccttctttggagtttttcatttaaacaatgataaaaaaaattgtccttaagcttttaagaaggatgggggaagcaaacctttgtttttgtcaagatcctcctggaacagatagcataaatagagataagaacggggatttgtgagaggcattggcttgattacagctaccgagaagtcctgggctatctgtgtgctagagaaagaaccagagacgccattgatctgtcaagtcaggggcttcaggtgcagacctgggagtctgctggtacaagtcgtgaagtcccgggagcaggagaaaaatagtgtactgaggtctgtgaatagggagcgcctcggcctttcctcagcctttctgctctcttcagggcacgtccacaggagaaaagaacctgaccacactcagatcattgagggaagtcaagacagaaatgcaaacaaggacagctgcaggagcgagagcaaagctgctcactggattgttcggctcccttacttagacagccccacccacggtgaaccagaccttcctacgttaacacagcagtcaggaaaaacatacctcagacttgccacaggccagtgtgatgaaaacaatcccttacttaaggttcccttctcccaggtgacaatacttggtattgagttaataaaaatgattggtacaccaagtgtccatgagtcgagctaataccctaagtcagccatcactaaaaagaagaagaggcaggaggatcactgagtttgaggccaacctgtccatgtaagttagagactagctagggatacatagtgaaaccttgtcttcaaaagagaaaaagtatcaagggtcagcaagatgggtaaaggcacttgttgtgtgacagagaaaatttggtccctagaactcttgtgaagtcaaggaaaggaccaccgccacatgtgcgctacgcccacacacagaacgaccctctcttatgaacacacacgcactctctgagctaggtgtggtggtccatggcttgggaggcagaggcagaggcagaggcaggtggagctcttaaatttgaggccagccagctctacagagctcgttccaggatagccggtactacacagggaaaccatctctcaaacaattaaataaataatttgtgaaacaacaacaaaaataaggagtcaggagttactgttgaatcctcgtagcctggggcagacaaatccaaaaatgtcaaaggagggacagctgaaggaaccagagtcaactagaacccctgacagcgctagtgcttgtgggtacatgtggaggccagctagtctgccgtgttccagaagagccacgggagtacagggaaacaagcctgtttggagtaggagggaccatctaatatgtgcctcgggtaacagtccctcacaaatgacatgtaagggaatattagaaaatgcctgtgggctgaggtgactagggctcctggttttaaacatttagagtcactgtgtataaattgtacttagaggggctgggcgtggtggcgcacgcctttaatcccagcactcgggaggcagaggcaggcggatttctgagttctaggccagcctggtctacagagtgagttccaggacagccagggctatatagagaaaccctgtctcaaacaaccaaaaaaaaaaattgtacttagaaagtccatgtgaagttagcttggaaactttatgccacactccctgtggctggttacatacataaaaaccacagggtgactgaagtaaagctggaggcgctttctaggcctgttttactacatcactagggttaactacttgtttggggcagtctgactagacttgctaacggtatttctaatattgtgagtttaccgctagttcaaggaaacctgctgacaggctgtgctccagttaactgtttgtttttgtgttagtcagcgaggcctacagggaaatgcttgctgcagacaaccttgatattgacaacatgagacacacgattcgagattactccttatcgggggcctaccgaaggatcatcatcaggcctcagagcgtcagctggtgagtgtgacctgaagcaccctgcggggtcctgtagaatcacaaggttttgtgttgtgtgtgtgtctttctgtgctcagaacctagtatataatgtgccatagctgtcgcctgcccttattaccacggttaccactgccaccggtttttgtttttcaagtgctcaacgaattagagttggctacagtcatacagcgacagttaattctcgtacgttttgttggaatccctgacttactggacagatgtacagaaaatgagcttcctcgcctttctctgtaaaacttccatttgcttctgggactagaaagatgtctcagcagtaagatactggctgttcctccagagacccaggttcaattcccagcacccacatggcggctcacaatggctgtaactttggtcccaggggattcacacactcttctgacctccttgagcactgcacacctggtgcacagacacacatgcaggcaaaacactcatacatacaaaataagattagaattaaaaaaaattttaaaagatgcctttgatatttattctgttttttcaagttttttgaactttaaaatgaaatcctgtactagttgaccatttccaggaaattctttttcctgattctctttcttttcctggctgtggccatgaagttgtcagagttggcgtttaccacgcacagtctggagagcagtctctcctgagagggtgatggccgcagtgcccactgtggaggaaatgtgaaggccacggtgacttccaccgtctgtgcaaagtgatgcctgccgtgctacggaaccatcctcatccttcccaccgtccagggccactgggctctactgtgcagcagtggggaggcctgcagccagcctgggtgctttccttgcccagcgaatgaggacagtgacgacgagcaagaggaggagccgtgtgccccttctcacgctcgctcatgctcacctctctctgtgtgttttgaagggaagttgttgcatatgatgatcctaaaattccacttttcaacacggatgtggacaacctcgaggggaaaccaccaccagtgtttgcttctggtaagtcagtgctatgggagtgttttctatgggtcggcgcgtgcgcactgcacacacgggagatcagaggatgattcagaggggtcagttctctttacccttttgctcctggggacatttaagtccagacttagtgcagctgcttctacttgacgggcgcctttgccagcccttcctgccctggtcatcaggttcctgagtacagctaccataccccgctggtccatacactcctgtgctctcatgttgtggtctcatcctgcgagcacccttggggagtggaatcgtaaggaaaggggcgtagcttttggggaagccccgtgatctttggtcagtcttttggtcactcttctttcttgcccggcagaaggcaaatacagggctctgaagatggacttttctcttcctccttctacttacgccaccatggccattcgagaagtgctcaaaatggacaccagcatcaagaaccagacccagctaaatacgagctggctgcgatgaacagtgcatcgctcagagaggggatgcagacctgcttctgacctcctattctggtctttttttaagtgctgactcatgtttggagtttaaaacttttgtagtaaaggatgatttgtattttgtaaagtttttaatcagcttaaatactttgcaatatttgtacacatatacaagtcctgaggatcctaatttcagctcagagatcgaattgggtcagcatatcctgtaggtgcttagattctagtacagcatcagcttcctgcctttaacacagggaagggggacttggtttaaagttgcggttttaggttttgctgcacacctgaagtacaaaccagaatcttagatgtttgtgatgagattacacatggtccgtgtcagagcaaatgcagcagactggaaactagagactgcacacttaacacgcagttcccgtgttggtttcaataataacaaaacatccacgggtttataaacacggcgtggcttttgttgagtgactgtgttagcttcaggtgagcatttatacacatcttagcttgcagtggcttttctggttagtctatcagcatctttcagggcactcttttccttgataggagcctgtagcttttcttgggtacagtctgattttactctgggtgcctcttactttcagaaccttttcactggactcaaaagtaaatagtgtgagttccaggacagccagggctacacagagaaaccctgtctcgaacgaaaaaaacaaacaaacaaaaggtaaatagtgaccatgaaggaaatctgggaaacttagaatggctcctgcagccaggcgtggtggccacgcctttaattccagcccccgggaggcagaggcaggcggatttctgagttcaaggccatcctggtctacagagtgagtttcaggacagagaaaccctgtctcaaaaaaccaaaaaaaaaaaaaaaaaaagaagaagggctcctacttccatctgcagcgctgaccctcagccagcagctgcttaggggtttccatcatggcagtgcagaaaaccctcctctaaaaagatggatatgcctttcagacagtgtgagacatgactctagccagttttattttctgttatttcttaaagcaaatgtaataaatatttttaagaacacatttttttactaattatgtaaataaatcaaataaatattctaaaactgagtgcatgtaaaaatcttgtccctggctaacgggcagcaaggcgctcgatgagtggacagtcaccagtcagcagatgtggcatagtggcgtctctatcaagatgggctgtgagactcatacagtatccactggggtgactgactcatggcctggactcaaggtaattcctcccacagtgtcgctccctggcctcccagtgtgctttctggagtgaagaagatgcctggagagagacaacagccattaaagtataattgagggggctgatgagatggctcagtggttaagagcgccaactgctcttccgaaggtcctgagttcaaatcccagcaatcacatgttggctcataaccatccgtaacgaaatctgatgctctctcttttggagtgtctgaagacagctacagtgtacttacatataataaataaataaataaataaataaataaataaataaataaataaataagtgggaaagtataattgagaaccaatagtgcatttctcctccctctcctcctttcctttcctctcctctcctcacactggccagtggccacacactgctgaagcgaaaggaatgagtcagacctgatccagccagctcacacttctacaaccccgagtgtaagtgtccatggttactgaggttaccctggattcaaatagtctgcaaacaaaaaagtgttttatcctgcagaagacttgtatactagggtctaccatctacaaagagagagagatcctgaactgagctcacaggaccaatttaaagcacattacgggaattccagagtaggtgaccttaatcttgctccatctctaggaatcgttcagaaccattgttggggcctaggggcttgccactggaagtctggaaactgttgctgccccatcgtccttgcctcaggccaggtggtagtgcagcttctgaggcctggatatgcctagttcttaaaaacagattgaggcccagtctcctgaactgcctatttgaagcctgtcatggagttagcctagccttctcaaagcaaggtaaataactcaaagtagcttcaggaagtcctgaaactgaccagatccactaggcccctccctgccagaataaagtataggagccaaggagtctcagacaagctgagctgcaaagactgagaccagaccagcctcctgaaagaagcagaaaccagctgagctgcctggaagaggtatagagcagaggttcctggaaaggaccccgccagcctctgggctgcctgcaggctgtgcagtgttcccagctttgtaaggggtcatctgtgctaaggtgagccttagtgatgcagctgtctgagtcatttctgattctgtaagtcacccgctggttcaccaagttggacctcggtagacaagtaaatgtgagctgaatctctagcatgaccatgtcacagcagcaggagcgtcaaggcattccagactgccttgataacagcaggaagtgaggaccaagaggagcacaaaaataacaccctcatgggcagtcagacaactcaacagagttaatttgtgctaattagaacatccaaaggatactgcactattaggttgttgttgcagggtttaactggactgtggtctggctgcagagtaagtaggaaggatcatccagaggactgagggcagcaagtatctcagcatcaggacagcagagggaagacttaatgcaaaggagaacgtaaagaggggaaagaaacagtagaccacgatttccccagcaatgtgacacatcaagtgcccaatgcatctgatttgaaaaagatccccttgccgggagagttcaatctaaaatcttccaacagtagaaattgaacatccatggtacttacaaagtagccaatcacatcgatacagatttctcaatgccaagcgttggccagtacccagtgatgtcttcaagcatgcaagaaaaaaatctgagagcctacagttcttaacacataggtgtcctcccggtgcactttgagagcgcagtggggcatggcaagagctccaacagattgtgtctagccactatttgacccaaaaaccaaaaggcaaactgagaggaaggagagaaatttaatcagtatgtctatattgagatacattaagataatatctgcattgaaagatgttaagatataaagcatgacacttccaccctagaggggaacactggcctgaacactctgctagcatgggggcaggggtcgggggaggggtagcctaagaatgagtcttggtcaaactgtggtttggtttatcatctcaggactggtcaggggtcactgctgcctaagcaacagacaagactgtccacacaagatctttgtttatcagatttgtagtttctgggattcaaggtaatgacacaggaggctgactaacagcaaaatgagcagattcaaaatagagactgttgggctggcgagatggttcagtgggttagagcactgactgctcttctgaagttcctgagttcaaatcccagcaaccacatggtggctcacaaccacctgtaatgagatctgacgtcctcttctgttgtgtctgaagacagctacagtgtacttattaataataatgaataaatctttgggactgagcaaatggagttgacctgagtggggtgaccagagcaaccagagcaagcacaggtcctaaaaattcaattcccaacaaccatatgaaggctcacaaccagctgtacatgtacatacaataaataaataaatctttttttaaaaaatagagactgttgcagaaaatatttaaaaaggaactagcacaaacccgagctagtgccagcaactctctgccaaagcagcctggccggccatgcactgatgggcaatgggcgacctgtttttatctcatggagactctgactcagtgctccaaaatctctccacccagctcactaagtacccactggcactggcagtcactaccaggccaatcccgtgcttcaaatcccccacggcctttgtggtgcacatctggcaaacacaccttgcccagtacctttctctcttgaactcgggcaagtcaccacgtgaagaaaaacacagcacaaacttagttcagaaacgacggtaactcaatcattgggcacagcaactaaaatcctaatcctgtaagtcttattaaatctaaatcctctagtggcaaatcctgatggatctgccactgaaaccaggagacatcttgtcctcacactatcccatccaaaaggacctaactctctcctgcttcctctcttcctccatccaacctggaagtcccgcctactcgcccagtgatagattcctttattcattagggaattggttcacaagaagtcacttaagtatttgactcactccttgtctgcaacccctcccaggagagcagaattagcatcaaaatacaaacagtaccaggcccatcctcaagcggaggcagagatgccaaatgtttaatcctgattagttacgcattagacctaagtggaggcagagatgccaagtggtaacccattagacctaagtggaaagttggtgtctttaagcaaattctctctccaagtccttgttataaacccacaccacctaggctctgacttccctcagtgtcttacaatataattctaactctgtccatagagagctcgtctcaacactgctcctattctgatcatcatgagcccatatttcttacttcttaccaacttgttttccataagaaattcctatggctcccaccttcagatataaaagtgtgtgagagcagctcacagcacaggatacaacactgctggcaggtttattatacaggacgtaattcaggaatagcaagactgggagatgcataatgaaagctagagggaggagactagaatttccgggcaagcagcaccccagtgtaatcactgtatcccacagtccaggggtttttttagaggttctgccacagacgcatgaatggccaaaatctaatgttggctaatgttgtcagtccttgcttcctgaagagacactgaaattccagtcctcccatccaacctggctagtttccctggcaacaagcccaaatgctgtggtcatttcagatcctggaaggtactttttatgaatagctatttatttgtttttcttttatgtctataagcatttgcctacatggatgacgtgtatcacatgtgcacagtgcccatggaggccagaagagagtcagatcctcgagaactagagttgcaggcagttgtgtaccacaagtgggtgctgggaattgaacccagggcttcaggaagagctgctagtgctcttagagcactgagccatctccccacccccagcagctgtttcttgtcatttaagaaactcaagggtttcaggagccctatgccagagttgaaaaaggccaaattcacgttttgttataaattctaacatcacaaatatgtagttttagctcatgataaatgctgtgaagaatattcaacaagaaagataatgaggaggtggtaagaaagtgttgtactgagtcgttcagcaaacctctctggagaactcagatgagagcatgagacagaagagctgagccagagaccctggaaggaagcatgcacagccagctggggcagaaagaaaagaaatccaagtgctgggatcaaaggcgtgcgctaccacgccggaccagggcattttcttgatatgggaatgccagcccacggtgggcaaggccacagcaggacaagtggtcctagtgcaaggcaagtggtgtaagaaagcaggccacagagagcagccagcatgcagtgctcttccgtggcttctgcttcagttcctgcctcacgaggactgtaagctgtgagatacactaaaccctttcctccagagttgctcctagtcttggtgcttatcacagcaatagaaagcaaactgagacgtggggagtatgccttggaagtctggatttccagttgaggtcaagagaaaacagtggttgtgaccagagcatcatagatggatacctccttagcaccacagtcatagagactttatatttttttaaagacagggtctcatttagtcataaggttgaactccaactcagtgtatagtgaggctgacnnnnnnnnnnnnnnnnnnnnggtttctccatgtagccctggctgtcctggaactcactttgtagaccaggctggcctcaaactcagaaatccgcttgcctctgcctcccgagtgctgggattaaaggcgtgtgccaccaccgcccgggccagggcattttcttgatatgggaacatcagcccatggtgggcaaggccacagcaggacaagtggtcctagtgcaaggcaagtggtgtaagaaagcaggccacagagagcagccagcatgcagtgctcttccgtggcttctgcttcagttcctgcctcacgaggactgtaagctgtgagatacactaaaccctttcctccagagttgctcctagtcttggtacttatcacagcaatagaaagcaaactgagacgtggggagtatgccttggaagtctggatttccagttgaggtcaagagaaaacagtggttgtcaccagagcatcatagatggatacctccttagcaccacagtcatagagactttatatttttttaaagacagggtctcatttagtctaaggttgaactccaactcagtgtatagtgaggctgaccttatgtttatgattctccaccatccacttgtctgtctgtctttttttttttttttttaaagactttatttattattatagtaagtacactgtagctatcttcagacacaccagaagagggagtcagatcttgttacggatggttgtgagccaccatgtggttgctgggatttgaaccctggaccttcggaagaacagtcgggtgctcttacccactgagccatctcaccagccccttgtctgtctgtctttttccctttctttctttctttttttcttccttccttccttccttccttccttccttccttccttccttccttccctcccctctctctctctctttctctctctctctctctctctctctctctctctctctctctctctctcttttcgagacagggtttctctgtgtagccctggctgtactggaactcactttgtagaccaggctagccttgatctcagaaatccgcctgcctctgcctcccaagtgctgggattaaaggcgcgcgccaccactgcccgacttccttttcattttttgaaatcctttctgcctttatttttttccccttgaatgtatagcaatgtaaaacaatgtagaacctcttttattcttaaagacatcacactgactaacaaagatataaatagtaataacaatgattgttagattaatctactaaaaaggaaaaattatttgtgttagtgcaggttgctataaccaagtaccataaaccataaaggggtgtaaaactatgtgtgtccctacttttatttttaattttgtatttattatatatggtacatattattttgtaattatattttataattattgtatattacatatgtatgtatttatatttagttttgtatatgctactctaccatagagtagagtgtaggaacagctgggaatagggagcaaacatacttgtctggcctcagtgggagaggaagcacctagcctcacagaaacttgaagttccagggtgggggatacccaggaaagcggggaagggaaaggattgtggagggggtgactgggaggagggcagtgagcaggatgtaaaatgagtaacaaagtaaatttttaaaaatgacaaccaacattaaaaaaggcactgatcgggctggtgagatggctcagtgggtaagagctcttccgaaggtctagagttcaaatcccagcaaccacatggtggctcacaaccatccgtaacaagacctgagtccctcttctggagtgtctgaagacagctacagtgtacttacatataataaataaataaataaatcttaaaaaaaaaaaggcactgatcccattatctgggctccaccattatgcctacttaattatctgggctccaccctcatgcctaattgcctcccacaggcccagcacacactttagagaacatacatgttcagtctacagtgttataggaaatctgaagccagcataagcataatacttaaaacatatttaatacattctaaccattaaaagttaatgatctgctgaatatgtcttgaaattccatcaactcccacaggaaactccttccttggagatagttatccacttcagatgtctgaggaagtgaactgtgtcattccaactagaagcactgattggcatatgtcagtttcacttaaagtatgatctgcttttctaaagttaatgtagaagatgattacctgaagacagggtctgctgagtgtgcacatgtatgtatgtaacagaggctgcaacaacccttgcatgccctaccccctcccaactgttggtatttatcatgttaattggccaggagacaatggctatccacttttgacacacatgcctttttcaccagcaataaatgcaatgctgttagttaaaaggtaagcactgaccagatcctagcggctgctcagactggtttctcannnnnnnnnnnnnnnnnnnncaagtctggggtgagtgagcatctccccttctctctgcctcctttcttcctgggttccaaaagggaccagagctgctctctcagtgccttgaatgtgtgctggggaatgacagagcagtattactctctccccatttctcgtattcttctctgtgagaatgggtatcatctagcaacctgtgctggccgcaaagttgctacacagctaaggatgaccttgaacctctgctcctcctacccctacttcagcagtgctgaaattacaggtaaatgccactgcactcagttcatgcaatgccggggatcgaacccagtgcttcatgaatgctaggcagtcattctattaattagccatatccccagcccatcgcttcttggactaactctaagaaggagcttgtgaaccctccagcattagtgctcgtgcctgtccttgttgggtctgcagcacctagttttaagaacaagagaatgtccctttagaagggatttctttctttcttcatgagtctcatcgctttgagggttaatctgactactctggctggcctcagcaagaagccagtaaagtcagtttagtcagaagcccctgtggtggtttgaatatacttggcccaggacgtggcactattaggaggtgtggccttgttggaagaagtgtgtcactgtgggggtgagacctaaccaaatgagagccagtcttttcctagcagccttcagatgaagatgtagaactctcagcttcacctgtaatccaagcactttgagagaaaaacaagagtacatggttattcttggctatgaagttcaaggccgtctgggatacatgaggccctggtttaaaataaaacaaaataatataaaaaccaggctggttgtggtggtgcacacctttactgccagcagttgggaagcaaaggccggttgatttcaaagagcagcctgctctacatagagagttctaggccagctaaagctaaacagagagaccatgtctcaaaaacaaaacaaaagggctggtgagatggctcagtgggtaagagtaaccgactgctcttccgaaggtcggaagttcaaatcccagcaaccacatggtggctcacaaccacccgtaatgagatccgatgccctcttctggtgctacagtgtactttacatataataaataaataaataaataaatcttaaaaaaaaaaacaaaagcaaaaagagcatgtctctttaaaccctgctttcaaccagggtgatggcccatgcctgtgattcctgaccagctcgggctacatactgagaaaaagtgcgtgcgtgcgtgcgcacacgcctagtttagaaatgatactcctcccctcatcccatgattactggattgccccatagaaacatctcgattctgtgtacctagcaaatccccattctaggtctatagtgtttgtttaatcctcagctgccaagagttctgcggttgctaccctttagctatcagttcttttgtggccttgtcctcagctaacagagctacttagcccaaggtcgaaaaggactggtccgttctaatataatggatgacccagccaattaacactgtctagagggaatgtttaaggtcacagcagtcctgagtctcttgtggggagtcatgaagatttcatagctccagcacaggctaacttcccctctacctacttctggctcctcctcctcttcctccttctccttcttttcctcttcttcctcttcctcctcctcctcctcctcctcactttttttttttnnnnnnnnnnnnnnnnnnnncctcctcctcctcctcacttttttttttttttttggtttttcgagacagggtttctctgtgtagctctggctgtcctggaactcactctgtagaccaggctggcctcgaactcagaaatccgcctgcctctgcctcccgagtgctgggattaaaggcgtgcgccaccacgccccggcttcctcctcacttttaaagttttattatttttattttgtgtgtgtggacattttgcccaaatgtgtgcctatacactacatgtatatggtgttctcaggagccagaaaaggttgttggatctccataaactggagttatagacagttaaaggcagccatgtaggtactaggaactaaacccagattttctgcaacaacagccagagctttgaccactgagccatctcttcagcctccttccttttctactctcctttccttctccttcttctttctcttcttcattttttatttttcaagacagggtttcgctgtgtagccctggctctcccagactctatctatagatcag

SEQ ID NO: 1577 - DNA, 3146 bp, Mus musculus
ggcgcagcgccgcacgtgtgcgagcccggcggctggtgggataacccgtccctgtgcgtctccacgcggtgcagcctgtgctggtcggcgctggccgccgcctcctgcgagtcaccgccgccgccctcccgcgtcccgagccgagcgtcctcttctccgctcggcccgcgccctcaggctcccggttctcttaaatgttttcttggagccttaaagatggaaatgacaagcacgtccctgaaacgtgggtgccttgttgtggaagataatgacagtgtgaccccacacgacgaaacaaagaaacagaaggtgtccgagggctgtctgaccagcagtcaggatggggtagagaatgacggtctacaccgcagtgagaacgagcctgggcctccagaagctgaaagcaccgtgaaagatgacgagaattccagcgctcaggtgcaagaggaagaggaggaggaggagggaggaagacggcctttcagaagcaggggaagaggaagaagcagagagttttgcagacatgatgaaacatgggctcacagaactgtcattgaggacaccaaagagaagcgaacagtcatccatcaagccattaaatctctcttcccaggactagagacaaagacagaggatagagaggggcggaaatacatcgtagcctaccatgcagctggcaaaaaggctttggcaaatccaagaaaacattcttggccaaaatcccggggaagttactgccattttgttctctacaaagaaaacaaagacaccatggatgccatcaatgttctatccaagtacctgcgggtaaagccaaacatattctcctatatgggaaccaaagacaaaagggcaatcacagtccaggagattgctgttctcaaaataagtgcacaaagacttgcccacctcaataagtgcctgatgaacttgaagctcgggaatttcagctatcagaaaacccctctgaagttaggagcgctccaaggaaaccacttcactgttgttctcaggaatataacaggaactgatgagcaggtgcagcaagccatgcagtctctgagggagaccggcttcattaactactatggcatgcaaaggttcgggaccacagctgttccaacgtaccaggttggaagagcaattctacagaattcctggacagaagtcatggatttaatactgaaaccccgttctggagctgagaagggttacttggtgaaatgcagagaagaatgggccaagaccaaagacccagcctctgctctcaaaaagctgcccgtcaaaaggtgtgtggaagggcagctgctccgaggactttccagatatggaatgaagaatatagtctctgcatttggcataattccaagaaacaatcgcttaatgtacatccacagttatcagagctacgtgtggaacaccatggtgagcagaagaattgaggagtacgggctgaggcctgtgcccggggaccttgttctcaaaggagccacgcccacctacattgaggaagatgacgttgacaactactccatccacgatgtggtgatgcctttgcctgggtttgatgttatctaccccaagcataaaatcagcgaggcctacagggaaatgcttgctgcagacaaccttgatattgacaacatgagacacacgattcgagattactccttatcgggggcctaccgaaggatcatcatcaggcctcagagcgtcagctgggaagttgttgcatatgatgatcctaaaattccacttttcaacacggatgtggacaacctcgaggggaaaccaccaccagtgtttgcttctgaaggcaaatacagggctctgaagatggacttttctcttcctccttctacttacgccaccatggccattcgagaagtgctcaaaatggacaccagcatcaagaaccagacccagctaaatacgagctggctgcgatgaacagtgcatcgctcagagaggggatgcagacctgcttctgacctcctattctggtctttttttaagtgctgactcatgtttggagtttaaaacttttgtagtaaaggatgatttgtattttgtaaagtttttaatcagcttaaatactttgcaatatttgtacacatatacaagtcctgaggatcctaatttcagctcagagatcgaattgggtcagcatatcctgtaggtgcttagattctagtacagcatcagcttcctgcctttaacacagggaagggggacttggtttaaagttgcggttttaggttttgctgcacacctgaagtacaaaccagaatcttagatgtttgtgatgagattacacatggtccgtgtcagagcaaatgcagcagactggaaactagagactgcacacttaacacgcagttcccgtgttggtttcaataataacaaaacatccacgggtttataaacacggcgtggcttttgttgagtgactgtgttagcttcaggtgagcatttatacacatcttagcttgcagtggcttttctggttagtctatcagcatctttcagggcactcttttccttgataggagcctgtagcttttcttgggtacagtctgattttactctgggtgcctcttactttcagaaccttttcactggactcaaaagtaaatagtgtgagttccaggacagccagggctacacagagaaaccctgtctcgaacgaaaaaaacaaacaaacaaaaggtaaatagtgaccatgaaggaaatctgggaaacttagaatggctcctgcagccaggcgtggtggccacgcctttaattccagcccccgggaggcagaggcaggcggatttctgagttcaaggccatcctggtctacagagtgagtttcaggacagagaaaccctgtctcaaaaaaccaaaaaaaaaaaaaaaaaaagaagaagggctcctacttccatctgcagcgctgaccctcagccagcagctgcttaggggtttccatcatggcagtgcagaaaaccctcctctaaaaagatggatatgcctttcagacagtgtgagacatgactctagccagttttattttctgttatttcttaaagcaaatgtaataaatatttttaagaacacatttttttactaattatgtaaataaatcaaataaatattctaaaact

SEQ ID NO: 1578 - protein, 575 aa, Mus musculus
MEMTSTSLKRGCLVVEDNDSVTPHDETKKQKVSEGCLTSSQDGVENDGLHRSENEPGPPEAESTVKDDENSSAQVQEEEEEEEGGRRPFRSRGRGRSREFCRHDETWAHRTVIEDTKEKRTVIHQAIKSLFPGLETKTEDREGRKYIVAYHAAGKKANPRKHSWPKSRGSYCHFVLYKENKDTMDAINVLSKYLRVKPNIFSYMGTKDKRAITVQEIAVLKISAQRLAHLNKCLMNLKLGNFSYQKTPLKLGALQGNHFTVVLRNITGTDEQVQQAMQSLRETGFINYYGMQRFGTTAVPTYQVGRAILQNSWTEVMDLILKPRSGAEKGYLVKCREEWAKTKDPASALKKLPVKRCVEGQLLRGLSRYGMKNIVSAFGIIPRNNRLMYIHSYQSYVWNTMVSRRIEEYGLRPVPGDLVLKGATPTYIEEDDVDNYSIHDVVMPLPGFDVIYPKHKISEAYREMLAADNLDIDNMRHTIRDYSLSGAYRRIIIRPQSVSWEVVAYDDPKIPLFNTDVDNLEGKPPPVFASEGKYRALKMDFSLPPSTYATMAIREVLKMDTSIKNQTQLNTSWLR

SEQ ID NO: 1579 - DNA, 85285 bp, Homo sapiens
gccgtaggactgagtgccacagcgacttcctctcgatgtctcactggtttcttcctctcagcccagagaggccctgcccgtgcagccgccggccgtgctctgttcctccccctcctgaccggaggtcggaacggccactcaggaagcgggcaccctcccctatggagctccagagaagggattcgctcactccaccgcggtaaaagtcccctccactttattgaagctcttaatgatggaactttaagatatccctctcccaacgccttaaattcaatatgaataatttaaatttatattttaggcaatatccagatgttctgagagtgtggggggcttgttgactaggagcttcggtgcagggttatttggttcgaatatttagttgggggtttccaatgaatgtcagtatctttagatatttcttttaacgttggtcagagtccctagagatgagcttctgatttcctgcctagagggtgtagaggtggttataagcgttctgggagctgaatgaagagaacagagcatctaacatgtgtttcgcccaaaaccctgtcttttaccagggaggaggaaagggagctacctagcagcaagggttgtgtagaggacctgtggacttgacagcctcttaaacaaactaacacggaaggagtaccatagagaccataacaaacaagggggggggaaagcaaccctcagaggaaaaagaaaccacacggtgagaagaaaaatcaaatacatgtgcacagagatatataatcgagctacaaattactattgcaagcataaaacaaggatggctgggcgctgtggctcacgcctgtaatcccagcactttgggaggccgaggcaggcagattacgaggtcaggagatcgagaccatcctggctaacatggtgaaaccccgtctctactaaaaatacaaaaaattagccaggcgtggtggtgggcgcctgtagtcccagctactcaggaggctgaggcaggagaatggcgtgaacccgggaggtggagcgtgcagtgagcagagaccgcaccactgcactctagcctggacgacagagcaagactccgtctcatttaaaaaaaaaaaaaaaaacaaggatactattttttaaattacctattatgggaacataatcgtatatatttatagtgtacatgtgtgtttgttttttttttgctcaggctggggtgcaatggcgttatctctgctcgcagcaacctccgcctcccaggttcaagcgattcgcctgcctcagcctcccaagtagctgggattacaggcatgcaccaccacgcccgtctaattttgtatttttagtagagacgatgtttctccatgttagtcaggctggtctcgaactcccggcctcgggtgaactgcccgccttggcgtaccaaagtgctgggattacaggtgtgagccactgcgcccggcctttttttctggggcggggcgggggacgggtaaagaaattttaatgaggattcaaggtttgtagggaagacacagaggaccggcgctcagccccagcctcctcacgtgtacatggctccatggaggttctccagtcggttctgctgctgctgctgttttcgagccttatctcgtctgtgttcctcataagtgtagtcatcagtgggcagctcatggcggcacaagggacaggaatttgtcttgcttagccagggcagaatgcaactggaatgaaaaaggtgttgggaagcatctcaatggcagtctcctcctcagattccaaaagatacacggggcacttgagctcagccttgagagcctctgatgactgtcctggagaggttctcaaccacaatcttggcagccggtggaggcaggtggtggtcccaatctactaccaaccccaagtcttcaaagtccatcctattcaaaagtgaccttacgagctccagcaccatgttggttcgagtctcctgcttgagggtccaacggctcacagtcgtgttcatcgatataggacgccatggctgcccagccgtctgacatgtgatgttttgatacaggtatacaatgtgtaactatcaaatccgagtaactggggtattgatcatcttgagaatttatcatttctttgtgttaggaacagtccaattccactcttttagttattttaaaatatgcaataaattattaactgtagtcaccctgttttattgttgttgttgtcgtcatttgttttggttttggtttttttgtttgttttttgagacaagttctccctctgttgcccaggcaggagtgcagtggtgcagccataacccactgtaacctcaaactcctgggctcaagggatccacccacctcagcctcctgagtagctaggactatagactggcaccaccattcctggctaacttttttttgttgagacagtgactcgctatgttgcccaggctgggctctactcctgagctcaagcgattctcctgtcttgacctcccaaagtgctaggattacagccatgagccactgcacctggcccctaactgtatttttggacccattaaccatccccaatttatgccttcctccctgctaccctttcagcctttggtaacaatcattctactctctatctccttgaattcaatttgtttaatgttaagctcccacatatgagagaaaaggatactatttaaaaggagcattggctgggcacggtggctcctgcctgtaatctcagcactttgggaggctgaggcagaacaaattgcctgaggtcaggagttcaagaccagcctggccaacatggtgaaagcctgtctctactaaaagtacaaaaattagccaggcctggtggtgggagcctgtaatcccagctacccaggaggctgaggcaggagaatctcttgaacccagcaggcagaggttgcagcgagccgagattacaccactgcactccagctgggcaacaaagcaaaactctgtctcaaacataaataattaaatagataaataaatgaataataaaaggagcactcacttgtaaatggggagggtaaaaataaataaaataagaaaagcattcagagatgaaaaaatatgacagcagaaattaaaatttcaagagtggaaagataggccaagtgcagtggctcacgcctgtaatcccaacactttgggaggccaaggcacgtggatcgcttgaggccaggagttcgagaccagcctggccaacatggtgaaacctggtctctactaaaaatacaaaatattagctggccattgtggcacgtgcacctatagtccctgctgcttagtaggctgaggaacaagaattgcttgaacccaggaggcttttaatttctgctgtcatattttttgttctctgaatgctctttttattttatttatttatttttatcctccccattttcacaagtgagtgccccttttattatttattatttgtttgtttgtttctttgagacagagtttcgttctgttgcccaggctggagtgcagtggcacgatcttggctcactgcaacctccgcctctggggttcaagtgattcttctgcctcagcctccctagtagccaggattacaggtgcccgccatcatgcccgcctaatttttgtatttttagtagagatggggtttcatcacattggccaggctggtcttgaactcctgacctcaggtgatctgcccacctcagcctcccaaagtgctgggattataggcatgagccactgtgcctggccttttctttgttttgttttgttttttgcttttttttcctagaacatttatcaacatttatcttcccacactttgtttgtttgtttttattttgagacggggtctcactctgtcacccaggccggagtttattggcaagatcttagctcactgcaacctctgcctcccaggttcaagtgattctcctgtctcagcctcccaagtagctgggactacaggtgtgcaccaccacacctggctaatttttgtatttttagtagagatggggtttcaccatgttggccagtctagtctcaaactcctgacctcaagtgatctgcccgcctcagcctcccaaattgctggattacagttgtgagccaccacgcctggccaaaaactggaattctgtacttaattagtgaactatgaatcaaatgtgaggttagaataaaaatgtggggttttttttaacactcttgtagtcaagaataaaaatagacattaaagatctcaaaaaatttagcttttgttttatttatttatttatttatttatttatttatttatttatttgagacagagtctcactctgtcacccagactggagtgcaatggcacgatcttggctcactgcaacctctgcctcccaggttcaagcaattctcccgcctcagcctcccgagtagttgggattacaggcgcccaccaccatgccaagctagtttttgtatttttagtagagacagggttttgccatgctcaggctggtctcgaactcctgacctcaggtgattcgcctgccttggcctcccaaagtggaatcacgggtgtgagccaccgcgcccagcaagctttcatttatttctcctttctcgggaagctactgaaggttgtactccactaaaataagagagtaaaccaagaataaagatgacataggatataggaaacagaaagattcaatacaggaacagagatgccctgagaacaactgtgcaataggcgtagattggcgtaggccaggaggttccagaagagactgcttcagaaagatgaaaatagaacacctcatctaaacctctggaaaggggagatttacacaatcattgaggggtttgggcttggtctagtgatgaatagtaaactaaaataagataattattaactagaggaaaaacaaaagcagtacagaagagaagtaatcatagtttcttatttgcctaaaatgtgaatgatatttacctagtcataatgaagtaaacataaatccaaaaaaaggacagtataaggaatggaaagtttggtggagaaaggggaaggaaagagagctaaatctttattttccattaagtgaagtcagtaaataatgtctaaaagtgaaaaatcaagaaataacaatacaaacacattacatggagagattaaggtaaatatcaaaaaaattagttaaaagaggtgaaatgggccgggagcggtggctcacacctgtaatcccagcactttgggaggccaaggcgggtggatcacctgaggtccggagttcaagaccagcctggccaacatagcgaaaacccatctctactaaaaatacaaaaattagccaggcatggtagcatgtacccgtagtcccagctaatcaggaggctgaggcaggagaatagcttgaacgtgggaggcggaggttgcagtgagccaagatcatgccattgcactccagcctgggcagcagagcaagtctctgtctcaagaaaaaaaaaaaaagaggtgaaatgactgcttttgagaagatggaaacaggtgagggctgaagtgggaatacagtccctgctgcttcattgcaaaccttacaaagtttctacagaattatttgactctaaattacaacatgtataactctgataacaattaaaaataaaattaaaggagaaaaaataatgccctaaacccaaattttggcttctgaaaaatccactttctgataaaggaaatagggaaataaataatttaagattaagtgtatagttttgacaacagaaatgttggcaatgactgagggaacacagaaaacagtgaactactatctggggcatggagaaaggcatccgaagtggacagcatagtagtcaataataaggatgaaagaagagagaaagtgtgtgtgataggcacctagcaatctgtagtgtgaggtggagttaaaagcaggatactgtacgttatacataatagacgtgttagaatggaattttgaagttgaagacaacattcaactgttacatgtttattagaagaagttgatactaggaagaggttttgaacacttttgtgttattttaattaaaaaaccaataaagagttgcccattttggaaaacagaaaactaaaaatccatgtttcacttgtaccttgacctaggcagttttggctaaaatgcaaaacgagtaaggtttgtctaagaaaccttagaaatggccaaagaaatgtgaaaaatctttcctctaaatctgtttatgaggagttgggctgcactctcagagtttttttttttttttttgggacggagtctcgctgtttcaccaggctggagtgcagtggtgagatgtcagctcactgcaacctccgtctcccaggttcaagcgattctcctgcctcagcctcccaagtagctgggactataggtgagtgccaccacacccagctaatttttgtatttttagtagagatggggtttcaccatgttggccaggatggtctcgatctcttggccttgtgatccgcccgcctcagcctcccaaagtactgggatgacaggtgtgagccactgcacccagcctctcagagattttttttttaagcctttacttttttagagcagttttagtttacagcaaaattgagaggaaggtatagagatttctcatatacctcctgaccccacacgtgcatagcctctccctcaccaaagtggtacatttgttataattgatgaacctacattgacacattatcatccagagtccatagtttacatcactgttagttctgtagatcagcagttcccaatgtttttggcaccaggactagtttcatggaagacattttttcctcagactagggggtaggaatgggtttcaggatgaactgttacacctcagatcatcaggcattagattctcataaggtgcatgcaacctagatccctcacatgtgcagttcacagtagggttctcgctcctatcagaatctaatcccaccactgatctgacaggaggcagagctcaggcgggaatgctgcagtgcagcctggttcccaaaaggccacactgactggtaccagtccgtgacttgggggggctggggacccctgttgtagattttatgggcttggacaaatgtatcatgacatacagccagcattacagtatcatacagaatagtttcacttccctaaaaattctctgtgctccacctattcatccttccctttctcctaactcctggcgaccactaattttattactgtcttatatagttttgccttttttagaatgtcattttgtcatttagttggattcatatagctcgtgtccttttcagattttttttgtttttttttttgttgttgttgttgttgttgttttctagacagtcttactctgtcgctcaggctggagtgcaatagcatgatcccgacgcaccccaacctccacctcccaggttcaagcaattctcccgcctcagcctcccgcgtagctgggattacaggtgtgtgccaccatgcctggctaattttttgtatttttggtagagatggggtttcacggtgttggccaggctggtctcgaactcctgacctcaagtgatccacctgcctcagcctcacaaaatgctgtgattacaggcctgagtcaccatgcctggcccagattggtttctttcacttagtaatatgcgtttaaggctgggcatggtggcttacgcctgtaatcccagcacttcgggaggccgaggtgggcagatcaccttatctatttagatctcagaataaataaatacataaaataaaaaatatttatttatgtttcctccatgtcttttcatggcttgctaagatcatttctttttggcaccaaataatattccattgtttggatacagcacagtttattcagctactgaaggacatcttggtctttttttttttgagacggagtctcactctgtcccccaggttggggtgcagtggcatgatcttggctcaccacaacctctgcctcctgggttcaagcaattttctgcctccgcctcctgagtagctgggattacaggcgcccaccatcacgcctggctaatttttgtatttttagtagagatgggggtttcaccatcttggccaggctggtcttgaactcctgacatcgtgatctgcccacctcgggctcccaaagtgctggaattacaggcgtgagctaccatacccggcccgtccttaagttttggcaattatgaataatgcagctataaacatacttgtgcaggtttttgtgtgaacatagttttcaactcctttaggtaaatatcaaggagtgtaattgctgaattgtatggtaataatatatttctttttttttttttgagacagagtttccatcttgttgcccaagctagagtgcaatggtgcgatctcagctcactgcaacctccgcctcctgagttcaagcgattctcctgcctcagcctcccaagtagctgggattacaggcgcgtgccaccacgtctgggtaattttttgtatttttagtagagacggggtttcaccatgttggccaggctggtctcaaactcctgacctcatgatccgcccacctcggcctcccaaagtgctgggattacaggcgtgagccactgcgcccggccggtaatagtatatttcattgtgtaaaaaacaaaacaaaaaaacaaattgggcagggcatggtggctcatgcctataatcccagtactttgggaggcctaggcaggcaaatcacttgaggtcaggagttcaaggccaacaggcaaaaaccccgtcaaaaaaattagtctggcatgatgtcaagcactcgtaggcccagctactcgggaggctgatgcaggagaatcgcttgaaccctgcaacagagtgagactctctctcaaacaaaataaaacaaaacggaaaaactattagaggctgggagcggtggctcacgcctgtaatctcaacacagaggcggaggcgggcggatcacgaagtcaagagttcgagaccagcctggccaacatagtgaaaccccgtactctactaaaaatacaaaaaataagccgggcatggtggcgtgcgccagtaatcccagctactcgggaggctgaggcaggagaatcgcttgaacccgggtggcggaggttgcggtgagcagcgatcgcgccattgcactccagcctgggcgacagagcaagactccgtctcaaaaaacaaacaaacaaacaaaaagcaaaaaaactattagagcctgggcaacatagtgaaatcttgtctctaccccccacccccaaaaaaattagcctgggtgcggtgggatgcacctgtagtcccagctacttgggatactgaagtgggaggattgcttgagcctgggaggtcgaggctgcagtgaactgtgttcacgccaccgcactccagcctgtgcgacagagcgagactctgtcaaaaccaaaccaaaccaaaacaaaaaaaacctatgatccggtttcttgaagcagatcctatggcaagccatcaagccagagcggtaagaagtaggaagatggtgcttttagatccactacattcccaggatcaaatgtagaacaatatttagtccctaaagtgattctctttccattattgtcaactgcgtggtcggtgcaacgtgaaagggccacaactatgtgaaggaaacacttagaatataacaccaaaggaggcaatcgctgccttagacttcctaaagatctaaagaactcttagatgcttggtgaaatcgctctctgccgctggtgcgactcaggcgcggtcgcgaggaaggtccagggtgaacgcgcgtaggctgggagtccgcgttggggcgctccctggcttgcaggccgctccgagtgggtgggccgggggcggggccggcggcagggagcggactccgcccccggggcgggtccagtcgggccgcggcgcgtcgctgcgccgcacgtgtgcgagcccggccgccggtgagtcggctggagcgcatctggtcctccgcgcggaaagcgctgcttttgcctggccgccctagccgctggctcatccaagtggccttcgccgctctcttgcgtcccaaccagagcgctggccacctcgccgcccagctcacgccgcgcccgcgctcccaggctccgggtaagtgcgcggcctccccgcggccgccggggctcctcggcctggccctggccccagccccagccccagggccccgccccaagaggcagtgcggactgggaaggcggactgggaaggcggccccgcagtggtcagagcccgcggcgcctccattatggatcgtgccagcgggagcacggttggaacccagtgggtcctgcgcttcggcggtgcaggcgccgctctccgctccccgctccccgctccgctctgcccggccagtcgtccggaggcgccgcgcccgagcgctcccctcctccccgcgcggcgctgtcccccgggggcccccttcccactcctccctttctttgccccggacgctccctaaactcttgtccctccgtcagaggaacactggccctgaagcccttcacggtgccactgcttcgccgcgcctgccttctgtgggtccagcccacgtgttccacccctgtgtcctgcgtcgccgctcactgggagcctactaggcgccacgcgggctctggggactgcttgctttgtatgcatttcccagagtaggagtggacgggctgcagactcagagtgctttctccagccctcaagctgggtgaatgcttaacgagtggatggaggtgctgctgtgcaagctgaaattcgagtcctcctcgtcagccctgcgcagaggtgtttagaagcacaccttcgttgcctgccgagtagggttggcaaagagtttagtttttaaaatatttggtcccgtcagactactttttttttccattccaaaaataaagggttactaaggttccctcccccccatccccaagcctctaatcatctatgaaatgactatgccccattggcctgggggagcctcgactattgagggatctgtcgaaaatcagactgtacaacactattgaaaaggggttggttaggcaattgttaggttcaaacattaggaaagtagccaacagtacgtacttaacaactccttgtgaacatgtttttggtttttttatttttatttttttaatttttttgagacagaattttgctcttgttgcccaggctggagtgcagttgcgtgatcatcgctcactgcagccttgaactcctgggctcaagcaatcctctcacctcagcctcccaagtagctgggactataggcatgtgccaccacacagggtctcgctgtgttgcccagcctggcctcaaactcctgaccttaagcaatcctcctgctttgacctcccaaagtgctggaattacaggcttgagcaaccacactcggccttgaacatatctttgttttttgatttattttttttagacggagtctcactccatcacccaggctggagtgcaatggcacgatcttggctcactgcaacctcagcctcctgggttcaagcgattctcctgcctcagcctccggagtagctgggattacatgtgcacgccaccatgcccagctaatttttgtatttttatttatttatttatttatttatttattttgagacagtctcgctctgtcgcccacatgtattgcagaggcagcacctccatccactcgttaagcattcacccagcttgagggctggagatgtattgcagtggcgcgatctcggctcactgcaggctccgcctcccgggttcacgccattctcctgcctcagcctcccgagtagctgggactacaggcgcccgccaccacgcccggctaattttttatatttttagtagaggcggggtttcactgtgttagccaggatggtctcgatttcctgacctcatgatctgcccgcctctgcctcccaaagtgctgggattacaggcgtgagccaccgcgccccgcctaatttttgtatttttagtagagacggggtttcaccatgttggccaggctggtcttgaacttcagacttcaggtgatccacccgcctcagccttccgaagtgctgggattacaggcgtgtgccatcacacccggccttgaacgtgtcttttgatagaggcaggggcatgcatgtactgtattaatgaagcagcgtttttccttacctaggagagagagagaacaatccagctggtcatactgtcgactaagtttgctccggtttcaggtcctttacacgtgctgttcgggctgcctggagctctcctcacacacatcttttcctgtctggttcttccttgtctttgctcagaagtctcctccttagacgaggcatcactgaagaacacccctcttactctcagccccttaccctgttttaattctttggagctcgcatgtcctgagatttattttgttctcagatatattctcaaatacattgtaagctacatgaggacaggaaatggtattacccttttcttccagtacctacaacaatgccagacacataggacacttgctcagtaaatatttgcagaatgaatgaccctcatagacttaatgattttgcatattagaatgcagtgtgtctgccgggcctggtgacatcatgcctgtaatcccagcactctgggaggccgaggcaggcagctcgtttgaggtcaggtcagtagtttgagaccatcctggccaacatggcgaaaccccctctctactaaaaatacaaaaattagctggatgtggtaattttagcccatgcctgtaatcccagctactcgggaggctgaggtaggagaatcgccggaacgctggaagtggagattgcggtgagccgagactgcaccactgcactccagcctgggcaacagaggaaaactccatctccaaaaaaaaaaaaattagtgtgttctctgtgctctggccctaaagaaaatgctcactattgtgagagctatagagattactgataatttgcaggggatggaggaaagatgtatttacaaagtgaaagttgtggatagttttgaaatataatatgatagaattaagactaatggctgtttttgtaggctgggcgcggtggctcaggcctgtaatcccagccctttgggagaccgaggcgggcgaatcatgaggtcaggagttcgagacaatcttggataacacggtgaaagcccatctctattaaaaatacaaaaaattagcctggtgttgtggcgggcgcctgtaatcccagctactcaggaggctgaggcaggagaatctcgtgtacccgggaggcagaggttgcagtgagccgagattgcgccactgcactccagcctgggcaatagagtgagactccgtctcaaaaaatatacaaaataaaataaaaaataattcaaaaaaagactaatggctgtttttctgatgtttattttggaggaattaattaataagggactgtttggcctgggcggtggtgcacacctgtaatcccagttgaggcagggcagatcacttgagctcaggagtttgagactagtgggcaacatggcaaaaccctgtctctacaaaaaatacaaaaattaactgggcatggtggcacatgcctgtagtcccagttactcgggtggctgaagtgggaggatcgcttgagctgggaggtcgaggctgcattgaactgagatcacgccactgcactccagcctgggtgacagagtgagacactgtctcaaaaaataaataaataaacaaacaagagactgttgttagtgttatattaaaattttgaaaatgctaaacttaatttttgttataggtgtaaaggattttattttttttttgagacagggtctttctgtcacccaggctgaagtgtagtggcaccatcacggcttactgcagcctcaacgtcctgggcgcagtggatcttcccacctcagcctcacaagtagctgggactacaggtgcatgccaccttgcccggcttatttttatttattttttgagacagagtctccctctgtcacccaggctggagtgcagtggcgcaatctcggctcactgcgacttctgtctccccagttcaagcgattctcctgtctcagcctcctgagtagctgggattacagggccacaccaccatgcatggctaatttttggatttttagtagaaatggggtttcgccatgctggccaggctgatttcgaacttttgaccttgtgatctgcccacctcggactccgaaagtgctgggattacaggcatgagacaccacacccagctgcctggctaattttttaattttttgcagagacatggtcccactatgttgtccatgctggtctcaaactcctggtctcaagccatctacctgcctgcattttttcagagatgaagtctccctctgttgcccagactggagtgcagtggtgtgatcataacttactgcagccttaaactggtctcacacaatcctcctgcctcagccgccctgttagctgggactacatgcacacatgcccagctaagagtacttcttaaagcttagttggtgaatctagtattttaatgaaaagggttttaaaatactgttaaaattataatatttctattctcagttgtctcatttggagtgcagaggaaacaaaaaacattattttagcattccctccaaagaaatgtgaaggattggccaggcgtggtggctcatgcctgtgatcccagcactttgggaggccgaggcaggcagatcacctgaggtcaggagttcaagaccagcctggccaacatggtgaaaacccgtctctactaaaaatacaaaaattagccaggcgtgttggcgcatgcctgtatgtactctcagctacttgggaggctgaggcgggaggatcacttgaacccaggaggtggaggttgcagtgagcagagatcacaccactgtactccagcctgggtaacagggtaagactccatcgccaaaaaaagaaatgtgaaggattttaagttttggggaaagtatcagaggagttcattctcttcctggtttaacatcaggcttctggtctatggggttttacttgacaattaagataccatcattactatcatggatagtgtatttgtgcagcatgttttcttaaaattttttcttttaaatatgtcaaaaaatgcataaaactgccctctccccccttttcacatctagtaactttatatcttcattcaagatagaatgcttgggctttcctgactgcaaaactgatttccttgggcctctcaccttggggtagtcaggcttgttttctctttgcaatttaattctctcaggcctcttctatgttcataagatcacctctctctcctctccccaaccctcaatttaaaaattatattccagtccgggcgcactggctcacgcctgtaatcccaggaactttgggaggtcgaggtggatggatcacctgagatcaggagttcgagaccagcctgaccaacatggtgaaactccgtctctactaaaaacacaaaaattagctgggcgtggtagcgggcgtctgtaattccagctactcaggaagctgaggcaggagaatcacttgaacccgggaggtggaggttgctgtgagccgagatcagccaagatcacgccattgcactccagcctgggcaacaagagcaaaactccgtctcaaaaaaaaaaaaattccatttcagcttccctttcacgtagttcctgcttgcgaaaatgacactagtttgagttttgcctttcctagtccagagctctgaacagttcttctagtaaatatgctctccgcttttaggcctataggacagaacttagaaaaatatatattaagtgatttaaaaatcattggtactatatatactttaataattaatttgggccgggtgcggtggctcatgcctgtaatcccagcactttgggaggccaatgtgggtggatcacttgaggccaggagtttcagaccagcctggccaacctggtaaaacctggtatctactaaaaatactaaaattaggccaggcgtggtggctcacgcctgtaatcccagcactttacaagtttgaggtgggcggatcaccaggtcaggagtttgagaccagcctgaccaacatggtgaaaccccgtctctagtaaaaatacaaaaaattagctgggcttggtggcacgcgcctgtaatcccagctactcaggaggctgaggcaggagaatcgtttgaacccaggaagcagaggttgcagtgagccaagaacatgccactgcactccagcctgggcaacagagtgagactctgtctcaaaataaataaataaataaataaataaataaataaaataaaataaaatacaaaacttagtcgggcccagctactcaggaggctgaggcgtgagaattgcttgaactcaggagttggaggttgcagtgagccgagattgtgccactgcactccagcctgggtgacagcaagactctgtgtcaaaaaaaaattaatttgtctatgatagggccattgacttaaacaatgaaaaatgtaatttcatttgaaatttaaaagtgagtttagtttattcttgtcttttcagttagatatatcaagaaaaagagatcagacaaatgtccacaaatatcaagaaaaagactggcaacctaaaggcctgttgtcaacctaaaataatcaaaaacgtcagaatctagtacaaagagaaattattcaagtgcaaagtttgaggatgtcccacctggaaacaccagttctaaaaaaatggagtcaaagttctgaagtagggaagtttaggttttatataggcagagacaggagtttttagcaggattacaacatttttcgtacagggttttcacatagttacagcaatttgattggttataggcagtgtttctttttggggagagtacattggggaaggtgtaatagttatgggttttctgtcatacggtttaagcataagcaggacaccaaagggaaagttcctctctaacaagggtcattaattaagaatttttagtcattgtaggccaggcgcggtggctcacgcctgtaatcccagcactttgggaggccaaggcgggcagatcacgaggtcaggagatcgagaccatcctggctgacacagtgtaacccagtctcaactaaaaatacaaaaaattagctaggcgtggtggcgggcgcctgtagtcccagctactcgggaggaggctgaggcaggagaatggcgtgagcccaggaggcggagtttgcagtgagccgagattgcgccactgctctccagcctggggcacaaagcgagactccgtctcaaaaaaaaaaaaatgagagagaatttttagttattatatggaacaggaaaaatgaaagtaagctaatctgtaatctgaaaaacaaattgtaaccatatgtgactcagatcatagtcacatctctctcaaggcttaaaaagtgttttggggattccaacagcttttagattctgttttcttttcttttcttttcttttcttttttttgagatggagtctcgctctgtcacccaggctggagtacagtggcgcgatctcggctcactgcaagctcggcctcccgggttcacgccattctcctgcctcagcctcctgagtagctgggactacaggcgcccgtcaccacgcccagctaattgtttgtatttttagtagagatggggtttcactgtgttggacaggatggtctcggtctcttgaccttgtgatccacctgccttggcctcccaaagtgctgggattacaggcatgagccactgtgcccagccagctttttttctttttttaaactcctccagacataacaacaatacagttcagctatgtaaatcatccataataactatttttttttttttttgagacggagtcttgctctgtcacccaggctggagtgcagtggcacaatctcggctcaccgcaagctccgcctcctgggttcacgccattctcctgcctcagcctcccgagtagctgggactacaggcacctgccaccacacccggctaattttttgtattttttagtagagacggggtttcaccatgttagccaggttggtctcgatctcctgacttcgtgatccggcctgccttggcgatccacctgccttggcctcccaaagtgctgggattacaggcgtgagccaccgcgcccagcccatcaataataactattaaggactaacagttgaataagaggagctattacagacctttggccaagtcatcatattttacttttacagagaaagaaacagattcgagaggttaagtcacccacttagtaaatggcaaaacctagatctgtctccaagattgttgagagggggaggcctgatgttttttctgcataaggagaggaggtgaatattttgctgactgtgaagtccctgtgccaagctgtgtgaatggccgttattggccactctttcttccttactgagagttctggcctctggaagggcatcaggatctcctggtagagctgtgatgccagctgggaagcttgtatggtcattggggaggcattgcaggtttttggtaagggcatgtgtgacacaatgtgatgagtgcccgcagatcgtctccactgggatgtctccccaggaacctgcaacaccacaggactatgggtgggctcatcttcttccaacacctgctcttctttctgggaccctcatatcaggaggaccaccactgtcctctcagttccccagggatggaaacttgagtcatcctgaagtatttcccctttcctcccacatttgtcaccttctcctgtccctgctactacttcctaaatgttcttgaaagtcgcctttttctgtctcccttgcttcagccttagatcagattatattaatttcttgcctagattacagctgtaccctcttacctggtcttccagcctaaccccagtttctcttcaaaggggtgccacagaatctttctgaattacaaattcagtgctggtctggttttcaggttgtgactccctccttgtagcctcatgtggcctccgcccctcccaagctgtaaccccagactctccttgtatgtctaacccccacagtgggcgatgagttcttttgctcttccagcactctgtgagctcccacgcccccatgcctttgcacatgctgtacctgtgaccccaaatgaccttctcctgcttttccttcctcttccttatgccacaaaatttggcccaggcattgtagtctttggttaggttttgtcttcagtgtgttctcccggtccttgtgtaagccctggtccatttttgtctccttcatttgtacaaaacctctgagggtagttttgttgctgtaaggtgagagtgaaatcgtgtcagcatttcataaaccagcgttctttttttgactacacctgttcaggacaaagagtaaatgcttttttctttgaattagggatacttttatgtaactacagttgtggtctacttctattccagtttcagtttcttccattttctgtatttaatttcttgtctttcaaaggatttttttttttttttttttttttttttttgagacagaatctctctctgtcacccaggctggagtgcagtggtgcagtcccgactcactgcaacgtccgcctcccaggttcaagcgattctcctacctcagccttctgagtagctgggattacaggcgcccgccaccatgcctggataattttttgtatttttagtagagatggggttttaccatgttggtcaggctggtctcgaactcctgaccttgtgatccacccgcctcagcctcccaaagtgttgggattacaggcgtgagccactgcaccaggccgccagaaattgttttaactgacatttttttcaatcccttctctcctattttttgtagctgtcataatacttttttgttttgttttgttcgttttgttttgtttgagatggagactcgctctgttgcctaggctggagcgcagtggcgtcatcttgactcagtgcaacctctacctcctgggttcaaacgattctcctgcctcagcctctcaagcagctgagattacaggtgtgtgccctcacacccagctaatctttgtatttttactagagaggggtttcaccatgttggccaggctggtctcgaacttctgacctcaggtgatccacccacctcagcctcccaaagtgctgagatttcaggcatgagccatgcgcctggcctgagccacagtacccaaccactttttttttttttttttaaatgaaaatttattcttaaatgtacaacaggctccaagaccatacttcaagtagctataggtggcaaaagatgttatggcagggaatacagatgtttaaacgggaatggggccaggtgcggtggctcacgcctgtaatctcagcactttgggaggccgaggcgggcaaatcatgaggtcaggagtttgagactagcctggccaacatggtgaagccccgtctctactaaaaatacaaaaaataagctgggcatagtggcgggcgtgcctgtaatcccagctacttgggaggctgaggcaggagaatggtgtgaacctgggaggcggagcttgcagtaagccaagatcgtgccactgcactccagcctgggcgacagagcgagactccgtctcaaaaataaataaataaataacatttagttaatcatcattattattttgctgtagatgcttatataggtggctttcttgttaaccatgccttggagaactagcatattcattttcttttcatttgctttatttatggatatgtttactacgttcatcagtatgttaccttcagcatcttgtatgtaattaacatagaaaaagtttttatccttattttaccaagagcatcaaattagaccagacacggtggctcatgcctgaaatcccagcactttgggagcccagtgtgggaagatcacttgaggtcaggagttcgagagcagcctggccaacatggtgaacccctgtctctaccaaaaattacaaaaattagccaggcgtggtggtacacgcctgtgatcccagccacccgggaggctgaggtaggaggatggcttgagcccaggaggtggaggttgcagtgagcctagatcgtgccactgctctcaagcctgggcaacagagtgagaccctgtctcaaaaaaaaaattaaaatttgccattttaaccacgtgtacagttcagtagagttaagtgtattcacattgttaggcaatcactatccagaacttttcatcttgcagaactatataccacctgtatgacacctccccattccttttttttaatgtggtatgacataggtatggctttcatgtcagtaagcgtggttatacaatattttattttatttatttattttttttttggagatagagttttgctcttgttgcccaggctggagtgcaaaggcacaatttcagctcaccacaacctccacctcctggtttcaagtgattctccttcctcagtctcccgagtagctgggattacaggcatgtgccaccatgccctgctaattttgtattttcagtagagacggaatttctccttgttgatcgggctggtctcaaactcccgacctcaggtgatctgcctgcctcagcctcccaaagtattgggattacaggtgtgagccaccgatcccggccacaatattaatcagttttttgaaaggataatacatatacatcaaacaagcttcaaatgattacaaccatgttattgagtgagaacagcaaatttcccacctctgtccccagccaccacttctagaccctctcctagaggtaaccacccttcccagtttcttgtcaatgttgctacatattgttcagtttatgtacccaagtttcattgctgttaatgttttgctaatataaaagcactgtggccaggcagggtggctcacacctatattcccaacactttgggaagccaaagtgagagcattacttgagcccaggagttcaagaccagactgagcaataatagcgagacctagtctttacagaaaaataaaaataaaaaaactagccaggcttggtggcatgctgctgtagtcccagctgctggggaggctgaggcaggaggattgcttgagcccaggagttggagtttgcagtgagctgtgatcatgccactgcacaccagactgggtgaaagagccagaccttgtcactgaaaaaaagaaaaaagtatggagatgaatatccttagagctaaaactttattatttcttaattattttcttaagataaatccctaaaagtagtattactgggtcaaagagcatacatatttttaaggcttgtgatgatgtgcggaagtattatgccggttttctgtcccacaaaaagtgtatgccaacatctggaagaattatttctataaatgatttttaggatcgtatgaacaacattaactatgcctttatctgctgaaaccaacttctttcctttttttttttttttttttttttttttgagatggagtcttgctctggtcccccaggctggagtgcagtggctcgatctctgctcactgcaaactccgcctcccaggttcaagcgattctcctgcctcagcctcctgactagctgggattacaggcgcctaccaccacgcccagctagttttttttttgtatttttagtagagatggggtttcaccatgttggccaggctgatctcgaacccctgaccttgtgatccgcccacctcggcctcccaaagtgctgggattacaggtgtgagccaccgtgcctgaccttttttttttttttttttttttttttaagacaatgtctcactctgtcgcccaggctggagtgcagtggcactatcttaactcactgcaacctctgcctcccgggttcaagcaatgcccctgcctcagcctcccaagagctgggactataggcgcctgccacccacgcctaactaatatttagtagagatgaggtttcaccatgttggccaggctggtcttgaactcctgacctcaagtgatctgcctgccttaacctccctcaaaacgctgggattacaggtgtgagccaccgcgcccggcctgaaaccagcttttatataggtgattgttactttctactctttcctaacaggttttcttaaatgttttcttggagccttaaagatggagatgacagaaatgactggtgtgtcgctgaaacgtggggcactggttgtcgaagataatgacagtggagtcccagttgaagagacaaaaaaacagaagctgtcggaatgcagtctaaccaaaggtcaagatgggctacagaatgactttctgtccatcagtgaagacgtgcctcggcctcctgacactgtcagtactgggaaaggtggaaagaattctgaggctcagttggaagatgaggaagaagaggaggaagatggactttcagaggagtgcgaggaggaggaatcagagagttttgcagacatgatgaagcatggactcactgaggctgacgtaggcatcaccaagtttgtgagttctcatcaagggttctcgggaatcttaaaagaaaggtacatttagtttatgaataaagttattttgattgtattaggtttcttctttagaaagaaattagctttatattcttccacttagctttccatctccaaggcttgtttatactactgatcaaaaggaataggatgaaggaaacctgcctgaataaatagccttggatttttaaattttaattaattaattttttccctttttttgagagagggtctcactctgtcacccaggctggcatgcagtggcatgatcatgcctcaaataaattcattcaccaggcacagtggcttacgcctgttatcccagcactttgggaggccgaggctggcggatcacttgaggtcaggagtttgagaccagcctggccaacatggtgaaagcacatctatactaaaaatacaaaaattagctgggcgtggtgatgggcacctgtaatcccagctactcgggaggctgaggcaggagaatagcttgaacctggggggtggaggttgcagtgagccgagattgcaccactgcattccagcctgggtgacagagcaagactctgtctcaaaaaaataagtaaatgaataaattcatttaaatggtttcagattttctcctgagtttgttttataatcttaaactcttttttcatttgaatgtgccacaactatggtagaagaaggtagtctttggagccaggtggatcccagtgtgaagttcgctacttagtagttacttagcctctctgaacctcagcatccttatttaaaaaatggatcaggccagacacggtggctaacgcctgtgatcccagcactttgggaggccgaggcgggcagatcacttgaggtcaggagtttgagaccagcctgggcaacatggcgaaaccctgtctctactaataatacaaaaattagcctggcgtagtggcacgcgcctgtaatcccagctactcggtaggctgaggcaggagaatcacttgaacccaggaggcggaggttgcagtgagccaagatcaagccactgcactccagcctgggcaacagagcaagactctgtctcaaaaaaaataatagtaataaaataaaatttttaaatggatcatattaccacattggggttgttgaggattttgaataatgcatgtaaaatatttaacataaaggtaagcttcaggctagttcatggtagacttactgggttctgattcaattaaccatatagcatattttgtgatttaatttagtgtgggctgcctgaatcgtcatagggtaatgttaataagcttttgtttttgcatttctctggaagaatattctagaagctaagagggtcttttctttaagttctcatataaaacttgagccaaggtatggctcagcattcattaagaaaccagaaaagaccggatgtggtgattcacgcctgtaatcccagcactttgggaggccaagatgggcagatcacttgaggtcaggagttcaagatcagcctggccaaaatggtgcaaccccgtctctactaaaaatacaaaaattagctgggcgtggtggcacgtgcctgtaatcccagctactcgggaggctgaggcgggagaatcacttggacccaggaggcggaggttgcagtgagtggagatcgagccactgcactccagcctaggcaacagagcaaggctccatctcaaaaaaaaaaaagaaaaaaaaaattaactccatgtgattttgcactgaagattttttaaaattccttgttttgcataatagtaaggcttgctgttgatcaactttatcttaaaattaatagaaaacaggatgttaattatctgaaagttcatgttttctttcatcagatactccgacttcgttgttcatgaaataggaaaagatggacggatcagccatttgaatgacttgtccattccagtggatgaggaggtagaagtagctctttagcaaatgtcaccttctgtataaaaaatagcatttcctagagatttagaaatatagagctttattaaacttgaattctatgtatgattcattgtgagttctcatggttattttaaaggacccttcagaagacatatttacagttttgacagctgaagaaaagcagcgattggaagagctccagctgttcaaaaataaggaaaccagtgttgccattgaggtaactaatgcaaaaatatatgaaaaattatttagggttttagttgctttttgggtggatgttaagtgtttatggaaaaaattacaatggttaacaaagggtgactttttgctctattggatctaaaggatattacactaaaaaatttttttactggggcagataactagtatcccagataaactatagccccccccaaagttacatttttgtttaaaaacatttttatttgggtacagtgttacatgctattccaaagtcctagctactccgaaggctgaagccagaggtttacttgagcccaggaattggagactagcctggacaacatagtgagacatcatctctgaaaaaaaaatttagggaccacaaatgaacagcgacatatgttgtttagaatcccagagtaccaattataccacaatgtccgttgtaacaggaccaccatttgctgtctgtcaggtatgtgacccaggtcagattctggcttcagcagcttcttggcctcagttgggactctgggaaggggaggaaatggggaaaggaagtaggggagcatttatttgctcatcgtgggtcaattctgctattgaagaaaaggagagctcagctactaagtagaatagtaaattttgttgttaaagcttttgttcgccgggcacggtggctcacacctgtaatcccagcactttgggaggccaaggtgggcggatcacttgaggtcaggagttcaagaccagcctggccaacatggcgaaatcccgtctctactaaaaatacaaaaaaattagccaagcgtggtagcgcaggcctgtagtcccagctacttgggaggctgaggcaagagaatctcttgaacctaggagacagaggttgcagcgagcagagatcataccactgcactccagcctgggcggcagagcgagactccatatcaaaaaaaaaaaaaaattatgttaaattaattttgtactacattttaatgagctatggggttttcggttgtctgaaattccccctcccagcactcctagttaataagcgtactacaacttttcagaattcattatctgctccttgtctccctccttacctgagcttcccaaaagcgtgtggtattgcaatgttagaaatcttccattactgaaaaaatctttagacaaaacctttagcaatgccaagaggaaaattcctggcagatttctagagcaatccagaaggatggtccaagtttcctttgcttgtacaatgcagaggtttatcttaggcttataatatgtattttcgtatacatgtggtaaaatttactattgtcttaaaaactgaggttttcctatctactgaaagtctgtacatttaaaaggcataaactatgggcaagcttcctcatttgtaaaatgaagatggactttctgagtttttgaggtctaaacatgtattcatatacacaaactgtcgttctccttgctatcagtaatttcagatctagactcactttttgctatgaagaagtcatttacctgtaatcgtaatgtagtttggtggatttttttcattttttattttgttgaagtatcattaagttgctgggcgcagtggctcacacctgtaatcccagcactttgggaggccgaggtgggtggatcacctaaggtcaggagttcgagaccagcctgaccaacatggagaaaccccatctctactaaaaatacgaaaaattagctgggcgtggtggcgggcacctgtaatcccagctactcaggaggctgaggcgggagaatcacttgaacctgggaggtggaggttgcagtgagccgagatcgtgccattgcactccagcctgggcaacaagagtgaaactgtgtctcaaaaaaaaaaaaaaaagtgtcatcaagtttagccagtagcagttgcagtgtatctcgatgttttcagcttgcaggttacaacccattaatgggtcatgaaatcagtttagtagtggatctcaaccagcatttttaaaaaatggaataaaataagggctgggcacagtggctcaggcatggaattccagtactttgggaagctgaggtgggcagatcgcttgaattcaggagatcgagaccagcctgggcaacatggcgaaacgccatctctacaaaacataaaaaaattagctgggcatggaggcacatgcctgtagtcccagcttcttgagaggctgagataggaggatggcttgagcctgggaggcagaggttgcagtgagccaaggtcgcatcactgcactccagcctgggtgacagagccagaccctatctcaaaaaatatatataataatagcaataacatagaaaatacttgtgcattgcaaatagtatgaatcttgttttgtgaattttttttcgattcttaaaatgaggtatatacacacacatttgtggttgtattgagtaaagagggagggaaaattctcagtatgagatgcactcacacgctgaaaatatcatgtaactagtgagtttatatcatgttgatttttctttactgtaaacccatgtgctagaacctcattataaaataattcagaatataattcaataagaagcagctgtaggttggattgttcaaaggactgagcttctcacataccaaaaggcctagctttgcctgcattttcatgtaggatccctaaggtgtctgtccagcagagaccctgagaaggtgcatctgggttggtggcccatgggtttgacagcctggattttaaatccagctctaccaccttccagctatataaccgcagacacaattcctcacttctaaatagatataatggtgttatgatggagagattacaaagattaaataaaatgatgaccacagtgctttgtacagtgtctggcagatggatgtgctccatcaacaggctcccgggatttgcaatattgggaagctctgaaatatttttgagactgggcacggtggctcacgcctgtaatctcagcactttggaaggccaaggcagatggatcacttgaggccaggagtttgagaccagcctggccaacatggtgaaaccccatctctactaaaaatacaaaaactagccaggcttggtgttgtgagcctgtaatcccagctactcaggaggctgaggcagaagaatcccttgaacccgggaggcagaggttgcagtgagctgagatcactccactgcactccagcttgagcgacagagcgagactgtcaaaaaaataaaaataaaagatttttgaaatcgtatgcaggcacttttgttattttgcgtagttaataaggtgagcagtgtttttactaattcactgtattacttccctatttaatgtttgttaacttggtggtattgctatctgttttttttaataggttatcgaggacaccaaagagaaaagaaccatcatccatcaggctatcaaatctctgtttccaggattagagacaaaaacagaggatagggaggggaagaaatacattgtagcctaccacgcagctgggaaaaaggctttggcaagtaggtgtctgtgagcagcttcctcctgccaggcagccgtgagcggcaggccccgctcctcgttagccttgcccgttcgtgttcaagggctactatagtgctgctcagagaacaatattgatcatgtccctccttcagagagggtgagtattgtcacttcagatgccagcgcagtcctgcagcctgcctggcaaggggcattaggtcttttatgtgagtaaagatttgctgaaattatagtagtgcctgagagagagtcttagggatttgatatgttccctgaagagcagagcatactgagtggcaattcaagaagaaaatagaaggattattgctcattctgtgttcttcatggaggaaagaaagctttcagatgaacaaaaaacgcttgtcacctatcccagtggcacattttttgcaaggcccctatatatatatatatatatttttttttttttttttgagacggagtctcgccctgtcgcccaggctggagtgcagtggcacgatctcggctcactgcaagctccgcctcctgggttcatgccattcttctgcctcagcctcctgagtacctgagactccaggcacctgccaccacgcctggctaattgtttgtatttttagtagagacggggtttcaccttgttagccaggatggtcttgatctcctgacctcgtgatccacccgtctcggcctcccaaagtgctaggattacaggtgtgagccagtgcgcccggccaagacccctgtattgaaagaggcatatttttttgccaggcccctatattgaaagagcttttgctttccaactgtatcttcttcagtcacacataaaaaatatggaatatatagaaagacacccttttatctcagcccatcttttgttgtgtatcattcatttgaaatgggcatagtcccagtgagtcactgatatttatgttctaatgtgttatctacagccacaaaagtttctatttgcatataacctttcaggaaaattaggtaattttttttttcacctaccaaattgacagataaaatttaaatgaaaattacaacaagaaaaagttatttcctcaccctcctctcctactagcggtggcctgtattaatgaacatttattcctagatatatttggggcaaaattctaagaccatataacaaaaaactgtttatttattagggctctgtcagtattcttttaggttaattcaaaagataatactgtgatggatgaagccttaattgcttataaccatgtttctagtgaaatgagagggtataacaaaaaagagaacaggaggaaagcttcgctgtgcctgaggaaataatctagtcaaggcagcaagtctggatagtgctatagagatgagatacctgagcagttccagaggaagaggtggagatcagaggccagttttcagtgaacactgtaaagaaaagccagatgatgtgtcctggaactgcttggggcatgagtcctgaattactttttactccacaaacgaatggtgtggttgctgtgtgtttctttaatgtctgggtcatggtataaaatgtcacctgagcagccttttttcagccaaggttgctcaaagaggagtaagcccagtggaaagtgattggagccactgttggttcagttctcccaaggatagtgtgtagctagtaactactgtagatggagaggagaggtgacttctacaaacagccatgccttggggcacttggtcctaattctctcagggaacccagttgggaaggctgctagggagttattttttgtcaagaaacagcccatgttggtcagcagtgctgcccattatgaaggcgggaagacaaggcaaggtcttactctgcttggtgtggtcatgaggaagcaggttggaaaaagcaaaaactgtttttttgactggtggcttcttggaagtgataatcatttcttaggatgccgggttttgtgagagggtggagggcatttgcaggccaaagcagccattacagcctttctacccatccccttcattaaacacagcgccaggtctctcatgttgtgtttttatccacattttctctgcttatgcgacacccgcctttcttttttttgttgttgttgttacgaagtttccttaagattttacaagtgaagtactgagctgtgcgatgtgaaccacccttccccattttcgtttggacaccttcagtaagaaaggaatttctcactttaaaaagaagcaagaaggaagtcagattggatcaactccctcttgtatagagaaccacacttcttgggcttgtggtgttgtgacatttcttcaaagatggactaaatctctgccatctctcccacctcctcatggaaggccacccctggcacagatgggcacttaggagcctgcattcatttttatagaccccactctccccaagctgagagtggcctaaagtgaacacccctaggaaaggaggaagagctggtatccaaagattattgttcatggccctctaccagcgacagcttgtcctcctgagccatcttgcctagcatttgaatgatttagcttttaaagtatcattacaaagctttgtaatttacagtttttttttagctgtattactaccagatcctgatagaaattgttattatgcattatctagcagattcacaatattcttaacctgaacttttctcagatagaactgtgcatcctaaaacatagatgtggtggattctaaatcattgttcccaaacaccacaaattaccaactatttaaactcagacattattttatgtgttaagccagtctgatagggcacattgctttacctaccaaaatgtatatgtgattttttttaaaaataccatctaaactatcataacattactgataaattaatttatattttgagacagtatacattccaaatgcttctaagaacatagtttttaaagacttatgtaaaaaaaagaaaattctgccatgtgataggtacaggttctctatactttctgaaatgaatggtccccaggagggatccctgtatgtaggaatccatagagactcaggaggaagagctagacaggtacaaagaagctctctgggaaagactggtgttatagaatccacaggaatagggaatcccaataatcagagtgatcaatggactaccattgcttccattcctgtggcaatggaaaatgctacagataggtccagcaagataattactctgaaacctgtctatcagtttagcaacatggaagttgttggtgtcttttcaccggagcattctagtggaatgatgaggttggaaaccagtttacatagtaggttgagatggaaggtagtatatacagactgctttttcaaataacctgcaaagaggagaagaagcgaacataattaaggagaggggaacataggttaggcttttaagatggaagagctgtgagttatttatatatgcaagggagacaatggagggccaggcgcagtggctcacgcctgtaatcccagcactttgagaggccgaggcgggcagatcacttgaggcctggagttccagacctgcctggccaacatggcaaaacctcatctctataaaaagaaaaatatatattttcaaaaaggaaagagacaatggagagagaaggtgaaaattcagggaggcaaataacaaaataaagataatggatggagtaggatccctgaaaaagctgaaggttggtgtgcaggggtgtgatggtgggaatgaccttgaataagaaggaaggaatgttccgcatgctaccccatcttttcatctttctcagctagaaacatttttccttctttattcatggagatgtctgtgctcaataaatcaaacttcctgaacttggtttcccttttatctggtttccatttctgctagactgggactgccttgttaggccctcagaagctggatgcagccttcttcaaataggaaccatattacccagcctgggaattctgtgcatttgcagtataaatcagtgtctcaaaaatgtctgcaagttattttaaattcattcaaattgtaaagctaagtatatgctgcttagcattcttagggggtggagttttataaagtcacacaaattgcccaaaataaatggagactcattgattttctgttatttaaaatattcccagttaatcaatgcatatgcttactattttgtatattgagtgtacttagaaaaagaatgcatacttgtatctgttgtttgcaaaggagataattgtatgcatgctcagtgcttggatttgctaaatagaagatgcatgcttgtgagccaaaactcatactctgttgtcatggtttctcttaaggtatagcagcatttagtttttgagtcttgtggcttcatttatttcttgtcattatacttaattatgaatactccaaaggggtagttgagaaaaatgtagctacacttcatcaacttttatcacaagtgtttttaaagtttttattatggacattttcaaacttgcagtcaaatagaggaaatagtatatggaacctatgtacccataaaccatctttaagattatcaacattctgttgttttattgatttatccttcctccttttttttcttgctggagcattttaaaggaaattctacatagcatggcttttcactcataaatatttcagtatctatttgccagatgaggactgaaaccccaaactattatcacatccaaaaacatcaacaataatttcttcctatcacatacctattgcatatttggttttgctgtatctcaaaaatgtcttttttatatgcagatggcttgttcaaagaatgataaaaacaaggtcagaacattgcactcattgataagcctcttaagtcgtctcttaaatcttttttaatctataaagaacttagctgttttctataatatttaacatttttcaaatttaaaagtctttataattcaatgcaagaaattcatgaaacgcagaaaaagcaaagcaatagttacttgtctcactatcaaaaaaaagataatcacaaatagcattttggtacatgtcctcccatatttaagtaaacagatctctttttggggaagcatttactatccttaaaccttttgcttcatctcatgggtacagacagtgcagctttgagcgtgaactaacatgcccattgtgaagggattgagacaaggaggctgcacctgtagaagagttttctacttgttcactgtttgcctctaaaacattccattgttaatgtctaaatggctgttaacccaccgcataactaccgggtgctgtagaagtcctcagtgtaaacttaaccatgcgatcatttgcatgttcacctctaaagcactttaatattataaattaaacattgctcttttgtgctctttatgctgtgcatttggacagaggtcagaactgcagcaggtaagagcatttggcatttcatgtagataaagtgaaatgccaaagattttgtcacaagtgctaagtatagacaactttgcttaactgatagtgagctggaaggaaaaccgaaaatgatattcctgctcaacagttttctgaagaacttgtgaggaattcacaccaaggactaaagaaatactttaatacttttctgtccaagacagaaaaaactcacatatttatcaagaaggaagggtgattcactaagcatacatgctatggcagttttctgaaatggtttatggagtcttttgttcttttcattgtaacttatcactaacttaccaaacagtgcttttgccttgacaaagccaggtatccaagtaccagcttcggtaccagcagtatcttaagcctctgaagataagggattcatgagttcatgaaaaaggattatttttaaaagaagaggactctttctaggaattgttgtatgaaacattttttcagtttttctttcatggagttacagtaatcaaatgaactagatgtgttgtttaagtaacaactgcagctctgtgccacacaggactcatgaatgttattgtacagcgtctataaagtgcagtttaggcttacatatttttcccaaagtacttaaaaaaaaacattttgagcagcttaaatctaaagcatatatatgtatgtctctccctctctctctctctctctctctctctctctctatatatatatatatatatatatatgtgtgtgtgtagatatgcatacttttttttttttttgagacggagtctcgctcttgttgcccaggctggaatgcaatggcacgatcttggctcggtaacctccacctcctgggttcaagcaattctcttgcctcagcctcccaagtagctggaattacaggcactcgccacaatgcccagctaatttttgtatttttagtagagacggggtttcaccatgttggccaggcttgtctcaaactcctgacctcaggtgatccgcccatctcagcctcccaaagtgctgggattacagtgcatgggattacactcggcctaaatcttacattgtttaacacaggattgaacaactgaagtaacactagctgctcagaagttaacatttaacctggcttaatttttttatgttcttttttttaattaaaaatgtttttcttttatttattttttgagacagggtcttgctctgtcacccatgctggagtgcagtagcatgatctcggttcactacaacctccaccctacatgttcatgtgatcctcccacctcagccatctgagtagttgggaccacaggcgtgtaccaccatgcctggctatttttagtggagacgggtcttgccatgttgcccaggccagtcttgaactcctgagctcaagccatcttgcccgccttggcctcccaaagtcctgagattacaggtgtgagccaccgtgcccagccacattttagctttttatttttaatatggatagataatgttaagtgtccaattacaggaaatgtaatacctctagtccacacagctataaccacttaacctgtatttctttatcagactagaactgattttccactcaaaggttctatagcgaaaaatgagctcttacatctataacttttattatggtatatataatgttaattcttttgctttcaagatccaagaaaacattcttggccaaaatctaggggaagttactgccacttcgtactatataaggaaaacaaagacaccatggatgctattaatgtactctccaaatacttaaggtgagttactgttgttatgcctatacaaaatcaaagcaacagaaacgtatattcctttttccatgctaatggaaaaaggagcaggaggagcacagattacagatagtaaatgctcctcccaatgatagttttctttctttctttctttctttttttttttttttttttagacagtctcactctgtcactcaggctggagtgaatgatggtatgatcaggctcactgcagccttgacttcctgggctcaggcattcctcctaccttagcctcctgagtagctgggattacaggcgtatgccacaatgccaggctaattttattaggttttagagacagagtctcactatattgcccaggctggtctcgaactcctgtgctcaagcagtcctcacacttcagcctcccaaagtactgggattaagaattgccgatcggcctggcgcagtggctcacacctgtaattccagcactttgggaggccgaggaaggcagatcacgaggtcaagagatcgagaccatcttggccaacatggtgaaacccaatctctactaaaaatacaaaaattagctgggcatggtggcatgtgcctgtagtgttagctgctcaggaggctgaggcaggagaattgcttgaacctgggaagcagaggttgcggtaagccgagattgtgccactgcactccagcctggcaacagagcaagactccatctcaaaaaaaaaaaaaaaaaaaaaaaaaatcactgatcatggataggaagtgcattgtttcttccaggcgtgagccactgtgccaggccgtgaggatagttttcttaggcaatggatgaattaatttttttgacccccacatacgtagtgccaataattcaagatgaaaattccataagtaaatgattcgcatgcagctgagagttaacaatctggttgaaaataaaaattaactttctcttttgaaagcctatacttatcctttgacgtggttgcagaggttggttttgccagactgggagctctcaattcctggagactgactaaacctgagaccggtctgattttctaacaggaatgtaaatatagcagagactggatctctggggatcggcaaggtgccaaagcttttcttaaaaatggaagtggctacacaccacagcaagtctgtatgctgtggaaatttggtttccaatatatatttaactcattttaaatatggaaacagtgtattaatttgctaggacttccataacaaaataccacagatcaggtggcttaacagaaattacttttcatatgcttctagaggctaacagtcccaagctcaaggtgtcggcaagtttgttttttttccggaagcctctctccttggctcgcagatggctgccttctcactgtgtcttcatgtggcattttccctgtgcacgcacacccctggtatctgtgtgtgtccccatttcctcttcttaggaggataccagtcagattggattagtgcccaccctaaatggcctcattttaactgaatcacctctttgaaggccctatctccaaatacagtcacattctgaggtcctggggggtcagagcttcaacatactaattttgggggagacacagttcagcccataatacacagtacccaattaagtaacatttattttgctctatttattaactccctgggagagagtctgtgctactatgcctgtacctgagccagagagaacagacgattcttgacaggaataggtgggtggggagggagttcctccaagatcgggagttgaggattgctcaggatttaagaaatccttcctggctttttccttctcatatggaacggttaagtttataaaatacttcttagttaactaggttacttattatcttcatatcaaaactattcagatcccagttttagcatttcatttggcttttttcattttttaatacaaagcaatagcagcatggaaaattcacacaataactttttaaaaactgaagataaattttcatagtggtacattatatctctagaatgcatttttctttgctttcactgtcttatgtaatgtaatgaattgtagatgatggataggaagtgcattgttgccttttttgttgctggctagccaagtctttgaacaacatcagttatttactaatagccacaaatgtttacactgctaagaaaggaattattgactgggcgcagtggctcacccctgtaatcctagcactttgggaggccgaggcgggtggatcacctgaggtcgagcattcaagaccagcctggccaacatggcgaaaccccatctctattaaaaatacaaaaaatcggccgggcgcggtggctcacgcctgtaatcccagcactttgggaggccgaggcgggcggatcacgaggtcaggagatcgagaccatcccggctaaaaaacggtgaaaccccgtctctactaaaaatacaaaaaattagccgggcgtagtggcgggcgcctgtagtcccagctacttgggaggctgaggcaggagaatggcgtgaacccgggaggcggagcttgcagtgagccgagatcccgccactgcactccagcctgggcgacagagcgagactctgtctcaaaaaaaaaaaaaaaaaaaaaaatacaaaaaatcagccagatgtggtggtgcatgcctgtaatcccagctacttgggaggctgaggcaggagaattgcttgaacccaggaggcagaggttgcagtgagccaagattgtgccgctgcactccagcctgggtgacagagagagactccgtctcaaaaaaaaaagcgaagaattatttggccatcatttaccttttttgtttttttttaaagagagcaggtcttactacgtcacccaggcaggagtgtagtgtgcagtggctgttcacaggcaccatcatagcgcactgtagcctccaactcctgagcgcagacagtcctcctgcctcaggcctccccagtaactgggactgtaggtgcatgccaccacacctggctatcatttacttttctagcttgcatatgaatttatgttgttttagtagatttttttttttttttttttgagacggagtctctgtggcccaggctggagtgcagcagagtggtctcagctcactgcaacctcagcctcctgagttcaagcaattcccctgtctcagccttccaagtagctgggactacagtcacacactaccacgcccagctaatttttgtatttttagtacagatggggtttcaccatattggttaggctggtcttgaactcctgacctcaggtgatccacctgtcttggcctcccaagtgctgggattacagaccatgagccactgcgcccagcctccctggattcatgttaaaataaagtttctcctcattcttctcttactgtgttatgattgtaagtatgtttatattaaaacttaaattatgagaattaggatttccttataatattacagtatgtgacttcagatgatcttgtttctctcttaccagagtcaagccaaatatattctcctacatgggaaccaaagataaaagggctataacagttcaagaaattgctgttctcaagtaagtagagagcacgtaacaggatttatactgtaaatatcctggcactgcttttcagaattctcaaatttactttgggggtttctctctcagctttagatggtgcttctgcctatttaaaaattacttttcattctgtttttttcttcttcttatctatgaaacgtgtattatttgtgtaatttttaaagatttttttggtaaagccaagagaataatgcttctttctctcttttgttcattcattgttaaatatgttatttaaaattacaacatagtgaacatgctgttttgttgtacacccgagagctacagataaaagcaatagtctgtgtttttgaagcaattataattagtggaatagacggacatgtaaatcagaacttctcctgcagtgagataaatactgaaatagagatatactttggatgttaatgtatgcctgtcaacaagcatgggagttgatgtggagggaacacaggaaagctttcatagaaaatgggatgctgagttttaatttagttcaaggcttctcaacctctccactgttgcccttcggggctggataattctttgttgtagggactgtcctgtgcgttgcaggatgttttgcagcatccctagtctctacccactatgtagcagtagcaactccttgcccagttatgatagcaaagaatgtctctaggcattgtcagatattccctgaggccagaattgcccccgattgggaaccactggtctagattctagaaggatgagtagagatttcctggggctgggtaggatttaggattgttttttccaaaccaaaaaagcaggttaagaaaagacgttggaaagcatatttggtacctggcatgtactttagtttttgaggagcatagcgagaaataaggatctaggagttaggcaggatgtagatcctgaagggcctgttaggtcaggttgagggtctttgcctcaaccttaatctaaatggggattggtgtatagaggctggattatggatcgccggtggagcaagacatgcaaaactagagaccagggctattgacgtattctggggagggagaataagggtctgaacccagttagtcacagtgaaggtaaaagagaaaggatgaatttaatagctgtactgtgtcagacacatttaggctgtcttattagtatacctccagaggcaaggaatggtgggagagagaaataacataggggcaaggaaacttctgggggtgatggatgcattgtctttaatatggtaatggtttcatgggcttatacacatgtcaaaacttgtacattttaaatgtgtacagtgtatgtcagtcatactgcaattaaaaataaagtacgctatgtttgctacctctacttaaatacatgtatttattttggtttctcggattttttttttttttttttagtcttgctgtgtcacccaggctagagtgcaatggtgggatcttggcttactgcaacttccacctccctggttcaagtgattctcctgcctcagcctcccaagtagctgggattacaggcatgcaccagtgcacctggctaatttttatattttaagtagagatggagtttcgccatgttggccaggctggtcttgaactcctgacctcaggtgatccacccacctcagcatcccacagtgttgggattacaggcatcagccaccacgcccagcccatatatttattttgaatttcctcatctttttataaagaatttatggtggtatctcctctttaccccataatcccctacaattgggcttctttcccactacttttctgattcccctgaaataatgtagttgttgaaccggttgtatcgtaatgtttattccagttctttttcttccttgaccttgagacagtggcatgatgtcataaaagcagtcatctcaccattgcttttactggtggtgtgtacaaatattgaagcatttgaaagagagcaggagtaaatacatgaagatgatggtgttcctatctggtggcctggtttcattttctcgctgtggcatatagaatgtggagtcatttgctcagagtgaaggggcaggagtgggtaagggagcttgaaagagagtggagatttgaaataacctttgtgggtaatggaccagggactccccagaaactcagaagaatgggggtagggggacaggggtttgaaggctcaggctttctcatcctctgtggatagaggtcacaacagaaggtttttgccttgtttttggtatctaaaatacctagtcacctcctgtgatttctagctggctctgtgaattttgtttctgattaaaaaaaaaaagtcagtttattttgtttctttttcttttctttctttctttttttttttttttttttttgagatggagtttcgctctgttgcccacgctggagtgcagtagtgggatctcacctcactgcaagctccgcctcctgggttcacgccattctcctgcctcagcgtcctgagtagctgggactacaggcgcccgccaccatgcccagctaatttcttgtatttttagtagagatggggtttcaccatgttagccaggatggtctcgatctcctgacctcgtgatccacccgtcttggcctcccaaagtgctgggattacaggcgtgagccactgggctctgcctattttgttttcaacacagaaagaactaggtagaaaatgaaaggcctgccataactgtacttcttccgagatcaccttattcacaacatggtatatattttttgagggactttttttcctttttaaacagcaatacttatgtattcttattttgaacaatagatggtgtaccttatttcctgtaggtatatagcaaaatatgtttgaatgtatggatatatcctaatttaaactattactctatttttgaatgttacattgtttctcgtttcttgctgttataacccagtccatgacagacgtatttgtagctaaatcttggcacacatctgtgataacttcattaagataaacttagcagtgaaattactgacttaaagggaatatgacattttaatgtggtttgtcttttttctttccatctgctggtcaaaacacagagaaattctctctctctttttttttaatagcaaagcctaattatcctgcaaaaaagtggtaccaatttaccacctttattctggttccctagaatcttcctcagcatggtgttatgatggggacagggagtcatttgctaatttgagggtcaaaaaatggcatcttgttattttattttgcgttttctgatgtgaagtcttagaatagttgaagaccaagaatatttcttttttttcttggtcagccagcagatgtcacacttcatcaggacactgctctgtcctcagatttttgctgcctttatcatcttcctgttgacttagtaagaaactgtgttagacacctaaatgttggccctctgaaagcacacagcacttatctcacggatacaggctacacccttagtttgtttaatggatacatggggccaggcagattggcctttcccgtgggaacttgtgaacaggagaaacccactctgccacacaggcatttgaatgactgctggattgatcggtcctggggataagcagcacgtcttttcagcttcatgaaactctaaagccacctagtaattttaacagggtctcaggcaggaacagtctcattcagaatgatttgtttcttttcctgcctgttcctgccagtctcctttctgaacttgggccagtatttccctggctttgttaattaaggttttctgtgcatcatgttgcttaattggttcctgatgtttaaaagcaagatttttatattccctagttactcactgaatttgctgtaaatttacaaccaaagaccttgatctgggatcatcataattaaaactgtgaatagtatcatgaagacattgtcagcttcattccatttctcagggagcacccataccaaccagaactgagtatagttcttgctttttgctgtgccagtggaatttagagatggatgtctatcgtatattcaagaattgatactactattcggccacaaaaaagaatgaaacaaaatactgatatatacttaaaacatggataaaccttaaaaacattccactaagaagtcaggcgcacaaggccagatattgtatgattctgtttatatgatgtgtctgaaataggaaaatctatagaggcagaaagtagattaatggttgccgaggtctgcagggagaggaaacgggagtgactgctgaataggtacagggtttctttttcaggtgatggaaacgttcttgaagtatatagtggtgatggtttcacattgttgtgaatatactaaaaatcactggcatgtacactttataacagttaaaatggtgaattatacatgtgtatatatatatttatttattttattttattttttgatacagggtctcgttctgttatccaggctggagtacaagtggcacaatctcggctcactgcaacctcagcctctgaggttcaagtaatcctcctgccttagcctcccgagtagctgggattacaggtgtgcaccaccatgccctgccaatttttgtatttttagtagacacggggtttcaccaggatggccaggctggtctcgaactcctcatctcaagcaattcagccactttggcctcccaaagtgctgggattacaggcgtgagccaccatgcccagccttgtgaattttatattatgttaactttatctcaacttaaaaaaaaaaaggacagaactatcaggcacttctgtggcaccatcaggaagcagtctccggaacactctctctaggacagctcctgaccctgaattgttctgtcagtttctacagcagtagttcctggctgaagaggagttttgtcccccgttcctcactctgttcatactgatcctccgcttctagattccttgggatacaatccctgggttaattcgtgctcttgggttctaccattgctcccatacatagtccaggaattcaaggttacagtgagctatgattgcaccactgcactccaacctgggtggcagagcaattccttgtctctaaaaaaggaagaaaaagttatataagataagaaaatatacaaaaatcaatatgtacagctgggtgcggtggctcacgcctgtaatcccagcactttgggaggctaaggcgggcagattacttgaggtcaggagttccagaccagccttgccaacatggtgaaaccccgtctctgctaaaattacaaaaattagctgggcttggtggcaggcgtctgtaatcccagctacttgagaggctgggggcagaagaattgcttgaacccaagaggcagaggttgcagtaagcctagatcacactagtgcactccactccagcctgagtgacagagcaacactctgtctcaaaaacaaaacaaaacaaaaaaaaaaaagaaagaaaaataaatatagcacctggataggtgcagtggctcacgccggtaatcccagcactttcggaggccagggtgggcaggcatggtggtgcatgccggtagtcccagcttctcaggaggctaaggctggagactttgtaagcccacgaagcagaggttgcagtaagcttagatcgcaccactgcactccaacctgggcgacagagactctgtctcaaaaacaaaaaagagatatagcacttaaagcaatttcatactggaacatgactaggtagaatagagtaatcctagacccagatacatccaaggatttagtacgtattcaaagtatcatttaagataagtggagaaaataatggttgattcaaaaaataatggttgattcaaaaaatgttggataactgagtaaccatctaaaaaaccatttaagtgtggctcccctacctcatttccctttgctaaataaattccaggtggatcataaatttgaacattaaaatgcaactttaaaaggactctacttaggccgagcaaggtggctcatgcctgtaatcccagcactttgggaggctagggcgggcagatcacctgaggtcaggagttcaagaccagccatgaccaacatggagaaaccctgtctctactaaaaatacaaaattagccgggcatggtgccgcatgcctgtaatcccagctactcgggaggccgaggcaggagaatcggttgaacccgggaagcggaggttgcagtgagccaagatcgcgccattgcgctccagcctgggcaaagagcaaaactccatctcaaaaaacaacgacgacaacaacaacaaaaaacagtactctacttacatttgagattaaaaaaaaaagaatctctgaccaggtgtggtggctgacccctgtaatcccagcactttgtggggctgaggcgggaagatcacttgagtttgagaccagcctggccaacctggtgaaaccccatctctgctaaaaatataaaaattggccaggcatggtggtgtgtgcctgtagccccagctactcaggaagccagggcaggataattccttgatttcaggagccagaggtggcagtgagctgagatcatgccactgcactccagcctgggcgacacagagcaagactccgtcttaaaaaaaaaaaaaaaaaaaaaaatctctgactggtgacatcctaagtatgagttaaatctcagagctttttttttttttgacagccaagctggagtgcagtggcacgatctcagctcactgcaacctctgcctcccgggctcaagcaattctcctgcctcagcccccaagtagctgggattacaggcgtgtgccaccacacccggctaatttttgtatttttagtagagacggggtttcaccatattggccaggctggtctcgaattcctgacctcaggtaatccgcccgcctcggcctcccaaagtgctgggattacaggcatgaagcaccgcgcccggtcccagagctattttttttttttttttaagaaaaaaagattcatgaatttaactaaagtttctccatatagttgtttgttttaattttagagatgggatcttgctgtgttggccaggctggtcttgaactcctgggctcaagctatctgcccatctaggcctcctaaagtactgggattacaggcgtaaaccactgtgcctggcccctacatagtttttatttacagaagaatgccaacaaatatagaaacacagtttcagtcaacacagtaataatcaattcagccaacaatcatgcttgggtacctaaataattgggtaaagactttgggggaacaggatttttacacaatttcaaaagtatttccccactgatgactaattaaaagcaaagacaaagagactcttagagtgtaaaaatctagtaaatactatcctaattaaatgattaaagttattatcattgttggacaaaatcactgccttttgatgtgatgcattgaaaagggccatatcacctcagtaatatttctaccaaagtgtttacctgagtctcagcatgaggaaacaatcagataaatccacattgaaagacgtgtaaaagcgctggcctggattcttctaagggccagatatcatgaaaaacaaggctagacagatcacttagtggaaaccaaacagacatcacagctgcaatgtgtgatcctcaattggatcctggcagcctaaaaaacaaaaagatggccaggtgcactggctcatggctgtaatcccaacactttgggaagctgaggtgggtggatcacttgaggccaggagatcgagaccagcctggccaacatagtgaaactctgtctctactgaaaatacaaaaaaacatagccaggtgtggtggcatgtacctgtattctcagctactcgggaggctcaggcagaagaatctcttgaacttatctcacgcctgtaatcgcagcactgtgcgaggccaatgtgggtggatcacctgaggtcaggagttcaagaccagcctggccaacatggtgaaacccgtctctactaaaaatataaaaattagctgggcacggtggctcatacctgtaatctcagcactttgggaggccgaggcgggcggatcacctgaggtcaggagttcaagaccagcctggccaacatggtgaaaccccatctgtactaaaactaaaaaaaaattagccgggcatggtggtgtgcgcctgtaagcccagctacttgggaggctgaggcaggagattcacttgagccagggaggcagagtgagctgagatcatgccactgcactccagtctgggcaacagagagagactctgtctcaaaaaaaaaaaaggaaagaaagaaacaacattgggtgttagtggtgacactagagataaaaaggggagaaaggcttttcagtactctgtttctctatatacatttcctattgaagaaggcaaggaatttctaatgaaaatttctatatattgatagcagcatgatacagatttgggtagaattccagctatatataacatgtcttttaaaaaaagaaagggaggaaataaaaagttagatgtcagtggaaatttttttcaggcaatgaaaatatgaatttcttttccttttctcttttttatattttccaagttttctgtaatgagtttacaaaatttttctgattgacaaaaataatgacctttttttaaatgcttgataccattctttctatgggatttgtctctgtccccatcccttttctcacccctctccccacaaaaagtagaaaattccacagatattattgttctgttactcatcagcatgtaaataacaagaggctttaagtatataaaatatggccaggagtatgcaatttgaacaggagcacgtaccattacactgaaggaagaatgcagagagaagagaaggacacgcccacctcacctgctgcagtgccttttcctttcagggggtcataggtgtgctgtatcttgttttctgtactgttccaagcagacaatcagtatctcatgatcctctttctactcttttttgttttgttgcttttttttttttttttaaagaataactgcacaaagacttgcccacctgaataagtgcttgatgaactttaagctagggaatttcagctatcaaaaaaacccactgaaattgggagagcttcaaggaaaccacttcactgttgttctcaggtaaagaactgcaggtgggaatgtagaccagagggtctggccagggcatcttgagtatgttactcacggttggtcataaggtcctggtgagctggtactaacagaacaggagtggcagcaagggagggcagagcagggcctggcagggctgggagagcagatacctctgtgagagcaaatacctctgtaggatttgtgtggacaccttgccccttgaaaacctagtgcagcctttggaaagacaccatctccttcaaatattgtagtaaaagacaccgagccggctgggcgcagtggctcacgcctgtaatcccagcactttgggaggccttggcaggtggatcacaaggtcaggagatcgagaccatcctggctaatacggtgaaaccctgtctctactaaaaatacaaaaaattagccgggcgtggtggcagacacctgtagtcccagctactcaggaggctgaggcaggagaatggcgtgaaccgaggaggcagaacttgcagtgagccgagatcgctccactgcactccagcctaggggacagagtgagactccaactcaaaaaaaaaaaaaagacactgagcctgtgattccacttaaagcgcctagaataggcaaatccatggacatagaaagtaaaatagtggttactggggaaagggtagggtaggggtaatggaaagttactgtttaggggtacagagtttcattttggaaacgggaaaaaatttgggaagtagatagtggtgaggattgtccaacattgtgcatataattaacccatttatgctagtgttccattattggaacactaagcatgtaggaattatttatatcctactgctcaaggtcatcgccaaggtctgattgcaaaaattcaaaaaattgcaacctctgccataaatgggttaataccgccaaattgcacacttaaaaatggctaaaatagtaaatttgacattataaatatcttaccacaacttaaagaaagaaagagcccttgggaggtagagagaaagctgcaggagagtgaacgaaagacttggaagccaggccgtagtcatttatgagctgcatccctgagtatttgactgtaactttttttcctctggataatttgtgtccctgtagaaatataacaggaactgatgaccaagtacagcaagctatgaactctctcaaggagattggatttattaactactatggaatgcaaagatttggaaccacagctgtccctacgtatcaggttggaaggttggtatttaatttcttttatcaaaaatagctttctcataaacaaagcagggtttgttggtggtggtgtttttaattatttctacgttctcccatgtctggggcaaatgaaccacagtttcatgatttttgttttaagttaatgagtgcacagggtaaaaaatcggagttcaaaaggatatgacctgaaaagtgagctttcctaccactcttggttacccatccaggggttctatttttatttttttattttattttatatatttattttttctgagacagagtttcgcccttgttgcccaggctggagtgcaatagcgcaatctcggctcaccgcatcctctgcctcccaggttcaagtgattctcctgcctcagcctcctgagtagctgggtttacaggcatgcgccaccatgactggctaattttgcatttttagtagagatggggtttctccatgttggtcaggctggtctcgaactcccaacctcaggtgatcccccgacctcagcctcccaaactgctgggattacaggcatgagcctccacacccagctattttttttattttttatttttttgagatggaatctttgttgttcaggctgaagtacagtggtgcaatgttggctcactgcaatctccacctcccaggttcaagcaattctcctgcctcggcatcccaagtagctgagattgcaggcttttgccaccacatccagctaactttgttgtatttttagtagtggcgggaatttcaccatgttggccaggctggtcttgaactcctgacctcaaatgatccgcctacctcagcctcccaaagtgttgggattacaagtgtgagccactacgcccagccctatttttatttttattttgtaacaggtaagtcttggctcagtaagtgattcaacagtaatctgttgggtaactcagacccagagtagccagacagagatgtcacattttctgatctgtgttaacacgtttattaaactttgatctgcccttccctcgctcttaattttattttattttttatttttattttttgagatgaagtcttgctgttgcccaggctggagtgcagtggtgccatctccgctcactgcaacctccacctcccaggttcaagtgattctcctgcctcagcctcccacgtaactgggattgcaggcatgcaccacctcacccagctaatttttgtatttttagtagagccgaggttttgtcatgttggccaggctggtctcgaactcatgacctccagtgatctgcccgtcttggcctccctaagtgctgggattacaggcatgagccactgtgcctgggccccttccctcactctttaaagaatgtaataaatgataaaattagtgacatggaatttaagaattgtcatttacttttaaacaattaagaacccctctagggtaacctacagtgggaatcccatcaataaatagttgggttcctaaatctacttctggaatcctgttgcccagcagagactctgttacataaactaattattcgcgtgggagttagaattgtggtagttacaagctggaagttatctaagcgtccatgttcttccttgtctttcagacccttcatgttagcaaacttaggctttgagaggtctgcctgaactcatcaattgcttggctttagtttgggagtagagttttccgggcttccagtccattgtttcagcatctaaactatgaagttgcattcatttttgtgattttaaaagcgcaaaatgataaaaatctatatttcctctgcctctttgaggaggttaaaaagctcaggtgaaaacagacttgagttctgaggcttaaattactcatctgtagaatggagataataataccaattcacagaatggtgaaaatgaagtgagatgatgtttatgctacatctatttttatgcctagaatatagtgattgctaatatgttttcaaccttgctaatggtcagaggacattgataaaatagtaaaaatgctaattgtattatgggacagaataagggagcactgtatcaacctgtaaatttgtaattaatttggcagaaggacagccatggaatcctatacgttgtgtatgccaaagatagtgtaaataaatataagtaattaaaatgaggtcaaatttatcccacaacaaaaattacatagcgtgaccaaaggtcagtacggtcagctcaaaattccaaatcattcattttcacaacataagaatatttcctgctttcaaggaaacgcactgttaacaccatagaatttcctgagggaaaaaacagactttcagtttatattgtataggtggagaaatgacttgtatccaaaatattaaaagctcttacaactcaagaacagaaagacaacgcattctaaaacttagcaaagggtctgaacagacctttctttaaataatgtaatcaaatggccaataagcacacaaaaagatgcttatcactaatctttaggaaatgcaaatcaaaaccacagtgagatgccacttcttacccactaggatggctaaaataaaaaaggcagagaataacaagtgttaggattagagaaattggaacccttatacattcctggtggaaatgtaaaatggtataacgattttggaaaatagtctgacagttcctcaaaaggttataaagttagcctatgacccaggcatttctaggtatatactgaggacaactgaaaatcatatgttcacacaaaagtttatacagatgttcatagcagccaaaagactggaaacaacccaaatgtccacctactgatgaatggataaacaaaatatacaatgtaatatacaataatatacagtggaatattacttagcaataaaaaggaatgaagtactgatacattctgcaacgtgaatgaaccttgaaaacattgctaagtaggcagggcacaggggctcatgcctgtaatcccaacaatttaagaggccaaggcggcaggatcacttgaggccaggagttcaagaccagcctgggcaccatagcaaggccccatctctacaaaataaaatttttaaaaaattagctgagtgtgctgctgcctggctttggtcctagctactcaggaggctgaggcaggaggatcactgaagcccaggagtttgaggatgcagtgaacagtgtaccaccactgcactgtggcctagatgacagagcaagaccctgcctgtgaatgaatgaatgaatcaatttctatgaaatttccaatgtgagcaaatctatagaaaaagagctggaacaggaccaatggggagtgactactaatgggacaggatttttttttggtgggggtgggtaataaaaatgttgtaaaattgtgtaatgctccacagttctttaaaaatactaaaagccattgaattgtacacttacatgggtgaattatatgttatgtgaattattgaataactcagcaaaaactttgaaaaaaagaaagtgagccaggcacagtggctcacgcccgtaatcccagccctttgggaggccgaggtgggtggcggattgcttgaggtcgggagttcaagaccagcctggccaacatagtgaaatcccgcctctactaaaaatacaaaaattatctgagtgtggtggcatgaacacctgtaatcccagctactcgggaggctgaggcaggagaattgctttagcccgggaggcagaggttgaagtgacccaagattgtaccactgcactccagcctgggcgacagagtgaaactgtctcaaaaaaaaaataataaaataaaataaactcaaaatggaccaaagatctaaacataagagctgcacttatgcaaactcttagaagaaaacatggggaaaaattcatgatattggatatgtcagtggtttcttggatatgagaccaaaagcacaggcaacaaacaaaagaaaaaatagataagttggactttatcaaaattaaaaacgtgcatcaaaggatgctatcaacagaatgaaaagataacccacagaataggagaaaatatttcaaatcatacatctgataagagacttaaatctagaatatataaagaacaactcaacaacaaccaaagaaaaaccaattcaaaaatggagaaaggatttcaataaatgtgtttccaaagatagacagactggtgttcaacatcactagtcattagggagatacaaatcgaaaccaccacgaggtaccacttcatatccgttgggaaggctattatcacaaaacaacaaataacaagtgttgataagggtacagagaaattagaaacctgggctttgctggtggggatgtaaaacagtatagccattgtggagaacagtatggtgatttcttaagaaattaattataggccaggcgcagtgactcacgcctgtaatcccagcactttgggaggctgaggtgggtagatcacgaggtcaagagatcgagaccagcctgaccaacatggtgaaaacccgtctctactaaaaatacaaaaattagccgggcgtggtggcacatgcctgtagtcccagctactcaggaggctgaggcaggagaattgcttgaacccgggaagcagaggttgcagtaagctgagatggtagcactacactccagcctggcaacagagcgagactctgtctcaaaaaatatatatatataaattatgttatgaaccagcaattccacttctcagtatatacccaaaagaaatgacagtgggaactcaccagatatttgtacactcatgttcataatagcagcattcacaatagccgaaaggtaggagatacccaggcaacccaagtgtttatccaaacaaaatgtggcccatacatacaatggaatatgtaagcctttcaaaggaggaattttttttttttttttttttttttttgagacggagtcttgctctgtcgcccaggctggagtgcagtggcgccatctcagcccattgcaacctccaccttctgggctcaagtgatttaaaaggagggaaattttgacacgtgctatcacgtgggtaagcattggaaactttatgttacctgacataagccagtaacaaaagaacaaatatggtacgatttctcttatatgaggttcctagagtagtcaaagccatagacagaaagtagaatggtgtcttacagaggttagggggctgggtggatagggatttattatttaatgggtatagagtttcagctggggaagattaaaaagttgtggaggtagacagtgatgatggttgcctgacagtgtaaatgcacttaatgccacagaactgtatacttaaaaatagccaaaaaggtaaatgttattacatgtattttaccacaataaaataaaagaaggtagaagaaggaaagataaagtaagaaaagtacaaagcatctggtcaggcgtggtggctcacacctgtaatgccagcactttgggaagccaaggcaggcagatcaggaggtcaggagatcgagaccatcctagctaacacagtgaaaccccatctctactaaaaaaatacaaaaaaaatggcctggcacggtggctgacgcctgtaatcccagcactccaggaggccaaggggggcagatcacaaggtcaggagatcaaggccatcccagctaacacagtgaaaccccgtctctactaacaatataaaaaattagccaggcgtggtggcgcgcgcctgtagtcccagctacttgggaggctgaggcagaagaatggcgtgaacccgggaggcggagcttgcagtgagccgagatcgtgccactgcactccagcctgggcgacagagcgagactccatctcaaaaaaaaaagtacaaaacatcttaatgtgcagcgtgctagatagtacagcctattgtaaaccaaatctctgtatatttaatatggcattgtatactaaacctttacagtatatggtagcatcttaaaggtgttgaaaagtcctgcagttaagaaactgttcaatatgttatatcaggtgttggcaaaggttttctgtaaaggaacagttagttaatattttaggctttgtgggccattcaatatttgttgcaggtactgagctctggagttacactgcaaaagcagccatggacaatatgcaaagcaatgagcatggctgttttccaataaaactacagaattaggtggacaatcagattgtgcctgcaggctgtaattgatatttaacaaaggtttttttgttttattgtgttttatttttgagacacagtcttgctctgtcgcccaggctggagtgcagtggcaccatctcggctcactgcaacctccgcctcctgggttcaagcagttctcctgcctcagcctcccaagtagctgggactacaggcacgtgccaccacgcccgattattttttttttttttttttttgtatttttagtagagatggggtttcaccatgttagccaggatggtcttgatctcctgactttgtgattcgcgtgcctcagcctcccaaagtgctgagattacaggtgtgagccaccatgcccggcctaacaaaggttttttagtgtaaaaatctatgtgtattatatctgtcagatcagtccctagtaccaactagtactatactctttttgtcagtattggctaaaagattatccaagtaaataatttatcaccccaggactatatttaaggactgatttaacatggcttgttccaggactgtggtggtggccagcaataggaaatctgttgatgtaattacattattggattgaaaatccaggtgatgtcatcgatagataccaaatagcattttagatcatttaatatccagaaatgcccagtattgtgtaacttaaatgtgaaaataaagaaccataattaactggaaaaacagaaaaattaatagaaggggattcctatattcttttgatagggaagggtctttctaaacatgactccaagatgagaaatcttaaaggaaaactttcagatgtaatacacaaaatataatttctgtacagcaatactatagtaaaagttaaaggaagaattacatacacttatagatttgccaacaaaaatatgctctaaagtgttaacagtgcttaatttcttagagattgaataatacataacctttcttatgtaccgttcagttttttgaaagcatatataggccaggcatggtggctcatgcctataatccctgcactttgggaggccaaggcgggctgatcacttgaggctaggagttcaagaccatcctggccaacacggtgaaacctcgtctctactaaaaatacaaaaattggccgggcacagtggtacatgcctgtaatcccagcactttgggaggccgaggcaggcggatcacgtgaggccaagaattcaagaccagtctggccaacatggcacaaccccatctctactaaaaatacaaaaattggccaggcatggtggcgcaagcctgtaatctcagctatttgggagactgaggcacaagaatcgcttggacccggcaggcagaagttgcagtgagctgagattgtgccattgcactccagcctgggcagcagaatgagagtccatctcaaaaaaaaaaaaaaaaaaaaattaggcaggcatgctgactcagcctgtagtcccagctgtgcaggaggatgatgcaggagaattgcttaagcccaagaggcagaggttgcagcgagccaagatcatgccactgcattccagcctagacaacagagggagactgtctcaacaaataaaatttttttaaaaagcatataacctttataatcatcaaatatgtagatattttcattttgacaagaatgataagagtaaatcgtatttattctatttgcctaggcaagaaggtattaacatagataaatcttttgagaagtttcaaacaagttttcacacgtaaagacttaactgcgatttatataaataataccatgtgggccgggcacgggggcttatgcctgtaatcccagcactttgggagaccaaggcgggtgggtcacaaggtcaggagttcgagaccagcctgaccaatatggtgaaaccccatctctactaaaaaaaaaaaaaaaaaaaaaagtagctgggcaaggtggcaggtgcctgtagtcccagctactcaggaggctgagacaggagaatggcgtgaaaccgggaggcagaggttgcagtgagccgagatcgcatcattgcactccagcctgggcaacagagcgaaactccacttcaaaaaaataataataaataaataataccatgtgttactacttaaagcatgactatgtagtatttatactattatcacatttttaaactgaaatgatagtaaatgttacgggtaagcattatgttttccattttattctttttttgaaagttcttttggcacttgaagttcttttacatttcaaatctgtatcatattagattttctgcctacttttaagtttaatgagatgatgtaggaccaggtgtaatggctaatacctgtaatcccaacactttgggaggccaaggtgggaagatcatttgagcccaaaagtttaagaccaatagtgagaccccatctctacaataaattaaaaacttagccaggtatggtggtgtgcgtctgtagtcccagctactgtcaggatggtgggaaagctgaggtgggagaatcactagactagagcctgggagtagagcctgggaggtcaaggcttcggtgtatagttaatatgatttgttgactcttcaaagatttgtgcatataaagttttatctttatgcaaaatttagtaaaataaatgttgtttaattttagagctatactacaaaattcctggacagaagtcatggatttaatattgaaaccccgctctggaggtgagaataaaattcatgttaagaaaataaatagaatgtatggctaggtattcatgaaattgctttgaataaaagcttttgtgcaaattgacgttgttgtttcagtattttatttgtttttacaataaaagtataagtttatttatatttttcaacagttgtatatgtatatttaagatttataatttatatcctattttagcttttttttttttttttgataaggagttttagtcttgtttcccaggctggagtgcaatggcatgatctcagttcactgcaacctctgcctcctgggttcaagtgattctcctgcctcagcctcctgagtagctgggattacaggcttgcagcaccatgcctgggtcattttgtatttttagtagagacagggttttaccacattggccaggctggtctcgaactcctggcctcaaatgattggcctgccttggcctcccaaagtgctgggattacaggcatgagccaccatgctcagccagaatgttgctggctggtctcgagctcctgacctcaggtgatccgcccacctcagcctcccagaatgttaggattacaggcgtgagcaccacgcccagcctctattttagctctttagcttgttcagtgtattaattcataactcaatataaatatattttaaaaatgaatatatatttttcttcactcactactaaatctgagtgtataagaatctaaaacattttacttgtggttattttgttaaaacatagtgtaatggaatataaaaacttggcaaaaacaccttgaggatttgcagtgtgaagaagtcaccaaaaactttccaaagagtatctctaaaatcatcttgaatgaaaaggattaaactactgattgtcaaaataattgtgctcactttgggtaattcatttgcagactataaaaagataaaattatctaattttaaggaaagtaacccgttaaacttgacattacaatggaaaaagagagaaggaagaaagtactagcgtgtttttgtcatgttgaatcagctgttataatgaacagttaaatagcttttacttttgacctgagggtgattgtatgttgacaaagccaaatagttctgtaaactttctacatttcccatctttgcgcttcctcagatgagtggtagctataaacagcacctatatttcaagtagcattttctaattttgtgttctctgtgaagtgtactttaagttatggaagtctgtctattgggtaagtcatttaaccctagctttttccccccgcagctgaaaagggctacttggttaaatgcagagaagaatgggcaaagaccaaagacccaactgctgccctcagaaaactacctgtcaaaaggtgtgtggaagggcagctgcttcgaggactttcaaaatatggaatgaagaatatagtctctgcatttggcatagtgagtgcaatttgtgaagtcaggcaatggctcaaggcgttttaatgctttttaaatttcatcttgaaagattttactaaactttgaaagagcagaaggtaaataaggatcctttggtgatctctgaggtgtttcacctgagtagtctttgttcagaccctgagtggtgatgttgggggtggatgcgggcattacttattgagggcacaagaaaagcgtcaatgtggaaaacataatcttcagtggaaattctgtgtaaattaagtctcttggtatttgagaaatttcgaatctattgtatagtcatttcttgatcattccgttaccagaactgtaaactgccttagtaaaagggttgaacagtaagcagtctatagttgcattttagtctggtttcatcatggtgattcaagagtagcctatgtcagtatttggatatgtataatccaggactccatgcactccagcctgagcaacaaagttaaagttaacaaatgttaaagtttaacccttaagcctaagtcttacttttcctagatgcacaaagaaagcagaattcttgctgcatggaattagttgtcagttcaatcatttaggttctctctttaaccgtggaattatgggagaaaaaagcactgttagcttgaaaattgatgtgtaaattccttaagtttgaagactgtgccattgatgtaaggcaggcttgtccaacctgcagcctgcgggccacatgcagcccaggacagctttgaatgtggccccacacaaatttgtaaacttttcctaaaacattatggccaagcatggtggctcatgcctgtaatcccagcactttgggaggccaaggtgggcagatcacttgaggctaggagttcgagaccaacctggccaatgtggtgaaaccttgtctctactaaaaatacaaaacaggcccgcgcagtggctcacgcctgtaattccaacactttgggaggccaacgcaggtggatctcctgaggtctggagttcaagaccagcctggccagcatggtgaaaccctgtctctactaaaaatacaaaaaatagccaggcgtggtggcagacgcctgtaatcccagctacttgagagactgaggcaggagaatcgcttgaacccaagaggcagaggttgcattcagccgggatggcaccattgcactccagcctgggcaacaaagtgagactccgtctcaaaatgaataaataaaacgattatctggacatggtggtgcgcacctatagcctcagctactcagaaggctgaggtgggagaatcacttgaacctgggaggcggaagttgcagtgagctgagatcgtgtcattgcactccagcctaggtgacagagtgagaccttgtctcaaaaaaataaaaaagaaaaaaatgagagattaaagtagaaggaaaaaagaaaaatgagagattaaaaagaaaaagaaaaaatgagagattaaagtagaagttttggctgggtgcagtggctcaggcctgtaatcccagcactttgggaggctgaggctggtggattgcttgaacctgggagtttgtgaccagcctgggcaacatggcaaaaccctgtttctagaaagaaaattcaaagaactagcctggcatggtggtgcacgcctgtagtcacagctactcaagaggctggggtgggagaatcacctgagcctgagcatttgaggctacagtgagccatgatcatgccactgcactccagcctgggtgacagaatgaaaacctgtctcaaaaataaatacataaaagtaaataaataagtacagtagaagtttcttattactacgattaccactaacaagcaaaatgtcttagaaagtacagcactttttggctgggcgtggtggctcacgcctgtaattccagcactttgggaggccaaggtgggcggatcacctgaggtcaggagtttgagaccagcctggccaacatggtgaaaccctgtctctactaaaaatacaaaaattagacaggtgtggtggtgtacccctgtaatcccagctagtctgtaggctgaggtgggagaattgcttgaacccgggaggtggaggctacaatgagcctagatcgtgccactgcactccagcctgggcaagagagcaagaccccatctcaaaaaaaaaaaaagtacagcactttttatatttagaatatgttttcttgcctatttttttccttccctccagatacccagaaataatcgcttaatgtatattcatagctaccaaagctatgtgtggaataacatggtaagcaagaggatagaagactatggactaaaacctgttccaggggacctcgttctcaaaggaggtaaaaaggcagatgtctttgttactcagctaagctagggttcagttagttgccactagtggctttaaaatccatcctggctattaattaagaaagagagatgtggtgaggcacggtggtacacgcccataatcctgacactttgggtggctaaggtgggtggatcacctgaggtcaggaggtcaagaccagcctggccaatatgaagaaaccctgtttctactgaaaatacaaaaattagctgggtgtggtggtgcatgcctataatcccagctactcaggaggctgaggcagaagaatcgcttgaacccaggaggcagatgttgcagtgagccaagatggtgccactgcactccagcctaggtgacacagtgagatgccatctcaaaaaaaaaaagagatgtctagtaagtttgagatgaagggaccatgcaaacttacattggctagtttgtatctgtatttttaaagaaaaaatgtatatctggtttgagtaagcacctcgatctcgaactccccacctcgggtgatccgcctgccttggcctcccaaagtgctgggattacaagtgtgagccactgtgcccggcctgagtaagcacctctctctgggcctcccttttctcaactcaaataggatttgggctaaatggatggctgaaatcactttcgaaacttcgatctaggtctagcaaataaatacacctctggatgtgtcttgttagccaaccttaaagagtttcttcaagtcactgggcgcagtggctcacacctgtaatcccagcactttgggagccaaggcgggcagatcacgaggtcaggagatggagaccatcctggctaacacggtgaaacgccgtctctactaaaaatacaaaaaattagccgggcgtggtggcaggcgcctgtagtcccagctactcaggaagctgaggcaggagaatggcgtgaacccgggaggcggagcttgcagtgagccgagatcacaccactgcattccagcctgggcgacagtgggagactgtctcaaaaaaaaaaaaaagaagagtttcttcaaactcaaatagaatgggcatttagtatatgctgtgcccaaaatgttcccaagacactcctaatatcccatcttccatggagcccattgtgtgtgccaggccttggcactaagccctgtacctgtgtcttttagtttaaagcctcagtgttactgtgaagtattttctctgttttttcaggtgaggtttagtcacttgcccaaagttccacagctagttaaaaaaaaaaaaaaaaaaaaaaaaaaacagaaaaaactgggattcagagttctatctgattccaaactccatgtgtgtctctggcatactaggctaccatctattagctgaatacatgatctgctcatctgcaggcagaccccataaacccactaaggttctaactctgttcagaaattttaaattatttttcctgatttagcttcttttcctcatgccatgttggtcacatccagtgtattttaatgtcctgggtgccgctgtgtttcatcctcttaagtacattccagtttttttttttaacttttttttttttcccagcaaaatgcatccatttatgatgccactgcaaatacgattttgtagtatggtggcttttcaaagtgttttcttgtgttactttatttaagaaagatagaggaactgattttaaatagtaggcattcaaaaaaatgtggatgcagctgagagataaatgtttttaaattttcattgaaaattttacttcagatttggtgcagtagctcacacccgtaatcccagtactttgggaggccagggcagcagaatcacttgagcccaggagttcaagaccagccagggcaacaaagacccatctctacaaaaaattaaaaaactaaccaggcatagtagcacacacttacagtcccagcttctcgagagggtgaggcaggaggatcacttgagcccaggaggttgaggctgcagtgaaccttaatcacaccactgcactctggccttagtggcagagcaagaccctgtctcaaaaaacaaaaaaagaatttcttttactttttctaagtccttgatttttatttcttgggtagagtagaaaagacagaaggatatatatccaaacttaatttttttttttttttcctttgagacagggtctcactccaagacccaggatggagcacagtagtgcagtcacatctcactgcagcctcaacctgccaggctcaggtgatcctcctgccttagcctcccaagtaggtgggactacaggtgtttgccaccacacccagctaatttttatattttttgtagagatggggtttcgccatgttgtctaggctgctctggaactcctgggctcaagcagtctacccacctcagcatcccagagtgctgggattacaggcgtgagccactgctcctggccccagcttaatttctttttcctttttttctttcttttttattttgagaggagtttcactcttgtcacccaggctggagtgcaatggcttgatctcagctcaccgcaacctccgcctcccgggttcaagcaattctcctgcctcagcctcccgagtagctgggattacaggcatgcgccaccatgcctggctaattttagtatttttagtagagacggggtttctccatgttggtcaggctggtctcgacctcccaaccttgggtgatccacccaccttggcctcccaaagtgctgggattataggcgtgagccaccgcgcctggcataatttaagcttttaagtcactgaacctgtaccaacttgtacttctgacttgcttagatgtatataattttagaagattgagttcataacaatattgcctattttcttaatttattgttcacttgtgaatttacagccacagccacctatattgaggaagatgatgttaataattactctatccatgatgtggtaatgcccttgcctggtttcgatgttatctacccaaagcataaaagtaagttccctgtatggggaaaatagttaaaacaagtttaacataatgaagctactatttcaagcatatataaactttggttatttatgacagtctcccagaaagggatgcattcacatggaaaatttaaattaagaaactctacctctgaatctaaaataaaagttgaaattataaaataaaataaataggtcaggcacggtggctcacgccgataatcaatcccaacattttgggaggctgagatgggtggatcgcttgagctctggaattcgagaccagcctgggcaacctggcaaaaccccgtctctactaaaaatacaaaaattagctgggcctggtagtgcacacctgtggttccagctacttgggaggctgaggtggaaggatatcttgagcccaggaggcagaggttgcagtgtgccaagatcatgccactgcactccagcctcagcgacagagcaagactctgtctcagaaaaaaaaaaaaaaaaaaagggaagagggggatttgttagggaaattggcctgcttgattgtggagttgagaagtcccacgacaggccatctgcaaatgggagaactgggaaagccagcagaatggtttagtccaagtgtgaaggcctgagaaccagggaagccaatgatgtaactctcagttggaggtcaaagacttgagacctggggaaccaccagtataagtcccagagtccataggccagagaacctggagttgacatccagagacaggcgaagaagggcatctggctctgggaaggagagggagagaattcagccttcctctgcctttatgttccatccaggcccccagccgactggaggtgtgtgcccaccttgagggcagatcttccccactctgcccaccaactcacatgccagtcttctctagaaacaccctcaccgacacagctggcacagtccggtcactctaatcaaatgccaaaccacctggatttccctctgagaagaaggctgagctcagtgcctactgaagcagtgaaaataaatcatgttttactagctgttggggtctcccttaccccgtcaagttgacacccaaaatcaactatcataagaaagaaaacattattttcctcttctctcttaaaccttttgggatcaggaactttgccagtaccaattagaacataaactcagcaaagcctttgacaaagccattcatgaaaaccttgtagccaggatggccatttgtagactggatgggtgatatttcaggtttctgggtatgtaacacatgcatacctggtacccgacagtgcttgattgagggatccctgttgtccttagtgtgtggtgagggacctgttctagccaatattttttatgagtaacttgaacaaagaaatttgcttgttatatttgcaaattgtgcaaaatagttagtattaattatatgaaaaatacatatttaagaattgcataatattctattgcagtattaattttaaaaacacaatttcaatgtatttgcatttgtccatccattaatttatcaaatatgtatgacacctcatattcaatgtcttatattagttactgaatgagtagaaggctagcaaaagttgtaatagaggggcaagtttgcaataaataatttagtaagatgttaaaaaaaaaaaaagaactgcagaaggtatttaataggaataaatgtaaattcccacatttatgcccagtgatcaaatgccgatagaaaaggcccagtttgatagtagtttgtataaaaagcttaaaatatctggagttattgttgtatgtgagcctgttaccctggggcagataaaaggtttggtgggaaatacagaaatgttaaaggagggacagctaagggaagcattgtttggtctagagaagatatggctgaaagatccagtacttatgactatatgtggaagaagacagttaatccactgtgttccaaagcgtcaacagaagttagaagaaaatggatttcagcttggaataggaagaactttctaataattgcatgcctcacaaagaagtatttccccattaatgactgtgcaagcaaaggctggaaaactgtctctcttgagtgctataaaaaagactctacatcaggtgcgcgggtgagccagatggttttccaaggtctcttatttttatacatttatttataactgcctcttccagagagagtttgaagcctctgtatatgctgtcttccaactctcagcccatataaaatgcagtttagcaactttggatgaaatggccttttgtagttggcttgggaaccttacaccacaggtactatgactggttgcaaaaataactgaaaaattggccaaaccaaagctcagtacaccctgtagtcctagttactaagtcactaaattttgattccagggaacagattttggattataaattaaggtgactaattttattagggcagtctaactgaacttacattgttactctctttataatctagttcaggataacttgactgacaagctgcatttcaactaactttttgtattttatattagttcaagaagcctacagggaaatgctcacagctgacaatcttgatattgacaacatgagacacaaaattcgagattattccttgtcaggggcctaccgaaagatcattattcgtcctcagaatgttagctggtgagtaatcatctagaatgagatagaactgaattaccatataagttgtaagcttttgcttcactttatatagagtcatgtactgcacaagaattttcagtcagtgacagattgcttatatgatggtggtatcataagattataacaccatatttttacttaccttttgttttttttttggtttttttttgagacggagtttcactagtcacccaggctggagcacaatagcatgatctcggctcactgcaacttctgcctcccaggttcaagcgattctcctgtctcagcttccagagtagctaggattacaggcacctgccaccacacctggataatttttgtatttttagtagaggcagggtttcaccatattggccaggctggtgtcaaactcctgacttcaggtgatcctcctgccccggcctcccaaagcgctgggattacaggcacgagccaccacacctggccttaccttttttcttttcttttttctcttttatcttcttttcttttccttttctttttcttttccttttctatctttttcttttctttcttttctttttttttcttaatagaggcaggttctttctgtcacccaggctggaatgcagtggcataatcatggcttcctgcagcctcaagctcctctgctcaagcaatcctcccacctcggcctcccaaagtattgggattacgggcatgagccaccacatccagcctgtgccttttctatgtttagatgcacaagtacttaaaccattgtgttacagcagcctccagtattcagtacagtaacatgctgtataggtttgtagcctaggagcaataggctatagtctgtaaccaaggcgtgtagtaggctataccatctgtgtttgtgtaagtacattctgtgatgtttacacggtgatgaaatgcctgacaagggttagaacatgtccctcttgttaagcagtgcatgactgtactttttcagtgcttacaacctagcatctaagtgtttcataagtgttagttattattgttattactactattgttaccactactgctactactttgtatttttcaaatcatcaagaagtaaatgaagctaagccgggcacagtgtctcataagtaagcccggagactccagaggctgaagcgggaggattgcttgaggtcaggagtttgagacaagcctgggcaatatagtgagaccctgtctctaaaaaaagaaaagaaataaagaagctgttttgaatataaacagttatgggaagtgagttcatttacattttattggcatcactgaattattgaagaaatgtgtagagtgaacttttttcctatttctaaaaacttagatttgcttacagagctatctctgagcaaattaccttacttagaattagctgtgagttccaaacaccgctctggttgttttaatatcatgtttctagagaggaaaatatacttatgttagttcgtttaaaaatactttattggaagcccaaggtgggaggatcacttgagcctaggagcttgagacctgcctccgcaacatagcaagaccatctctacaaaaaattacaaaaattagcctggtgtgatggtgcacatctgtagtcccagctgtttgggaggccaatgtgggaggattgcttgagcctggaaggtcgaggctgcagtaagctgtgatcacgccactgccctccagcctgggtgacaaaacgaaaccctgtctcaaaaacaaatttttttttttttttttttttttgagacggagtctcgctctgtcgcccaggctggagtgcagtggcgcgatctcggctcactgcaagctccgcctcccgggttcgcgccattctcctgcctcagcctcccgagtagctgggactacaggcgcccgctaccacgtccggctaattttttgtatttttagtagagacggggtttcaccttgttagccaggatggtctcgatctcctgacctcgtgatccgcccgcctcggcctcccaaagtgctgggattacaggcgtgagccaccgcgcccggcctcaaaaacaaattttaatactcagtattatctaaagctttatttgataattttaaaatgaaatcctgaactagttgcctatttccaggaaattattttattccctatttccttctcttctccatctctcttacctcctcctctctggagtataggcaagaggtccacatggttggactttgtcttccccactccagagaactgttccttctcagtaacaagctgttgttggttgtggcacccagtctggagaaaatgtaaatgccataagtaatttgatcacagctgtgcaaagtgaagtttactgactctcaacttcatttaaaaagaattgtcggctgggcacggtggctcacgcctgtaatcccagcactttgggaggccgaggcgggcagatcacgagctcaggagatcgagaccatcctggctaacacggtgaaacgccatctctactaaaaatacaaaaaattagccgggcatggtggcgggcgcctgtagtcccagctactcgggaggctgaggcaggagaatggtgtgaacccgggaggcggagcttgcagtgagccaagatcacgccactacactccagcctgggcgacagagcgagactccgtctaagaaaaaaagatttgtcagttgtacatttttaaaattttaattattaatgtgaagaaatggggtttcaccatgttacccacgctggtcttgaactcctgggcttagtcatcccacctcggccgcccaaagtgttgggattagaggcatgagccaccatgcctggccccagttgtgcatttttaaataactaatagaatataattggattgagcctattatattcaggcacagtggctcacgttataatcccagcagttggggagactgtggcgggtggatcacctgaggtcaggagtttgagacctccctggccaacatagtgaaaccccatctctactaaaaatacaaaaattagccaggcatggtggcagacacctatagtcccagctacttgtgagactgaggcaggagaattgattgaacccaggaggcagaggttgcagtgagccaagatcacaccactgcactccagcctaggtgacagagttgagactccatctcaaaaaaaaaaaaaaattatatatataagcaaaacttaggtataaaatctggccctgctatattattcaagattcctaactataattatttacagtaaacttacttgtttttcttgctaaataaatgatgatgagtggcttagtaccttttatgaaagttcacattcacacttatctttattcatatgttttgaagggaagtcgttgcatatgatgatcccaaaattccacttttcaacacagatgtggacaacctagaagggaagacaccaccagtttttgcttctggtaagtttactcagtcatcagctctgtgttgactttgaaatgttttgttaaacaaaaacataatttttttttgaaaactgctcttacaagcactaccaccacccatgatttcattgttgtgttttatgaccttactttcacaattatggctgaaagttagtgattaaaaccagtaaatcctcctgaaaataagtgcatgttatagatggttgtgatattaggtgatggagtatttctccccatcccccacagagacttaccaaaggtgagtgaaaattcaggaagagtctaaaaaattaaattggttggccaggtgcggtggctcacgcttgtaatcccagcactttgggaggccgaggcgggcggatcacgaggtcaggagatcgagaccacggtgaaaccccgtctctactaaaaatacaaaaaattagccgggtgtggtggcgggtgcctgtagtcccagctacttggagaggctgaggcaggagaatggtgtgaacacagaaggcggagcttgtagtgagccaagatcacgccactgcactccagcctgggtgacaaaacgagactccatctcaaaaaaaaaaaaaaaaaaattggtggctgggcgtggtggctcacacctgtaatcccagcagtttgggagaccgagacaagtggatcacttgaggtcaggagttccagaccagcctggccaacatgacaaaaccccgtctctactgaaaatacaaaaaaaaaaattaggcgggcgtggtggtgggcacctgtaatcccagctactcaggaggctgaggcaggagaatcgcttcaacccgggaggtggaggctgcagtgagctgagattacaccactgcactccagtctgggcaacataacaagactctgtctcaaaaaaaaattaattaattaattaaattggcattctcatcatcaaattcttgttctgttttttcccaggccgtaatttattattatttctttaactttacatgcgtttctcttttgtgttcttctgtcatctgcctttttgtgaaagttcctgggcagaatttctgtaaccattcagcaggttcacactcacagatctcttacttccatggtctcattctccaaggccccctaggaagtggagtctaaggaaagcagcacagttctttgtatttgcttagagattatgtgactctcgctggtctgtctgcagctgccttcattttctgactgttttctttcttgccttgcagaaggcaaatacagggctctgaaaatggatttttctctacccccttctacttacgccaccatggccattcgagaagtgctaaaaatggataccagtatcaagaaccagacgcagctgaatacaacctggcttcgctgagcagtaccttgtccacagattagaaaacgtacacaagtgtttgcttcctggctccctgtgcatttttgtcttagttcagactcatatatggatttcaaatctttgtaataaaaattatttgtatttttaagtttttattagcttaaagaaataatttgcaatatttgtacatgtacacaaatcctgaggttcttaattttagctcagaatataaattagtcaaaatacacttcaggtgcttaaatcagagtaaaatgtcagctttacaataataaaaaaaggactttggtttaaagtagcaggtttaggttttgctacattctcaaaagacagcaggagtatttgacacatctgtgatggagtatacaacaatgcattttaagagcaaatgcaacaaaacaaatctggactatggataaataatttgagagctgccacccacaaatataaatacagtactcatgctgactgaaataataagacatctacaaatttataaacaaaaagtgattgtcattatcctgcttatgtactagattcaggcaagcattatagactttttggttgcggtggcttttgcatttatattatcaatgccttgcaggaacgttgcattgataggcccattttatttttttattttttttttcgagacaggatctcactctgtagcacaggctggattgcagtgcaatcctgcaattctcaatcttgcactgcagcctcgacctcccaggctccagtgactctcccacctcagcctcctaagtagctgggagtacaggcgcgcaccaccacgcctagctgatttttgtatttttttgtagagacgggggtttggccatgttgccgaggctaactcctgggattacaggcatgagctgtgctggccgggtttttttttcttgatgtaaacgtgtacagctgttttattagttaaggtctaatttttactctaggtgccttttatgttcagaactctttccactggactggtatttgctcaaaaataaataatggtagagaagaaaactataaaaatggacaaggctttcttctatcagtagcgtttaccctttgtcaccagtggctttggtatttccatgtctggcattgcataaacttctctggtgtgaaaggataaatatgcctttctaaagttgtatatcaaaattgtatcaatttttattttctatgatttctagaaacaaatgtaataaatatttttaaaatctcctttctactggttatgtaaataaatcaaataaatatatcaaaatgagtgcagataagaatcttgaccttgactaaaggtaaggaactaaatgaatgtgggatcctcatcagaaatggtggtgacaccaaaatgtgttgtgatcagctgtgaagtatgaggataatctgagtcaaatgctacgaataattgactgtgttggactggactccaggttattggaatcactcactcaccttccaatgtgctttatggagtagaaaagaaaggaatggaaaagagctaccgtaccaggagcattgcaccatgggaatgtgaatgacatttgtctcgtatctggtagtagaaatgagattcggaactgtttttcaacccttttgttttaatgacatccatcaccaccacactgctgaggcttaaaaaagattggaaatagcatggtaaattttatatatatatatatatatatatatatatattttttttttttttttttttttttttttttttgagacattgttgttctgtcacccaggctggagtgcagtggcgtgatcctggctctctgcaacctcccactaccaggttcaagtgactcttgtgcctcagcctcgtaagtagctgggattacaggcaccgctgccaggcctggctaattttgtatttttagtagatgcggagtttcgccatgttagctaggctggtctcaaactcctggcctaaagtgatctgcccactgctacctcccaaagtgctggtattacagacgtgagccaccatgcccagcccagtaaattatcctttttgctagctagttttgaaagaatattttgtcctaggtcaggcacggtggctcacacctgtacactttgggagaccaaggtgggaggattgcctgagcccaggagcttgagatcagcctgggcaacatagtgagaccctgtctcaaatatatatatatttatatatatatatattttgtcttacaaaagctaaacatgtattaaatgtatagtagtcctgtctgtaccttccagtaatagctggagttctccttcatctgacagaaaattatttatgaagggatctaagtctttctgttgcaattgcattcagcagttctgcatttacaggttgagtatcccttacacaaaatgcctgggactagaagtgtcttggattttcatttttttttttagatttgtacttcaacttactggttggaatccaaaaatccaaaatgctccaatgagcaagttttggattttggattttcagatttgggatgctcaaccagtataaatttgcattccaaaacaaaagtgaagctaaacttgtgttttcttcatctgggaaatacttacggctctattgttaactttcttggctgtgttagctagtaccagtttgtacatgtctcttcataaacaccagtggataaataatgattcaaggcggattcttcaagctgttttgagactcagggggcacaccacctaactctagggacttactcaacctgaaataaatcattgccttagcatagaattcagaacattttttgttgtttggaaagggaggaagtttctcttagacaaatttataaagcctgaaagcaacctcatcctcaacataaaagtatcattgcttcctaaatttttgcctaaaagaaataataaaggatcattctttttattataatgtaaaaccaacactattccataacaggaaaggaagctaaataatcaaaattgttctttccaatgtttttattcatggtttcatgttgtagataataactagactgctattatactaataaaaaaaatcctgattgcttcctgaatcttcatggtttcatgttgtaggtaataactagacagccattataccagtttaaaaaatttctggttgattcctgaatcaaccaaaaaattggtaacagctgcaatactacatcagtacttaaaacttcaccagttgctccaggctgtatgaattaacatcgactggtatttgcactggaatgcattttgtggtcaatttgcacttaaaaaaataaggatgtgtgtgtgtaatacaaaatagaatacatataaatgttttatagctaccaatgtgcactgatgtgcatgtgcctttttgaaaccaaagcagacctggagtgtaccatgtagttttttatttcagatatatgaagaaatgaaaccacactggaagaatgacaaagctgaatatggccagcttctcatctttgtaaattcaaaagcatttgcttgctcagcaaaggataactttaaggctttctttgttcagtgaaatctgcttttccactttgtgtagggtagaacttagttttggatcatgaacaccttggaaaatctgagggagaagtatagacattgcttccaggagaaggaaagcgggaaagtgtatccatatgtgtgtgtgttacaaattcatgcaaactttttatacaattttaggggcttcaatgtattcaataagaccccctactctaggtaagtgctttccaacctttaatgtacttaacagtcacctggtgatcttcttaaactgcaggatgtatttcaggaagtccaggtagaatatgaaatactgcatttctaaccagttccctacatgtgctgctgttacacacgaagcagccaggctccagacctgtactggccaacacagcggccactagccatgtggctacttaaacttgacttaagcttctcagtcacagtttcaactgctccatagccaaatatatggctagtggctctgtggtgtacagcactgacgcagttaataaatcaatcacctgagatacaaaggagagtctacactgatcagatgtgatactgttgcaggctgggcgctgcagctcatgcctgtaatcccagcactttgggaggccgaggcgggcggatcacttgaggtcaggagttcaagaccagcctggccagcatggtgaaaccccgtctctactaaaaatacaaaaatcagccaggcatagtggcaaatgcctgtaatcccagctactcgggaggctgaggcagaactgcttgaacccaggaggcagaggttgcagtgagccaagatcacaccattgaactccagcctaggcaacagagggaaactccatctgaaaaaaaaaaaaaaaaaaaaaagtaatacagttgcaaatgttgcagaatttctgctccttagttcagctaaatccaagttcttatgtcatgaccaggaaaaagttaggcacagacacattgaagggtgagcagaacagaatatattgggcaaaatgggcaaaagaaaaaaaactctcagcaaagcaagaggggtttctgctaacaggccccacctcacagattgattccaggccatacacaggaactgaagaacccaggctccttccccctgcaagcagcatgaacttctttgactccatcctgttctcccagtgctcaggccggtccaagattctcctgggaccctcccctgtattttcctcttgcatctatcaacacctggtgatgctgatgattacaggcaaacaatgaatatatgtgcaaaagggattacattgtaattagatccaaggctcatattgatgatctaagatttcacacttgagatcgctaagagccttccttaaactcacttccatgcttcttattttttggcttcctccaggatcactaataattcttttttccttgtttgtttgtttgagacggagtctcactctgtcacccaggctggagtgcagtggcgggatctcagctcactgcaacccctgcctcctgggttcaaacaatcctcccacctcagcctcccgagtagctgggaccacaagcacgtgtcaccatacctgactagtgtttttgtgtttttggtagagaagaagtttcgccatgttggccaggtgggtctcgaactccagggctcaagtgatccacgcgtctcagcctcccaaagtgctgggattacaggcgtgggtcactgctccccgccttttctttctttgctacccttgtccaaaggtttcgtcaaaccattcttaaggcactgtggccttgttactccatacagaaaatttaccctccaccctctaaaaaagtcataattgttgtaattaaaaactccttggctgtagcttcttatgaaagcagcagctgcaaaaagcaggaatggccagaaagcccatattattgtgttgtccttcgggtatactgtgttgattttctgttacggcttatccagctgtgctagactcctggaaagtacccagtatgtaaaaagagatgacaacaggaaaccatggtgggagaagttattcaaagcccctgtctcctaatgcatatttacagtcccctcaaaagccctacatggatctttagagcagctttgtccaatacaaatataatgtgagccatgtatgtgattgaaattttctggtagccttattaagaaaatgaaaagaaacaagtaaaattaatgacgtagtttctataaagcaacatatccaaaatatcgtttcaacttataagtaatataaaaaatattttacattctcttttttgtactgtcttaaaaaaccagtgtgtattttacacttaaaatatatatcaatttggactagctgtatatttcatgctcaatagccacttgtggccaatggctaccacattggacgttgagtcttcagaaagatcacttgttctttgttgcatgtcaccagtataatggtaaatttgagtattaaggtttgattttttaaattgggaatatgtaggttggaagcacagctagttaaatatgattttgaaatgtttactggattgttaagttttatactgattgggagtaaatacttttgctatgggagcacataacaaacatggttgttattaggttctaaaatattatcagagtgtttgaaattttccaagcaattcagataacaccctacaattttctttcacctataaataatgaaaagctaatcctcagtgcagcctctatttagattttattttattttttatttatttatttttgagacaggttctcgctctgttgcccaggctggagtgcagtggtgtgatctcggctcactgcaacctccgcctcccgggttcaagcaattcttgtgcctcagcctcccaagtagctaggattacaggcatgagccactgtgcccagccttctatttagattttaaattccatgttcatggaatataaattgaggtttgggagatgagaataaggatagagtcagaagtaaaaaaaaatttgtgaaaacagcacatgaagctaagaactcaggttgtacaggatggcaaggtgattaggcagggctgaggttttgttttggcttttattaatgatagctttattgaggtataatttacataccatacaattcactcatttaagtgtacaaaggattttggtatatttggagttgcgcaaccattatcacaatcatttttacttttttttttgagacagagtctcgctctgttgcccgggctggagtggcgtgatctcagctcaccacaacctctgcctcccaggttcaagtggctctcctgccttagcctcccaagtagctgggactacaggtgcgtgccaccatggccagctaatttttgtatttttagtagagacaggggtttcaccatattggccaggctggtcttgaactcctgacctcgtgatctgcctgcctcaatgtcccaaagccctgggattacaggcgtgagccactgtgcccggcccatttttttataatctcaaaaagaaacttcaaatgcattagcgttgacttcctattatcacctcagccccagcccctggcaactgctactttcaatctctgttgattggtctcttctagtcatttgatataaatgaaattatacaatatgcgggactgactttcacttagcataatgttttcaaggtttatccagtttgtgacgtaaaagtactttattccttatttaggcaaacaatactccatctatgaatataccacattttattcatgttcatcaattgatagacgtttgggttgtttccaccttctggcttttatgaataatgctgttataaacattttggtatgagtttttgtacagtcatatgtctccatttctcttgagtataaagctaggagtggaatttctgtgtcatataactgtgtttaatctttgaagaactctcagactgttttcctaagtagctgcaccatgttacattcccactaggagtgtatgacagttctattttctccacatcctcgtcaacacttgttgttatctgtctttgtgattgtagccatccttttgggtataaagaggtttctctgctggacgtggtggctcacgcctgtaatcccagcactttaggaggtcaagttgggcagatcacttgaggtcaggagtttaagaccagcctggccaacatggtgaaaccccatgtctactaaaaatacaaaaattagccagacatggtggcaggcacctgtaatcccatctacttgggaggctgagacaggagaactgctgaacctaggaggcagaggttgcagtgagccaagattgcgtcactgcactccagcctgggcgagggagcaagactccatctcaaaagcaaaaataaaaataaatttaaacaaatgaaaataaagtggtttctcactacggttttgatttgcatttccctgatgactatgtggaatatttttgtatgcttattggccatttgtctattctttggagaaatgtctattgagatcttttgcccatttggggggtgttatttttctttatgttgttgagatctagagttctttgtatgttctaggcacaaatcctttaccaggtatacgattggcaaatattttctcccattccatgggttgtctactttctttttttttttttttttcttttgagacaagatctcattgttgctcaggctgtctgtagtaacacgatcacggatcactgaggcctcaacctcccaggcttaaaagtagctgggactacaggcacacaccactacaggctaatttttgtatttttggtagagatggggtttcaccatgttgtccaggctggtcttgaactcctgagctcaagccatctgcctgcctcggcctcctagagtgctgggattacaggcttgagccactgagcctggcctatctttactttcttgagggttgggtttttgttttgttttgttttttgagacaaagtcttgctctgtcaccaggctggagtacagtggcgtgattttggctcactgcaacctccccctcccgggttcaagcgattctcctgcctcagcctcccgagtagctgagaccacaggcacatgccaccacgcccacctaatttttgtatttttagtagagacgggatttcaccatgttggccaggatggtctcgatctcttgacctcgtgatctgcctgcctcggcctcccaaagtgctgggattacaagcgtgagccactgcgcccagctgagggttgggttttaaaggctgtaggagttattctttattgaaattttgtttctaaactaagttcctatggtgtccataataactagattgctgcagtgtccacagtaaccatctgaaaatggattttcatgactgggagggctcagggttaagcgcaagaattcacaaccataactttacaggatgaaaatagtcaggcactgccaggagcggtggctcacacttgtaatcccagcactttgggaggcctaggcagacggatcacttgagatcaggagttgaagaccaatctggccaacatggtgaaaccctgtctctactaaaaatacaaaaattagccgggcgtggtggtgggcgcctgtaatcccagctacttgctgggctgaggcacgagaatttcttgaatccgggaggcagaggttgcagtaagccaagatctcgccactgcactccagcctaggcgacagagtgagactccgtctcaaaacaaacaaacaacaacaacaacaaaaaaaaaaaccacttaggcgcacttgggaacgcttttgtttcagctcagttcaactccacctgcaccctctgagagctgcaaatggggaacataactctccttagcccagcacccacgtctgttctctactagccacattcatcctgttttctacatttctctcttcctgtttacaaaattaattttcaacatagaagatcttactacctgttttggcctagacaaatgtttcactaccaaaaaacttgctcgtcaagctgacacagagtcattccacttaacgagttagccaccttccattagctggaaagatgatagagtcttagttgatccttttttctaataataatatctgtctaataaagtggagctaaagtctgtttctttcctgtgccatcctggtttcttaggacccctgcacattaattaggaggaagtcatgatgtggataactccaaaaggtgaaaatccaaaagtaaataaagcactggaggctgctgtgataaagaggaaaggacgtcaaaccaggagtcaaaatgcacaggctgaagtcctggccctgccactgactgttgctcagagaccttcagagatccacatccctcctccggacctcagctttctccagagaatccctcaatgctaactgttgcagagtactccatggagtgcacccatcacacgtggactacacggagctccagggatggacatcagatttgcctctaactcctcatcaccctaaacaacattgtcatcaactccattgcacatgtctccttgtggacccatcacagcaccatcagttcccactgttgcaggctaaggaagaagcctgtacacagtcccatctgggtgggattggctgtccacagaggtaggaagacgaagtgatgccaagtaggatcatcttccctccagaacttgggcccagtcttccaggagttgtcatctgtgcttggagcaataactcattttctctcctctcttaccatgtgaatttttcactactttaaaaaattgctggctgggcatggtggctcacgcctgtaatcccagcactttgggaggccgaggcgggtggatcacgaggtcaggagatcaagaccatcctggctaacatggtgaaacctcgtctctactaaaaatacaaaaaattagccaggcgtggtggcaggtgcctgtggtcccagctacttgggaggctgaggcaggagaatggcgggaacctgggaggcagagcttgcagtgagctgacatagcgccactgcactccagactgggcaacagagcgagactcagtctcaaaaaaaaaaaaaaaaaaaattgctggccaggcacggtggctcacgcctgtaatcccaccactttgggaggccaaagcaggtggatcacctgaggtcaggaatttgagaccagcctggccaacatggtgaaaccccgtctctaccaaaaatacaaaaattagccaggcatggtggcgggtgcctgtagtcccagctacttaagaggctgaggcaggagaattgcttgaacctgggaggcggaggttgcaatgagccgagattgtgccactacactccagcctgggcaacagagcgagactccatctcagaaaaaaaaaaaaaaaattgcaatatacattcataaccaagtccactttcaaataacaccatactgcttcatgagtagtacaggtccttcatggatagtacagatactttataacagtatttgctggccaggcacggtggcccatgcttataatcccagcactttgggacgtcaaggtgagcagatcatgtgaggtcaggagttcaagaccagcctggctgacatagtgaaacctcgtctctactaaaatacaaaaattagccaggcacggtgccaggcacctgtaatccctgctactcgggaggcatcccaagttgggattgcaccgttgtactccagcctggatgacagagtgagactctgt

SEQ ID NO: 1580 - DNA, 3461 bp, Homo sapiens
tgagtcggctggagcgcatctggtcctccgcgcggaaagcgctgcttttgcctggccgccctagccgctggctcatccaagtggccttcgccgctctcttgcgtcccaaccagagcgctggccacctcgccgcccagctcacgccgcgcccgcgctcccaggctccgggttttcttaaatgttttcttggagccttaaagatggagatgacagaaatgactggtgtgtcgctgaaacgtggggcactggttgtcgaagataatgacagtggagtcccagttgaagagacaaaaaaacagaagctgtcggaatgcagtctaaccaaaggtcaagatgggctacagaatgactttctgtccatcagtgaagacgtgcctcggcctcctgacactgtcagtactgggaaaggtggaaagaattctgaggctcagttggaagatgaggaagaagaggaggaagatggactttcagaggagtgcgaggaggaggaatcagagagttttgcagacatgatgaagcatggactcactgaggctgacgtaggcatcaccaagtttgtgagttctcatcaagggttctcgggaatcttaaaagaaagatactccgacttcgttgttcatgaaataggaaaagatggacggatcagccatttgaatgacttgtccattccagtggatgaggaggacccttcagaagacatatttacagttttgacagctgaagaaaagcagcgattggaagagctccagctgttcaaaaataaggaaaccagtgttgccattgaggttatcgaggacaccaaagagaaaagaaccatcatccatcaggctatcaaatctctgtttccaggattagagacaaaaacagaggatagggaggggaagaaatacattgtagcctaccacgcagctgggaaaaaggctttggcaaatccaagaaaacattcttggccaaaatctaggggaagttactgccacttcgtactatataaggaaaacaaagacaccatggatgctattaatgtactctccaaatacttaagagtcaagccaaatatattctcctacatgggaaccaaagataaaagggctataacagttcaagaaattgctgttctcaaaataactgcacaaagacttgcccacctgaataagtgcttgatgaactttaagctagggaatttcagctatcaaaaaaacccactgaaattgggagagcttcaaggaaaccacttcactgttgttctcagaaatataacaggaactgatgaccaagtacagcaagctatgaactctctcaaggagattggatttattaactactatggaatgcaaagatttggaaccacagctgtccctacgtatcaggttggaagagctatactacaaaattcctggacagaagtcatggatttaatattgaaaccccgctctggagctgaaaagggctacttggttaaatgcagagaagaatgggcaaagaccaaagacccaactgctgccctcagaaaactacctgtcaaaaggtgtgtggaagggcagctgcttcgaggactttcaaaatatggaatgaagaatatagtctctgcatttggcataatacccagaaataatcgcttaatgtatattcatagctaccaaagctatgtgtggaataacatggtaagcaagaggatagaagactatggactaaaacctgttccaggggacctcgttctcaaaggagccacagccacctatattgaggaagatgatgttaataattactctatccatgatgtggtaatgcccttgcctggtttcgatgttatctacccaaagcataaaattcaagaagcctacagggaaatgctcacagctgacaatcttgatattgacaacatgagacacaaaattcgagattattccttgtcaggggcctaccgaaagatcattattcgtcctcagaatgttagctgggaagtcgttgcatatgatgatcccaaaattccacttttcaacacagatgtggacaacctagaagggaagacaccaccagtttttgcttctgaaggcaaatacagggctctgaaaatggatttttctctacccccttctacttacgccaccatggccattcgagaagtgctaaaaatggataccagtatcaagaaccagacgcagctgaatacaacctggcttcgctgagcagtaccttgtccacagattagaaaacgtacacaagtgtttgcttcctggctccctgtgcatttttgtcttagttcagactcatatatggatttcaaatctttgtaataaaaattatttgtatttttaagtttttattagcttaaagaaataatttgcaatatttgtacatgtacacaaatcctgaggttcttaattttagctcagaatataaattagtcaaaatacacttcaggtgcttaaatcagagtaaaatgtcagctttacaataataaaaaaaggactttggtttaaagtagcaggtttaggttttgctacattctcaaaagacagcaggagtatttgacacatctgtgatggagtatacaacaatgcattttaagagcaaatgcaacaaaacaaatctggactatggataaataatttgagagctgccacccacaaatataaatacagtactcatgctgactgaaataataagacatctacaaatttataaacaaaaagtgattgtcattatcctgcttatgtactagattcaggcaagcattatagactttttggttgcggtggcttttgcatttatattatcaatgccttgcaggaacgttgcattgataggcccattttatttttttattttttttttcgagacaggatctcactctgtagcacaggctggattgcagtgcaatcctgcaattctcaatcttgcactgcagcctcgacctcccaggctccagtgactctcccacctcagcctcctaagtagctgggagtacaggcgcgcaccaccacgcctagctgatttttgtatttttttgtagagacgggggtttggccatgttgccgaggctaactcctgggattacaggcatgagctgtgctggccgggtttttttttcttgatgtaaacgtgtacagctgttttattagttaaggtctaatttttactctaggtgccttttatgttcagaactctttccactggactggtatttgctcaaaaataaataatggtagagaagaaaactataaaaatggacaaggctttcttctatcagtagcgtttaccctttgtcaccagtggctttggtatttccatgtctggcattgcataaacttctctggtgtgaaaggataaatatgcctttctaaagttgtatatcaaaattgtatcaatttttattttctatgatttctagaaacaaatgtaataaatatttttaaaatctcctttctactggttatgtaaataaatcaaataaatatatc

SEQ ID NO: 1581 - protein, 659 aa, Homo sapiens
MEMTEMTGVSLKRGALVVEDNDSGVPVEETKKQKLSECSLTKGQDGLQNDFLSISEDVPRPPDTVSTGKGGKNSEAQLEDEEEEEEDGLSEECEEEESESFADMMKHGLTEADVGITKFVSSHQGFSGILKERYSDFVVHEIGKDGRISHLNDLSIPVDEEDPSEDIFTVLTAEEKQRLEELQLFKNKETSVAIEVIEDTKEKRTIIHQAIKSLFPGLETKTEDREGKKYIVAYHAAGKKANPRKHSWPKSRGSYCHFVLYKENKDTMDAINVLSKYLRVKPNIFSYMGTKDKRAITVQEIAVLKITAQRLAHLNKCLMNFKLGNFSYQKNPLKLGELQGNHFTVVLRNITGTDDQVQQAMNSLKEIGFINYYGMQRFGTTAVPTYQVGRAILQNSWTEVMDLILKPRSGAEKGYLVKCREEWAKTKDPTAALRKLPVKRCVEGQLLRGLSKYGMKNIVSAFGIIPRNNRLMYIHSYQSYVWNNMVSKRIEDYGLKPVPGDLVLKGATATYIEEDDVNNYSIHDVVMPLPGFDVIYPKHKIQEAYREMLTADNLDIDNMRHKIRDYSLSGAYRKIIIRPQNVSWEVVAYDDPKIPLFNTDVDNLEGKTPPVFASEGKYRALKMDFSLPPSTYATMAIREVLKMDTSIKNQTQLNTTWLR

SEQ ID NO: 1582 - DNA, 941 bp, Homo sapiens
tgagtcggctggagcgcatctggtcctccgcgcggaaagcgctgcttttgcctggccgccctagccgctggctcatccaagtggccttcgccgctctcttgcgtcccaaccagagcgctggccacctcgccgcccagctcacgccgcgcccgcgctcccaggctccgggttttcttaaatgttttcttggagccttaaagatggagatgacagaaatgactggtgtgtcgctgaaacgtggggcactggttgtcgaagataatgacagtggagtcccagttgaagagacaaaaaaacagaagctgtcggaatgcagtctaaccaaaggtcaagatgggctacagaatgactttctgtccatcagtgaagacgtgcctcggcctcctgacactgtcagtactgggaaaggtggaaagaattctgaggctcagttggaagatgaggaagaagaggaggaagatggactttcagaggagtgcgaggaggaggaatcagagagttttgcagacatgatgaagcatggactcactgaggctgacgtaggcatcaccaagtttgtgagttctcatcaagggttctcgggaatcttaaaagaaagatactccgacttcgttgttcatgaaataggaaaagatggacggatcagccatttgaatgacttgtccattccagtggatgaggaggacccttcagaagacatatttacagttttgacagctgaagaaaagcagcgattggaagagctccagctgttcaaaaataaggaaaccagtgttgccattgaggttatcgaggacaccaaagagaaaagaaccatcatccatcaggctatcaaatctctgtttccaggattagagacaaaaacagaggatagggaggggaagaaatacattgtagcctaccacgcagctgggaaaaaggctttggcaagtaggtgtctg

SEQ ID NO: 1583 - protein, 245 aa, Homo sapiens
MEMTEMTGVSLKRGALVVEDNDSGVPVEETKKQKLSECSLTKGQDGLQNDFLSISEDVPRPPDTVSTGKGGKNSEAQLEDEEEEEEDGLSEECEEEESESFADMMKHGLTEADVGITKFVSSHQGFSGILKERYSDFVVHEIGKDGRISHLNDLSIPVDEEDPSEDIFTVLTAEEKQRLEELQLFKNKETSVAIEVIEDTKEKRTIIHQAIKSLFPGLETKTEDREGKKYIVAYHAAGKKASRCL

SEQ ID NO: 1584 - DNA, 2024 bp, Homo sapiens
ctgaaaagggctacttggttaaatgcagagaagaatgggcaaagaccaaagacccaactgctgccctcagaaaactacctgtcaaaaggtgtgtggaagggcagctgcttcgaggactttcaaaatatggaatgaagaatatagtctctgcatttggcataatacccagaaataatcgcttaatgtatattcatagctaccaaagctatgtgtggaataacatggtaagcaagaggatagaagactatggactaaaacctgttccaggggacctcgttctcaaaggagccacagccacctatattgaggaagatgatgttaataattactctatccatgatgtggtaatgcccttgcctggtttcgatgttatctacccaaagcataaaattcaagaagcctacagggaaatgctcacagctgacaatcttgatattgacaacatgagacacaaaattcgagattattccttgtcaggggcctaccgaaagatcattattcgtcctcagaatgttagctgggaagtcgttgcatatgatgatcccaaaattccacttttcaacacagatgtggacaacctagaagggaagacaccaccagtttttgcttctgaaggcaaatacagggctctgaaaatggatttttctctacccccttctacttacgccaccatggccattcgagaagtgctaaaaatggataccagtatcaagaaccagacgcagctgaatacaacctggcttcgctgagcagtaccttgtccacagattagaaaacgtacacaagtgtttgcttcctggctccctgtgcatttttgtcttagttcagactcatatatggatttcaaatctttgtaataaaaattatttgtatttttaagtttttattagcttaaagaaataatttgcaatatttgtacatgtacacaaatcctgaggttcttaattttagctcagaatataaattagtcaaaatacacttcaggtgcttaaatcagagtaaaatgtcagctttacaataataaaaaaaggactttggtttaaagtagcaggtttaggttttgctacattctcaaaagacagcaggagtatttgacacatctgtgatggagtatacaacaatgcattttaagagcaaatgcaacaaaacaaatctggactatggataaataatttgagagctgccacccacaaatataaatacagtactcatgctgactgaaataataagacatctacaaatttataaacaaaaagtgattgtcattatcctgcttatgtactagattcaggcaagcattatagactttttggttgcggtggcttttgcatttatattatcaatgccttgcaggaacgttgcattgataggcccattttatttttttattttttttttcgagacaggatctcactctgtagcacaggctggattgcagtgcaatcctgcaattctcaatcttgcactgcagcctcgacctcccaggctccagtgactctcccacctcagcctcctaagtagctgggagtacaggcgcgcaccaccacgcctagctgatttttgtatttttttgtagagacgggggtttggccatgttgccgaggctaactcctgggattacaggcatgagctgtgctggccgggtttttttttcttgatgtaaacgtgtacagctgttttattagttaaggtctaatttttactctaggtgccttttatgttcagaactctttccactggactggtatttgctcaaaaataaataatggtagagaagaaaactataaaaatggacaaggctttcttctatcagtagcgtttaccctttgtcaccagtggctttggtatttccatgtctggcattgcataaacttctctggtgtgaaaggataaatatgcctttctaaagttgtatatcaaaattgtatcaatttttattttctatgatttctagaaacaaatgtaataaatatttttaaaatctcctttctactggttatgtaaataaatcaaataaatatatc

SEQ ID NO: 1585 - protein, 205 aa, Homo sapiens
MKNIVSAFGIIPRNNRLMYIHSYQSYVWNNMVSKRIEDYGLKPVPGDLVLKGATATYIEEDDVNNYSIHDVVMPLPGFDVIYPKHKIQEAYREMLTADNLDIDNMRHKIRDYSLSGAYRKIIIRPQNVSWEVVAYDDPKIPLFNTDVDNLEGKTPPVFASEGKYRALKMDFSLPPSTYATMAIREVLKMDTSIKNQTQLNTTWLR

SEQ ID NO: 1586 - DNA, 92938 bp, Mus musculus
  misc_feature (1)...(92938): n = A, C, G or T/U
tcacagccttgttcaagcaccattcattttacttaataatccccaatgtataaacatagtgatggtggtagtaaaattacagaatatactgaaattatttttattagattattgttgtctatttctcaatttgcctaatttatgagctagacttcatcatgggtatacatatattgagagaaacccatagtatgtatagggtttgatattgggctcatatacccaggcattctgtggcaaggttttggaatacgttctctgtcagggagcagcacactactgcatttcaaaattatcttattttctaaagatgtttttgctgtttttatgtgtatgggtgttttacttgcttgcttgtctgcggaccacatgcatgtagtgcttacagaagccagaagagagcgtcaaatcgctcagaacgtgagttatagaaggtcgtgagcagccatgtgtgtgctagaacttgaacctgggtcccccggaagagcagttggtgctcttgaccactaagccacatctgcagcccctgcatttctactgtagaatgttacagtagcagagctggtgggactaacccagctccgtacagcctgccgcacctccatcctttgtttcacctgctttccttcaatggtctccctcattcttcacagtcttgggtcatgtcttcttgtccacagtcctcagagctctctagccccatccagtgcagatttctacacttttctttccaatattctttcttaagaataaccattgaatctcctgtaagtttttggcagatgatcttgctaaaaaaatccaacactgcataagcaaaatccttgggtgactttaaggcttggagccatggtctagcctatggggtagaggtttcaagaatgacaccctacgaataacacagagtagctagccagaccatgtctctgctggggtaaaaagagaaagtgaaagattatgtgtgctttggctttgccaggacagaggctgagagacatcacgtgatgatgaaccgggtcacttttacaggtggaaggagaagcggaagctggcttttgtaactgattttgtagccatgttctgccctgttttggacacttccttggcataagtattagggtgtggtgatgactaagcagatgagaacggaattaaaacatggaagtattattcatatggtggactccctttaaaacccagagctgctgtggggtgtgcctctcctcactatcctgttcatccctctctgggcagctgggctcacgacccacccttcctccagtgtctgtgcttattcagctgctttgggcattaaaaagagctcagcaaggcaaccaaagatgtgtgttccttgctactcctgctttctgatacatgggaaatatttatttaagtattttggagatatttaaggtggcacccaacgaaatatgaagctaaacataattgcaatatattgttcttgtgaacagagcgagtggtgggaaacggggcccctcccatttcccaacatgtaccccgtggctatgcagagaagtgtgcaaatctgaaaagaaaccataaaccaaaatgaggcgggggaagaaagcttgccgtcattttatgtgctcctttaatttgtgtttctgaacttcctctgtgggccaagcattttattactgcaggggactcaagacaaaccacagttcaacttcctctggggcagtcattgtttatcacatttaccagcatattttctgttgcctgggatctcatctggcaatgcaaactgatggacaggctcacggttctatactgaacattccctagtgaggtcttttggttgcatgcaccaacaggagcttctttgtaggattcaggagcaccttccttggttcctcccctcctctcctctcctctcctctcctctcctctcctctcttctcttctcttctcttnnnnnnnnnnnnnnnnnnnnnnnnnnnnnnnnnnnnnnnnnnnnnnnnnnnnnnnnnnnnnnnnnnnnnnnnnnnnnnnnnnnnnnnnnnnnnnnnnnnnnnnnnnnnnnnnnnnnnnnnnnnnnnnnnnnnnnnnnnnnnnnnnnnnnnnnnnnnnnnnnnnnnnnnnnnnnnnnnnnnnnnnnnnnngctgtcctggaactcacagagatcctcccgcctctgtctctgcctccggagtgctggaggagtgccttttagagaagtttgaataatgcattggctaagagtaaaaaggaagaatgtttaatggaagttcacttaggaagaattaacaaccagcaatgtacagtctgattttgcctaatcttaaaaaaaataatttgtacttcctcttatttgattatacaacttaacattgtgatctggagagatggctcagtggttaagaatgcacactgctcttgcagaggacctgagttctatttcccacacccacaggctgcccacagcaacctttaactccagcttcagggccattcagtgcccccatgggcacctgcacacacatgcccatacccacacacagacacatacatacatgtatacacataattaaaaataaaataaatcttttatgagacatcttttagaacacttagtaaaatgaaaacgtatgaagaaacaaaggttgtgatttctccatgtttgtgcaatgctggtttgtcttcttgtgaaactgtgacattgtcacagttattataactgttattataaagcttcatacctttctagtgtgatgaagaaaatgtctttttactagatcacaaaatatttccaaagagacaacttacaaaagagacatgatagtcctccttcaacaataattcttttgggagacactggctaatatcatatcttaggagataacaagggtattttcattttcagttacttgagaggagtgagtcatttgaattctcagacgtatctttatggcttatcaataagtatgacagaggtgaactcctttcctaaaagacaagagaaagtaatttcttccctttcaaattcctatgatgacagtttaacttaagagtgcttactgccctgggatttaacccagggctttacgtgtgccagacaaatgctctgccgctgagttgcaccctagcactggtcttttcttttccatttaagatttggagtttgctctcttcttcttccctgggatattatttctaggaatatgtataaggaacattgaagagtaaattctctttgcaaaatgagatccatctagcttacccatctgaagagacagaacaactcaggttttccttctacacacccatgacacagatcatcccccatgatcccaaaatgtgtgaggacttctccccgccagcaagccagcaagcagctgtgtgacaaatacaagatgagcgttttctactatacctcagttctgacttttttttcctccctaaggctgagaggctcagatgccaggaaaaaatacaggccttcaaaatttctgattatcagacttacatttggagctctcataacctcttcctaggtttgactaatttgctttaaaagacccatagagcccagggaaacattaatattactatgcctactagtttcctatgaatatttaaagccaaacagataagcaggtagacaaagagatgcacgagcctggatgggaggtgtctctggtctccagggcaggagcctctgtgccttgcagttgggtgcatgagttctctcagacttctgcaagcctccacacgttcagtccagacgttcccgaagcctgcccttctgggttctcatgggagtctgttgcgtaagcatgactgaagcatggactgaagtcatggcatgtagaagtgtgactggacaggcatggtctactgctaacagacagaggggggaacccagcaaagcctgtctgttcagattcctcttggtgtctctgggcggcactcttttctcccaggtgtatgacaacatccttccaaaatgggggtctaagggtctgctatgagacagggaatgtaagagtatgtccctacggccagctctaggactgaaaagcagggaaagactagagatcgtttctaatttgtatggctggcctttgggaggaaaggaacaggcgaatgaaagctacgaggtcagaaagaatggttttgctgaagcctgcaacttagtcccagggaaccacaccagcatgacaagggactggctttctcctttatccctctcatgtcatttcaaagttgccttagaaccaaaatcaaaagggcaaataccaggattataagagttactaaccaggaatgaggaaaaaccccagatgtatttcatatcacaggccacagttctgggaatccacttactgctttctcccaaagcaaccaggatgagttgtattgagggctgtacatgatggagatgggaatcttaggggctgtgtgagtaactgcagatggccctcccagatgtgggatgcaaagacagggtgggactgtgtggactgatccagtacagctacaggaaacagactatctcagggtctctgggtacaggtcttaggtgcccccatcttcatgacagtgacttgctctgcctgtcttctgtgccctctgctgcacaggtccgtctctccctcccaacatcactttgttcattaatttgtccctcttttgccttctgaagtctttactccctgatgttttagctttaactccccacggtgtgattgatttttaacttccaattgtcaattcaagatcttaaaaggtgcaagtatagagtcacctcttaagttttgctgccccaggtcatatggtcacatggtcccatgggaatctggttcagcctctgacactgtaaagaccctgaattacctcttaggcacactaagttttagactgtaatatgtttaacacactgttgaagcaaaacttactgccttttgtttgtttggttgtttcatgcagtagttcactttgctgcccctgctgacctggtactcacagtggctctgagttctggtggttctcctgcccctccccctcctgctgaggttagaagtgtgtgccaccatgcctggctttcccacagttttcaaaataaaattctttcttttcattaaaaaagtcacatcattttcttgtttccaggcaactttaatggaaatatattttagatacccctcttcttgaagttcctgggatatagtaccatagggaaatgctcaactggccttctcagagaccctctgtcaggatggtaaaaccattttaatagtcttaacttctccccacagacactggggactgggtgagatgagcaggaagggcctgaaatacgatgacttctatatagtgggttgaaagcatttcccctttaaaacagaatgttcttttaggcttcctcccctctgccgttttgctactaaaatacaaatggttctgtgtagcagttaacttattatcagactcttattattagaaactaatgtgtacaagttgtggtgcaaagtagatgcaaacagcaatgtgttctttggtttgattttgacttagaggaaggcacatgctgactgtgtattggctggtgactgtagaagaggaagtgaagtctggcagcatactatgtcctgtcttcctgaaggaagaaaacaaacgtctttaaagtatacttagacttcattgtctctctggtcagtccatccacacagtctgaatttagcattagacagatgctccgatgttatacccttgacctcatccctgctccccaattctccagttgggttggttgagcattagtatttttggaaagcatcctaagtgattctagtgaggagagagagaccagagggagaatattatctttctcactcttatacttgtactcagggtacaatgtgccgtactgaacccagtgccctcagacgctgattgtgctggcccacttctcttaagtttcccagacatatcaggagtttcctcctctgactttttctcctgattcaaattcctcccattgtttttcaggacccagcccagctgatacctcctgcacaagcctccctcctccctcatcatctttcactgaagggcttgctcctcttctgctagaagcaatgaattgattgtgtcatctcatttaccatcggctcttcatgattgttattcagctatctgtgctgtaggtttctaacattcagttgtgtgtgatgtatcaagtgcctggacagttcaagaagctaagatctcctcccacttcccatccttctttccgtaggttcctttaatcagggcatcagtgaccagcatgaccaatgggcagtaaaactgatggaatgagtgtcttatacattgtcttgttcatctagttgatgacctagctgagtctttggatttcttcctctctctgacctttcacccccactccccaggccttgatgatgaggtcattctcaggaggaggatcttcctgtctctgtgccttgggcaggctcaccacagtctatctgtcccagggtcacagaaataatcatgtcagttctctgccagagacagggttggtctgtgaagattcctgtcacaatagacacaactgtttctaaattaatgtggggggggaggaacagaggagagataggatttcctctgtgtagccccagttctgctgaaactcactctgtagattaggctggccttgaactcaaagacctgcctatctctacctcccaagtgctggggttaaacacgtgtgccaccacgcttggcctgaattcttaccttcaaagcaacattatattggccacattgagcggcacaggggagtggactcctggaagcagaggcaggaagccagctcaaggctacacagtgaaaccatgtttcctaaaagcctcaaacaaatacctccacccacacttaacataaaccctaggttattaaaattatattaaaaccagagctcctgggctggcatcatggcttactgctttaagacacttgccataaggggctgaccacctgagtttgatctctggaactcatatagagagggaaggagagaaacaattctataccacagcacatacacacctatgcacatgtatcacacacacatgcacacacacacatacacacacatgcacacacacatacacacatatacacatacacacacatgcacacacacatacacacatacacacacatacacacacacacacacacacacacacacaccccaataaattttttaagatgtagaagttaggtctagttcttcttcccagccccatcctcccagaaataagactcagacacaaaatatatttacaaataccttgtccatatagttaggctcttctctggctagatgtaacttaaattaacccatttacttgaatgtacattctgccacatggctggttacctgtgctcaggtgccaggcatccatctcaccacatattcgcaggtgaatctcccctttctgaaaaaaaaaaaaatccattttttttttcctgaagcctctgctcctggaatgtcaactctgagattaattacttattataaaatgccttggccatatgctttggcttgttctctaacgagctcataactcatttaacccattcacaccatcctatgttatctgcatgactagttacctctccttcaggccagacctgcttcttccttagcatcttcctcagcggttcccttgaatctcttctttatacctctcctgtttcccagaatcctctttcatcttgctagtgccccacctcctatttcctgcctcaactcattggctatagacattttttattgacagatgatgcttagaagagattctctacaaaaagaaaccaaaacccaaaccataccctatcccaagtgctcaatacccagatttagtgagttgttgccattttggacaatgccatagagaccactcccagcattgcaggccccactgtgaatggtgctggtgtaagcatcttttatcatgcctatagctagttttgctgtaagctggtgtgtgacctttcacccttcgccacactcgttcttgtgcttcctggccactttgtgacttagggcatgctgctctctttctgaaatggcccttgacttaaaacatttggtttttttggtactaaatattgaacttggggcttagcacataccagccggtgctctacagctgaactttaccctctgccctttgtaaaaataattttgatgggctcttaccaagttgcccaggctagcctcaaacatgtgctggtagctgggagtagaggcttgccctttcatctcagatgtacccatcttttcagatagactcagacatcttccctgtggaactcttcatttttcttgccttgtgttctttttgcccattgggcatggttgtgttggatttaacaccatcatcttgtttttgcaatgtgcttaatgaagcctaacaacatggcctggttgacttcatgtatgtatatacatatgtatatacaatgttcaatatatatatatgtatatgtgtatgtgtatatgtatataatatgtgcttattatttctttggtatgttttaaaaacttgcttagtgttttgggagacattttgtcatctctagcattaacttagaatgacttcctttcttccaggttgaaatttgccttcttcctctctttctttctttctttctttctttctttctttctttctttctttctttctttctttctttctttctttctttctttctttccttccttccttcctcccttccttccttccttccttccttccctctctctctctctctctctctctctctctctttctttctaattcaaccagatttgagttgagagggttgtaatagggggagctcggagcatatgctgtattggctatatatatatatatatatatatatataaaacgttatctgtaggataagtaggtgtggaagacgaaaaatggcttatggaaaaaagtagagaaatatacttaatttttttctaaagaaaaatatttatttatttaatgtgtatatatgtatggctgagtgtgtatgtatgtatgtgtaccatatgtgtgcagataccttcgaggccagaagtgtcagatctgctgtactagagtcctgatgtgggtgctgggaactgaaccccattcatctggaagatcagcaagtgctcttaagctctgagccaactctccatcctcccttttactattaaaattcttttaatttatgtgtgtgtgtgtgtgttaggtgcatgtgtacctggatgagggcagaggccagaagagggctactgatcccctgagactgaagttatagaggttgtgagcttccacatgggtgcaaaagcagtaatattttttttaactcttcagttgtcttttagacaccatatttgaaattttcaaggctaaagtcaaaagcaatgaacataagaaaaggtagtattttaattgctatttccgaaatcacacagacacagacagacagacagacagacagacagacagacagacacacacacacacacacagacacacacacacacacacacacacacacacacacacacaccccacacacaccccccagaatccggtcaaattttgatatacttttgggaaatgattcgagtaattgaatatcagcttgctgtccttttctgattacgttttaaagcatctggtaagacttaaggtctaaagggctcagagagatcctgagaccttcatggaacttcttagttgtcaccactaaccacacagtcaatcgtctcccctgggcgttcccggaccacgcccatcgcgcagaccacgcccactcaaatcgccccccccccatcaatagtttcagattctcattggtggagaagttgttctgggcccaccctgggggtcagtgataggctgatccagtgtgggacggtggtggttggctgcttggggacgggtctctggtggtgcctgtcagagaggctggcggcagtggcggctgtccgggctgggttgtcagtcagagagaggagggaagatggctcgcccggactcgtgctgctagaaggagaggggcaggtggcgcggctgccggcggagcgcagtcgcccggtcgccgtggtcgccgtggtcgccgtggtcgtggggggaggccgcggtaggtccggagctgctctggtgagtctgccgcgagccgtacgccggcccctgaggcgccgggagaccgagaaactttctttggtctgggaggagcggggctgaagctgttgccggcggcgggtaggacttcgtcctggggcggcggcccgttgcgggtaacggctcccgcgcgaggcgcggcccgagaaccctaagttggccgcggccggctgcccgctgtgaacgaggctccgttcccggttgggcgatgagctgggggcgccccagggtcggcctagcacagagcccaccgtagcctatggccgctgcccacccgtccgcgccgcccaaagcctggcctcgccgcccacgctggctccgcagacccggtgctcttcagagcggtgctcgctcgggtcttgaatcccgtggggctgggggttcggagtgccagcccggtctgtctgtccaccaccaggagagctcctcttctgcctgcgccgcgctggaccctggagttctgcctcttctgcggctgctgtgaccgccctcgaggatcgacagggctttctgtccactgaacggttttttgtttttttttttgtaagcttctttcttttttctttcttttcttcctttcgttcttttttccttccttgccccccccctccccgcacgaaaacaccccaggtttgcaagcttcagcaaaactgggtctctgccctgcagcgtgcatgtgtttgctttgtacctttagagtttagaggttcctgaagaatttggccctagtggttttgcactgcactgaatcgcttctgggataaaacgctattgcacgcgggcagcggctccactgctcaggtagggggagtgctgctgcgatacagagactgctactggttgcatgcagggtaacactggctttctgtacactgggtgtcctttgggtaacaaggtaggttttgcaggagatgtgccagccctgtggttcatgccacgcgttgcagtttgaggttttcagttgttacaacttttatctacataaagccacaaagattagggtaaccttgaaacaatgcgatagttctgggaggtgtgttttcctaggactgctctgttgccaatggcaccagcctcctccccccaacccccacccccgatcgtttgtgaccacttttcccctttaggtgaatacattttaaggtttataagatgactctttgtatcacgtttttgaagtacactgaaggacaagaaaggggaaaggtttctttgtcaggagtggtatcaaaatcaagtattcagataatttcactttagtagtaagggggaagcccagcatgtatttagaaaccagactctacaattgactcattttacagtcatttgatttattaacattatttccagaaacaaattagaaatcccgttaataatcagtagctacagtctctgggtatgcatgccaggtggagactgggttgggtcaatgcagacagagttctgtctttcctttcatcaggcttggtggcaagagcttttaccaccagagccatactgaaggaccctgctttcctttttctacttttttgtttgtttttattcttctattttataaaatcccctttggttacatttttaaagaatggtgtaattttgacaataagtttaagtatatcttctagttcacttttattcagcatcctgttgcctatttgtaatcaagcctaagaaatcttcataggtgacttttaagagtgtagctccaaaaccagtcataagattacttatggcaataaagtagagatgtgtgagtgagacttttcaagaaaatggaaggaaagaaaggagaaaatgctggctatggaatagcatttctctgtcttggccacatatagtattttgcagaacttaaaatttttactctcagaaggaaccttccccaccctgtttccagcaagggcaggataggacctagacaacagcatttaattaaacaagaactctctgaagtataatacatacatatttcaattgtgacacttaatatttaatatgttaatatttataaaatcattgccacaattaaaataacaaacccacatatcacctcctaagattgtttgtatcctttgtttccttctgattcttagggaacactttctgttggtattggatactttcctgtaaagtttacgtttttaaacatattgttgatttcctagatatttttaatgtgtgaacatggttgaaaaaccacttgaggggcaggagaactggctctgtaattaagagcacttgttcttgcagaggactctggtttggttcctagtacccacatggttgctattcacaaccattcttagctccagttccagattagatgccttcttctgaccttcagaggcaccaggcactcgtgtttttcacacacatttgcagaaaaaaacactcagacatgtaaagtaagtcttttataagaagccccccacagtagagcataggtcgaaagaatttcatgtttgtgcatgcatgaataaagagcagcgtcaaggcaaaacctctgccggtgggtatgaggtgattaatcctagttagtccttggggagccggagacaacggtgatcagtaagaaatacatttctgaaggcaacatctctaataagaaacaagataatgacgactgtatttctttgttttaattgtcagttatcagtagtaccaagattggtttcctaaagtgccctttaaaggtccacaaaaaagtgaagagagcatcctagtattgtgagaacagaggttcttcagaagaagacctgtggtatcactgtggaaggctttgtcaggggttttttggggggcggggttgtgttggacgggaattagcagtttgttgcttctttttgaaatgcaagtgctgctaaggcttctttttagtcctccagagttaggctgcctatctgaatggaggaaggacatttagcaattgattatgacccgggtgcttagccccagttaatgcatttcaacatatcctccacacctatggctcagaggacatcatggaagaggggatgggaagattgctaggagtcagaggacagagctggaatgtctgctatacaagtgtcttccatatatgatggaaatcacgtgtgcaccaggaaatcgcaacaatatggtttcctaaaccagaccaaaacataactgtaccaagtgacatgtcaagtgtggatgggggaattctcatgaggtttcttccatgaaggaagagctacaggcattagtcggtgtttgtgagaggaggaatctgttttctccaagaatgaaccctgtggtaggctagacaatcccaagacgacaatccgtggtgcacaagaaacctttagggctacatagtcagacgttcaaaaactttacttaagatctgtttttaaaatgctcttttgtctttttttttgaggtgtgatattaaatctgatcacatgccctcagaatgttgagatgagcatgtgtcgctgttttaacctgttgatgggtggttgtagacgtctccagtagactctggtgctgttctggagataaagtttcttgatagtcgcctgtttctgacatgtatgaggatgatctcatagtgcaccattctcccggcccataagctttgtagtgcattgttttctgaatacagagagagtctgagcaaaggacatgaggagcttttccttctgcccttggcaggttgaaaatagttgagctgtataaatgtgtttgtggagatctcaaattgggcttaagtcttttctaagtactttaaatttaattgtaaactctatgaaatagggattatcattcctattttacagttaaaataggactcagatgttaagtctcagctaaagttaagtgtagggagttgaaagacaatttttgtctaaaatcacagcttctgttgtctgtgcattgcatatgtccccccaaccccccataggctcgatgtcagcaccagtaggcttctttagtcattctctatgttactttttgagtcagggtctcttgctgaatctgctgctagtccattagggtaggctagcaaagccctcgagattctcctgtctccacctccagcactgagatcgcaggcatgccagtctttacttgagtatgctggagacgagctcagatcctcatcctagttcatatagtaagcacgtgacccactgagccatccatctgcccagtccttgcactttacatcagttccctagcatgtttctgactagataccttttgcttttcttattattgaaaaataaacatgatcacgtacgtgaaacctttattggttctcttctttgtataattatattttttgtacccccatcataattatttcctcgtctctttctgtgtcgatattggtctcttctgctcctcttaatgagtattgcctaatacagtgatagtagtnnnnnnnnnnnnnnnnnnnntttgttgcttctttttttttttttttttaacgatttatttatttatttattgtaagtacactgtagctgtcctcagacattccagaagagggagtcagatctcgttacggatggttgtgagccaccatgtggttgctgggatttgaactcctgaccttcggaagagcagtcgggtgctcttacccactgagccatctcaccagccctgttgcttctttttgaaatgcaagtgctgctaaggcttctttttagtcctccagagttaggctgcctatctgaatggaggaaggacatttagcaattgattatggggtgcttagccccagttaatgcatttcaacatatcctccacacctatggctcagaggacatcatggaagaggggtgggaagattgctaggagtcagaggactgagctggaatgtctgctatacaagtgtcttccatatatgatggaaatcacgtgtgcaccaggaaatcgcaacaatatggtttcctaaaccagaccaaaacataactgtaccaagtgacatgtcaagtgtggatgggggaattctcatgaggtttcttccatgaaggaagggctacaggcattagtcggtgtttgtgagaggaggaatctgttttccccaaggatgaaccctgtggtaggctagacaatcccaagacgacaatctgaggtgcacaagaaacctttagggctacatagtcagactttcaaaaatttcacttaagatctgtttttaaaatgctctttctcttttgtcttttttttttttttttgaggtgagatatcaaatctgatcacatgccctcagaatgttgagatgagcatgtgtcgctgttttaacctgttgatgggtggttgtagacgtctccagtagactctggtgctgttctggagatagtttcttgatagtcgcctgtttctgacatgtatgaggatgatctcatagtgcaccattccccccgcccataagctttgcagtgcattgttttctgaatacagagagagtctgagcaaaggacatgaggagcttttccttctgcctttggcaggttggaaatagttgagctgtataaatgtgtttgtgggagatctcaaattgggccttaagtcttttctaagtactttaaatttaattgtaaactctatgaaatagggattatcattcctattttnnnnnnnnnnnnnnnnnnnnttgcatatgttcccccccccccccccataggctcgatgtcagcaccagtaggcttctttggtcattctctatgttactttttgagtcagggtctcttgctgaatctgctgctagtccattagggtaggctagcaaagcctcgagattctcctgtctccacctccagcactgagatcgcaggcatgccagtctttacttaagtatgctggagacgagctcagatcctcatcctagttcatgtagtaagcaggtgacccactgagccatccatctgcccagtccttgcactttacatcagttccctagcatgtttctgactagataccttttgcttttcttattattgaaaaataaacatgatcacgtacgtgaaaacttattgtttctcttctttgtataattatatttttgtaccccatcataattattcctcgtctcttctgtgtcaatattgtctcttctgctcctcttaatgagtattgcctaatacagtgatagtagtagatgactctgaagtgggtgaggtgagatgggaaaattaagattgatttgtatacaacatatacaatatgtttaacagtttaaaccatgtgcccagacaaaagtaaagcttaagacccggacttgttgggtcccaaaattaatttgtactcccaagtcctgtttgtatgttgttaagaaggttactgttaaagtattgtacatcagagatctatgagtttggaaaacagtgctttttcactgtggtccaaatgtctgttctcttcgagctttgtgtcaatgtagcattcagtagtaaatgttaaatttgtttggcgttttcttgaacaatgaatcttttgattacttgatgaacattattagtttctcattcttatgctaagaatttatcagtaatttgtatttgacttaataaacacagtatgtaggagttcttaaatttattctatgaaaatcttgttgagtttcagctattgaaagatttatatttatttttgtttatgtctgtgtaagggccaggcactatgatgaaagtctgtagtcagtttcagctagtctggaggctgaggtgggagctagtacctgagcctatcagaccagcctgggccacttactgaggctctgtcttaaaacaaaagcaatagaatgatggaatgtgtcggctagcaaatttaagagaagaatttaagatttaaaagtgcttaatgggcaaacagttatgaactttttaaactcctgactttgaaatataactgaagagtttagagtgttgattctgacagtatccacgcccatttccccatctgctgtaggaagttcccactcagacttctctgagcctgctgcatgtgctgcttatccttctgtcctggatgtcagagttcacagtgatctgtaagctgctgggtgctgcagacagagtgctaggcagagtgacggcattgtcctgagagtgcacatagacttagatgaggggagaccattctgggggattctgaagcatgaggttggccttgctaagggaatggaggggaaggtgacagtggtttagaaatgggtggagcaagaagcagaacctaaaacatgcaagtccaggagaggtatagctggactggtttacagtctgcaatcctaccaacaatggaggagtgttcctcttttctccacatcctcgacagcatctgctgagtttttgatcttagccattctgactgatatgaggtggaatctcagggttgttttgatttgcatttccctaatgggcatatacccaaaagatgctccaacttataacaaggacacatgctccactatgttcttagcagccttatttataatagccagaagctggaaagaacccagatgtccttcaacagaggaatggatacagaaaatgtggtacatttacacaatggagtactactcagttattaaaaagaatggattcatgaagttcttaggcaaatggatgtatctggagaatatcatcctgagtgaggtaacccagtcacaaaataacacacatgagatgcactcactgataagtggatattagcccaaaagcttggaatacccaaaatacaattcacagaccacatgaagctcaagaaggaagaccaaagtgtggatacttcggtctttcttagtatggagaacaaaatacccatggaaggagatacagagacaaactgtggagcaaagannnnnnnnnnnnnnnnnnnnaaaaaaaaagaaaacaaacaaaaaaagtgcttgctgataggaacttgatatagctgtctcctgagaggctttgccagagcctgacaaaaacagaggcagatgctcacagccaaccattggactgagcatgaggtccacaatggaagagttagagaaaggactgaaggagctgaaggggtttgcagccccataggaggaacaaccatatcaaccaatcagacccccccccccgcccccagagctcccgctcccaggaactaaaccatcaaccaaagaggatacatggagagacccatggctccagctgcagttgtaacagaggatggccttgtgggataccactgggaggggaagcccttggtcctgtgaaggcttgatgcctcagtgtaggggaatgccaggctggagaagtaggagtgggtgggtgggtggggggggagcaccttcatagaagcagggagagggaggatggggtagaggttgtcagaggggaaaccaggaaaggggataacatttgtaatgtaaatttaaaaaaaaatctaataaacaaaacaaaacatgcaagtcaaacagactacttagtcatgcataggaaacagaaaacagtcacatagatgataaaaaccagagtgttatcatctgtgaggtcaaggtagttcagcatggaaggaggagacggtgcaaagttaaagcatgaacctggaagaggagctggccgactggctacctcggaggctgtgggagtttatgctgaaaaccaaagttagctgatacagggttgattaagggagcaactgatggcaagtagctggatgcaatagatgaggctgctgcattagaatgtcggtacagagtgacttaggatggaagttgccttggaattgtaagagttggtcttctgatgctgttaaatgctggaccacattcttggttgtccaaatggttgatttcatattagttaccttatagactcatcttttcttgagcatctacagtgtgccagttcactagttaatgctaggttgagaagattttagaaaaaggatcagccaagaaagactaagaaactaagagtaaaacatgttgttttctccatgagagctataaatatgttttgcagtattaggtcactccttagaaaggtcagcagcaacatggaaataagactgagttggttgtaaaacagcaattggaacagaaattctccatgtcttcatagtatagactttccaagaattaattataatatagcctgatttattgaattggaattctaccaaccacaaattaattattggtaaaaaaaaatttgagcaggctttaattttttttaaaaaaaatcacttccttcagaaacaacagaaatgcttaaaatactttggagattaacagtccttatagaactttcaagcactttgagtggagccaacataaaaacttttgctgtaccaattttagcttcttatgcagtgataaagcaacattttgttctattaatataaaacttaatattattggagactattttttaaattattttatacttgtctattaaaccaaattgattgtcaacacagccatagtgctttgattactataactattaagacaaacatctgtattaatgagacccaccaccaagtttctgattggaaagatatgttgtctcctattttctactgacgtggtagagaatgaatctagggtaagggtctttcacgtgttaggtaggtgctgcacccctaagctacactggcaacctggatctgctgtgttttaaaattatgcttcgtttgtaggcattcatgccattaacagtgtgtccttgcattttctcattgtattgcctcattgctcaacacttttgattgaacatctgggctccactggctgacttctgtaatggttaaatcccattccaagttactaaagggcagtgactcactccaaagcttcaacccacgagttaattggaatttggatctcttgatatttccctcttgcttttgtccccagcagtgaaaactgccacttaaaatgtaaaaagcgttaagttgaaacaactgtgctttgaagactgcatttttgtatgttgttatgtttgggtaagaggaaggatgggagagatggcaaaatgattggaacatacttgctctgtgtttcctattcttaacctatataacgagcgtttacttttattgttttatttcattgctttcaccctgattgttttgacttctttcaaaagggattaaggagtactcgattttgctgttttaggtttactgtctgcactaatagactgaatcccttaagtcagctactatgtcatatcctttctgtggcaagtaggacctagtggacatttaataaatttgaataagtggatgatatttaagaattaattcaagaaaagaagagccaggcacatggcaattaaagaggggcatgatgtgaagatggctgctacctccatgtcagagagaaaagctggaggcagagtcctgtttcctggctctcagcaggaacccacctttatctcagactctagcctggagcaccttgagaatgtaaattcctgcagtctgttctactttgttactacagctctaagaaataatggagatggcttatattcttgtacacagcaacatcttaaatcccttcatttgtcacttgcttattcccaagaaccccccctagacattttatgtttcctctaggcaagatatggcagagaaactgagtagctatttgcctcctctgccagctccccagtatagtgctacagtggcaaatggctaaattttgtttgattgagtttgtttggtttgacaaagagaaggtgtttaaggagttttaagttcgcaagggcagaggagcagcaaccaacagacctggttgtgttttcaaggtagaaaaaggaagacccagtgcagtggtgtctagtatgacggtaatttgagctaattgcattactgtaattactactgcagctcagtattatctgctttattttgcctgtggtgcagccagcagaggcagcacggtgtgtcttttggctcaggcccatttctttgaagactgtgaccctctggtcaccaagcatactaagttgccacagccatgtatcaattttttgttacatactttagcttttgtcatcaggacctcccaaacctatgacatcacataagtgacagcaagacctgcgacctgcagacgggttgccaaggcaacaggcaccatattcccaacatccacttggctcacctcccaccttcacctgtatgtcattctccctataaataagaacacccctccctctctctctctctccccccctcttttctttctgccactaccttgtctctcccttccaataaaacctcttccacgtggaactgtcttgacctagtgtgctgttgagatgtaacccgccattctaacatattgttagctatatgctatgtaaagctgtgtaaaaaatttttttttactatttctttactatttttaattaagtcttattcagatagtgctgtgtctcgttagattttacagattccttgctgaaaacctggttttgcatatgtacccaggagttctttcatcatgtggaggcagtttatgagccttctgaagtgaatgtgatttactacagaatgcaatagaagtcttggtccccaagggaacgcacttgtgtttatcattcaacaaagaaggcattggtgaaggccaacagtttttgtattttagatagggtcctcttgccaagtgctgggattacaagtgtgtacttgcatgccagacacacatacacatgagcacatacacagatcaacatttgatactggtgctaagcacttgtaattagcctgccacaaaatggccatcaattgatttctttcctcacgtactcccctccctttcttagctgcctgctttgtatgctccttaagggcagacagagcagaccttatggtctttttgccaatagtgcaaagtaatggaaaagccttgcgttacactcagtaagctatcaagggcttgttgaatattaatgttacaatttgaatatatagtaatattgactctttgcagctataaacatattgcatgcatcagtccttaacacgacacccctggctgtctgtttttgcctattcatagcctctttctttgttcctactctggtgctgccggcctatagtctgcataaattgcgtgagctgggcagggattgaatgactgaactgtcagcctgagactctggtctagtaaatatatgaaaagcgttcttaatgactgtgctgctcactgtgcatccacacagcagtcatgacaatgagtgctcttcagataatggttgaagctcatttttttttcagcagtctcttaaaatctgtcagcggcctttaagatttttatgtcttcatcattagagctaaatgaagtttgtttgattgaggcaatacttgaatcaccaacatgtacaacagttatattttgtgaaagatgatacaaatattttggaaaaaatgttggcagatttctgcctaatagtatacttgaaaatgttatttatggtgttcctatgtttaatgaagtacagaattttatttctaataagagatcttctaagtggttaaatatatcaatcaatcagtctatattgccatcaagcaaggctttggaggctcacagatacagtgccatgacactgccctaacattttttccttgcacacacacacacctcatcagcatgagccccccgaggtttttctgggcacactgtaaaaagctaacgagcaaaaaagagacagagcagagagaagttgtcgcacagaggccgcagtggatgagggaagttgagagaagtagacaatgcctgtcttgtagggtgagtttgatgtgtagggcccgagatgcgatgccatctgtgatagtatgttggttcaggaagatcaatatggcagcaagtgcatgatgcactgcacagggaggagtccaggagcaggaatgctgcttgaacaactgtgcagagacaacaaagcacaggctctccgagttgctgtggagatggagagcagatggcaaatttgacaagcatcattgtgatgggtgaaatttactcctttattcagcagatatttattagatactgtatgaatttgtgctaataatatctgagcctactttcctataattactaacacaattttaagctctaaaattgttacataattttatattttatatttatatttttattttattgtggtgctggagacagaaccagggcttgtgcatgccaagcaagtggtctcctaactgagctacatcacaaacccaaaatggttacataatttgtatttgaagacgtactagttagctcagtgtgagaacacactctcaggatgtagaggcaggtaagtttgatactagcctggcccacccatagcaagttccaggccagttgaggctatatagtgagaccctgtctcaactacccaacaaagcaacaacaactggaaataaaatgttattaaaataataaaattatgaattaggtgtggtagtgctcacttgtagtcctgtaatatcagcacttggaaggctgaggcaacagaatcaccatgagctccaggccagcctgggcttcataagaccctggctcagaaaaatctgaaagaaaatccacaatagagtgaaatgacgaataactcactctgaaagaataataataacaactcactctgatagaataataataacaactcactatggtagaacctcagtgtgtctttttcctggaggcctgtgcttttagatgaaggctataggtccttcaaaaacgaaaagcaaggactggagaaacagcccagcagttgaaaacacttgctgctcttccagagaccttagtttggtttccagcatgcaaattagcagcttacagcaacctataattccaattcaggggaatgtgatgcccttttctcactctgagagcaacctccccaacacatacaggaaaaaataaaaattaaaaaggaaagcaaaacacgtttctctgaatatttaatagtttatttgattagcaaatgggaaggcagctacttaatcagttaagaagtcttctggcaagaatgaaaaagaaaagaaaaaagggaagggaagttctttcctgnnnnnnnnnnnnnnnnnnnnaaggaagaaagaaaaagaaaaagtttaagtattcatccatgaaacaagtatttatgtacctattatgtgtgagccagtaacaaggccatcttttaacttaaattttaaaaatatgactaggtaagtataagaaaatagtggcctttgtttttctttttaaagacttcaaggttttactgattctaatcctaatatgaactttttctatgaagcattggttgctaaggaaagttataaaattttaggtttccttgatagaagtatagaatcctgttagatttttcctggttactatatttacacaaatactagatatgtttaccattcctgtactttaaaggactcttcgaaacaaacttttatttacccaagtctttgccttggtctcaagttttggatcatggttgaacctctatctgttccagggagctagtctctgagatggcaaggagttgtattcaggcccaatataaggaaattagagtttagaattaggaaattgagacacatagctttgatgtggaagtgcttgtagacacaatgatagaataacactttagttaggaagccagtgagaaaatagcacagcaaatataacacagcaaacaacatggactaacagaagacaaggaaaagtatttacatttgaaaattacctgtatactcatcttttaagatagtatgagttgagatatggattttatagtctttcacatatatctttttctgaaacactaagatgttaaaaattgacaatgtctagacaatgtgatgaatttttacatttcacattttatgcaactcattttaatgatgcacatagaatatgaagatactaagaaccttctcatttatttcctgttttcttatgagttatacttagtcaatactagacagatgataaatctctcactgtattgtaagagaactttttctttaaattgctgtttaaactaattcttcttcttctcctcttcctccttcttcttcttcttcttcttcttcttcttcttctttttnnnnnnnnnnnnnnnnnnnngaaggaaggaagaaaagaaaggaaggaagaaagcaaaaagaaaaagtttaagtattcatcccattaaccaagtatttatgtacctattatgtgtgagccagtaacaaggccatcttttaacttaaattttaaaaatatgactaggtaagtataagaaaatagtggcctttgtttttctttttaaagacttcaaaggttttactgattctaatcctaatatgaactttttcctatgaagcattggttgctaaggaaagttataaaattttaggtttccttgatagaagtatagaatcctgttagatttttcctggttactgtatttacacaaatactagatatgtttaccattcctgtactttaaaggactcttcgaaacaaacttttatttacccaagtctttgccttggtctcaacttttggatcatggttgaacatctatctgttccagggagctagtctctgagatggcaaggagttgtattcaggcccaatataaggaaattagagtttagaattaggaaattgagacacatagctttgatgtggaagtgcttgtagacacaatgatagaataacactttagttaggaagccagtgagaaaataacacagcaaatataacacagcaaacaacatggactaacagaagacaagagcacgactggcctcttaacttttacctccagtttcatcaagaggactgtgccacacttctgtttcttggatgtctgtcagattctttgcagatgttctctctgagtgagcatctacgcagcctttatggaactaactcattttcttgaccaatttctttgtaagagtcgcacagatgttgaaatgagcacttcttgttgctatgagcctagcacatgcctcggggtttagcatttgttctaaaaagcattctaggcctgggagtaagcttagatgctagagtatctgcacaacatgcagaattctaggtctgtacagaaccagaagaaacctggcatggtggtgtacttctgcagtcatagtgcttgggaggtggagacaggaggttccttctcagccacatggggagtttgatggcagcttgggctacatggaactcttgtctcaacaacaaaaccctaagcatctgcttcatactgtgaggttgatggtttgtggtttcctggtggcagaaaaccatatttggggcgggggtagttttattatatagtttcccaatctgttgagattatctcctcttcactttttgaaagagtttttaagtctcagaattcagacttttaattaaaaagtattatgtaaaattgtgctctgggttctgttatcagaataaaagaaatattttcccaagggaaagtatttacatttgaaaattacctgtatactcatcttttaagatagtatgagttgagatatggattttatagtctttcacatatatctttttctgaaacactaagatgttaaaaattgacaatgtctagacaatgtgatgaatttttacatttcacattttatgcaactcattttaatgatgcacatagaatatgaagatactaagaannnnnnnnnnnnnnnnnnnncctaataaaccttcataattgtaattgtacttccaacttacttgctttctattgtccctcattagagctcagtgaaaacctggcttccattgatgccaccccattgtcattgttctattgtatgctcttgggccatcaccatcgtcaacttcagggaactagtcctttcagtaaatgctttcctcttgacattttccctattttctcatttagagatttctattttattgctatctggatctctcatcagcacaaaaccctatttaatttctatattaacaatactatgatatggatttttgtttgtttgttttgttttttgagacagggtttctctgtgtagtcctggctgtcgtggaactctatagaacaggctggcctcgaactcataaatccacctgcctctgcctctgaagtgctgggattaaaggcatgctccatcatgcccggcttgataaggatttttttttttaaattctttttttttttagatttatttattgattataggtaagtacactgtagctgtcttcagacactccagaagagggagtcagatctctttacggatggttgtgagccaccatgtggttgctgggatttgaactctggaccttcggaagagcagtcgggtgctcttacccactgagccatctcaccagcccttgataaggatttttaacatgagtatttatttagtttgatacctccttcccttggactacacctagtttgggtaaatcatttactgctattacactagcacttatttttagatgattttctgtgtctctaattataatctctactttttctttagtatgaaattcctgtgctggtgatagggctcagtatggtaaaacacttgccattaagcccagtgacctgagttagatctcctgaactcacatggtagaaggagagaactgactctagcaagttgttttgtgactgtcacatacatatattgcaggcatatgcgtgtgagtgcacatgtgtgcaacacttccttttttgaggatgactcttattgcttgcaatggtgtcacctatcttgggatggttagttaatgaagtgagaatggggctgggaatatgattcatttggaagactgatttctgagcatacatgaagctctgggcttgttccccagcacagcataaaccagatgtagttgcttgagcccataatcccaccatctgggaggtagagacaggaagaccagatggaggccagcctgaaaacagaatccatgcccaaaactagtaaaaaaaaaaaaaaaaaaaaaaaaagaagaagaaagaaagaaagaaaggaaggaaggaagaaagaaaaagaaaaagtttaagtattcatccatgaaacaagtatttatgtacctattatgtgtgagccagtaacaaggccatcttttaacttaaattttaaaaatatgactaggtaagtataagaaaatagtggcctttgtttttctttttaaagacttcaaggttttactgattctaatcctaatatgaactttttctatgaagcattggttgctaagggaaagttataaaattttaggtttccttgatagaagtatagaatcctgttagatttttcctggttactatatttacacaaatactagatatgtttaccnnnnnnnnnnnnnnnnnnnntatttggggcgggggtagttttattatatagtttcccaatctgttgagattatctcctcttcactttttgaaagagtttttaagtctcagaattcagacttttaattaaaaagtattatgtaaaattgtgctctgggttctgttatcagaataaaagaaatattttcccaagggaaagtatttacatttgaaaattacctgtatactcatcttttaagatagtatgagttgagatatggattttatagtctttcacatatatctttttctgaaacactaagatgttaaaaattgacaatgtctagacaatgtgatgaatttttacatttcacattttatgcaactcattttaatgatgcacatagaatatgaagatactaagaaccttctcatttatttcctgttttcttatgagttatacttagtcaatactaaacagatgataaatctctcactgtatcgtaagagaactttttctttaaattgctgtttaaactaattcttcttcttcttcttcttcttcttcttcttcttcttcttcttcttcttcttcttttcttcttctcctcctccttctccttctcttcctcctcctccttcttctcccccccccctctctctctgtgtgtctctgtgtgacaaatgcatgggtacccatggagggcagaagagagtgttagctcccctgggagctggagttacaggcagttgtgagccatctcacatgggtgctgggaactgaacttagggtcacctggaaggcaagtgctcttaactgctgagccatctctagccttctaatgccccccccttttttttttttaccaaatatcacagtaataatgattgttaattactctgaaccctgaattccatattgtagtgacctttgaaaagtctgttttggggctcctgtacagagatggtatgctctaaatgttaaaagctcgtgttttagctgggcatggtgtcagacagcatttgggaggcagggactgaaggtttggcaatttgaggccagcctgagctgcatagcaagacaggagagaggagtgggggtcctagctgggagggtagagccaccgagagggagagtgatttctctatctgttggtccctgtcaaaccaccatcaagtttattggcttagcccagcaggacttctgtgtaggcttcacagggcgaggacatctacgattggtggaagtctcaaggctgcagctgtgcaggggctccagttctacccacacagccttcatggcagtttgggcttcattaactgtgctacctgagttgcagcaggaggaggtacaagtgcagggcttctagtaccacgttcactgtgttggcttggtcaaagtagctacaggactagttcagatatcaacatggttgttgaaaaatacttctttctaatttctcatttagagttcatatcagatattttcttcctggacaaggtatttttctgaagttctggaggatttgaaaagaataggggatggaaatgagaggcaggatcgccatctctccttctattgtcctgtctttcccaacaggcacccttagggctggttgccatagcaagctgttccaacatgttcttatttgtccttggattaggcaaatgttttattcaaaaatatttccttgagttaaaaaaaaatgctcaaatttcagtaaccagataggtgatttgtgacttacagggaaaccaggcttacacaatggatgctgagagaatgcccctgcctttccttaggtgttgaacagttcctttatgggcagctagcctcatggcatcctctgcttctttatacattttattcagactctgacctgtaatatccagagctggaatcagttttgttctgtgacataatttgaacagttacctctactctgttttcccgaatttcaccttgtaactgtgagaacattctgacagcacttaattagctgtcacaattggcccttctaacaggagagacggttcaaatgtaatgatgtggggctggtaaggtggctcagtgggtaaatgtgctccaagcctgacacccttagctcaatccctggaacccacaaggccggtagagagaactaactcctacaagttgtccactcaccttcacatgtacccatgccccaataaatgaataaatttaaaaattcattatctatcactgtccatgaattgattgtcaaaataataagatgattataaataaagattttgtttcactttgtaatgaacacctgatgatgttatatatgagggttataggaaactagagtaggaataaagaaaatattagctttatagttcaggatgtttttgtattcttcagatggatgaactagtctacttccatcctaggcttgaaaggcattttatagtaaaaagaaagtagattcatttctgtttatgattaaatctttgcttctcaaggtttgagctatgtatgccccacctataaccttagctacaaatggttctgtagtgcctgttgcaggaaacagcaacaatggttctgtagtgcctgtcccaggaaatgacaaccacgtcttagtttcaaaaagttgttatgactaccttgttagaactacttggttgtgctgtcctgtaaccccacctccccaattccccatttagaccttctctagcccttggatgaacatcttacacatgttcaatgcttgaaggcagggggaggcagcctgtgcacactatttttttttaaagcttgctttaattaattccttgctacagttaatttggccatgatgatttggttagtctccttatatctttgggattagcaaaaacaattacaatgtagtatgtcttttggagattaaatgatgaattttggtcatagagtgagaatacagtacaatgatatatttgggaatattttattttgttagaaatatagcaattaatttcatacactacacttgttaaatgctacttagaatcttactgaactgtctaatataatcttaactgctgtgctccagaacatatttgagaaaaataggaaattagttacccagcagggaatttgtattttaattttgttcctttcacctttgaaaagaatgaaacatttaaaaaaatgtaagagtatatttttgaatacttcttgctataaccagttttgtgggaagccaacagttatataatgaaggctttgctgtggtgtcactaggttccatagtcagtagacatgcaggggtggatggagtagcgactgtgcaaagtctcttgctgctggtggtagacagaaagtctctaagccattgttttattctgtggtcactttccatttttccctacctagtctttagtgatgcttttaattgtaactatggttcatcttggagcctgggcctggtggaaaacattgtttaaaacaatgagataatgttatgctgcagacccttttggtcccttgtctgtgtggtggttctggtcacaggtgggcaaggagtcggtgggaattgacagactccacacgagagagtgtggatctgaatgtaatttgtcaaatcgagcatcaaactttttatacagaagaaaatagggaagtttggtgacacacctgcacctgcaaggtacaaagaggttactggattcttaaacaaaacagaggaatacagacatggaagatctggcaggaaccaactgggataaaactcaatgttaacagctgggatcaaaaacagctccacctaaggtccacttgatcttagaagccaggagcaagggcttcatgcccttgccatagttcctactctagtctattgtatagttcaccttcccccttaaatacttgtgtatgggtgtaactcagctatctatagttctaagtatctactctggttcctctttaggtcataaacttccttcttcctagataatggtaaatttgtgtagggcagtgacttagctatccatgcccaaggtcagatcaaggactgcctagaatctaacttagctatatgtcaaaatatcaatccttaggagcacttgtaataaagcaatattaagggaaagcacacagatccatcgactaactaaagcaaggacattggagcattctttatacaggatgccacgattccaggagactaagtttccatgaacttttcgcctagggacagcgcccaggttttcggggcctgtcgcacttgtcactactagagtggatgtagcaatgctataaatgtggggtagggacaagaaaaagcttcagtcagccagccaatactggtgacttttctttttctgtttctttatctatcctcttctttatagaattacattagactttttcctataaaatatattaattattcaggtctcatttttagtattaatatatctttcttcttatgaatttttttttaatgagagaagagtttctctgtgtagccctggctcttctggaacttgctctgtagaccaggctgtccttaaactcagagatctgcctgcctcccaaaagctgggattaaaggtatgcgccaccattatgatggaaaaatttttaaaagatcactttgatacaactaggaagaagtcaaagtatctctatttgcagatatggttttatacataaaatacccttaaaaaagaagtccaccgcttcctgttctccaccatggcgcaagatcaaggggaaaaggagaaccccatgcgggaactgcgcatccgcaagctctgcctcaatatctgcgtcggggagagcggagacagactgacccgggcagccaaggtgttggagcagctcacaggccagaccccggtgttctccaaagctagatacactgtcaggttctttggcatccggagaaatgagaagattgctgttcactgcacagttggtggagccaaggcagaggaaattctggagaaaggcctgaaggtgcgggagtatgagttgcggaaaaataacttctcggatactggaaactttggttttggaattcaagaacacattaacctgggcatcaaatataacccaagctttgggatctacatcctggacgtctatgtggtgctgggtaggccagggttcagcatcgcagacaagaagcgcagagcaggctgcattggggcctcagaatcagcaaagaggaggccatgagctggctccagcgggagtatgatgggatcatccttcctgaaaaataaactttatccaaaaaagccaataaaattttctcaggaaaaaaagaaatccaccaggaaaattctacagctgataaacattttcagcaaaggagcaggatacaaaattaatacacaaaagtctctagttttctcatatgcaaatgtcaaacagaacagactgagaaaaagccagatacctttcacaatagcctgaaaaaaaatatcatggggtaaccaaccaagttaaagacttgtagaataaaaacttttaagacattaaagaaagaaaagaagaaagaaagattaaagaaagaaatgaaggcattaggagatggaaagatcccttatggttcatggattggcaggattaatacagtgaaaatgggcatctagtcaaaaacagtctgcagtgttagtaaaggccatccaaattccaacacaattcttcctagagatggaaaggacagttgtgtctaggtagccaacgtagttaaaagcccctgaatgataaaagagctgctggagggatcaccattcttcatctcaaattgtattacagaactaactatagtattaaaaccagtgtgttattagcattaaaacagacatgttgatcaatccactcaaattgcagacccagacagaaggcctatggatacctgaatgttgacaaagatgcaaaacagacaaacaaacaaacaaactggagaaaaaccagaatcttctttgaatggtactggtacacttggatggctgcatgtagaagaatgcagataggtccatatttatcacctttcacaaacctcaactccaaatgagttaaggatcccaacgtaagacctggtaccctagatcttataggtggaaaaatggagactagtcttaaactcatcagcacggaaaagactttctgaatagcacaccaatgacataggcactaagaacaacatttaatgaataggacctcatgaagctgaagatactcagtttggcaaatggtatcatcctttaggtaaagcagcaggctacagagttggaaacaatctttgtacatccaatagagcagtggttctcaatctgtgggttgcaacccctttgggggagttgaacgacctttccacaggagtcacctatgaccgtcctgtatatcagatgtttacattatgatcgtagcaacaaaagtaatttcatgtttggggtcaccacaacctaaagaactgtattgaagggtcacagcattaggaagtttgagatacactgcaataggaatatataaaatacatataaagaattaaaaataaaaannnnnnnnnnnnnnnnnnnncgcatccgcaagctctgcctcaatatctgcgtgggggagagcggagacagactgacccgggcagccaaggtgttggagcagctcacaggccagaccccggtgttctccaaagctagatacactgtcaggtcctttggcatccggagaaatgagaagattgctgctcactgcacagttggtggagccaaggcagaggaaattctggagtaaaggcctgaaggtgcggcagtatgagttgcggaaaaataacttctcggatactggaaactttggttttggaattcaagaacacattaacctgggcatcaaatatgacccaagcattgggatctacatcctggacgtctatgtggtgctgggtaggccagggttcagcatcgcagacaagaagcgcagaacaggctgcattggggcctcagaatcagcaaagaggaggccatgcgctggctccagcaggagtatgacgggatcatccttcctggaaaataaactctatccaaaaaagccaataaaattttctcaggaaaaaaagaaatccaccaggaaaattctacagctgataaacattttcagcaaaggagcaggatacaaaattaatacacaaaagtctctagttttctcatatgcaaatgtcaaacagaacagactgagaaaaagtcagatacttttcacaatagcctgaaaaaaaatatcacggggtaaccaaccaagttaaagacttgtagaataaaaacttttaagacattaaagaaagaaaagaagaaagaaagattaaaggaagaaatgaaggcattaggagatggaaagatccctcatggttcatggattggcaggattaattaatacagtgaaaatgggcatccagtcaaaaacagtctgcagtgttagtaaaggccatccaaattccaacacaattcttcccagagatggaaaggacagttgtgtctaggtagccggtgtagttaaaagtccctgaatgataaaagagctgctggagggatcgccattcttcatctcaaattgtattacagaactaactatagtattaaaaccagtgtgttattagcattaaaacagacatgttgatcaatccactcaaattgcagacccagacagagggcctatggatacctgaatgttgacaaagatgcaaaacagacaaacaaacaaacaaactggagaaaaaccagaatcttctttgaatggtactggtacacttggatggctgcatgtagaaaaatgcagataggtccatattcatcacctttcacaaacctcaactccaaatgagttaaggatcccaacgtaagacctggtaacctagatcttataggtggaaaaatggagactagtcttaaactcatcagcacggaaaagactttctgaatagcacaccaatgacataggcactaagaacaacatttaatgaataggacctcatgaagctgaagatactcagtttggcaaatggtatcatcctttaggtaaagcagcaggctacagagttggaaacaatactttgtacatccaatagagcagtggnnnnnnnnnnnnnnnnnnnnccagacagaaggcctatggatacctgaatgttgacaaagatgcaaaacagacaaacaaacaaacaaactggagaaaaaccagaatcttctttgaatggtactggtacacttggatggctgcatgtagaagaatgcagataggtccatatttatcacctttcacaaacctcaactccaaatgagttaaggatcccaacgtaagacctggtaccctagatcttataggtggaaaaatggagactagtcttaaactcatcagcacggaaaagactttctgaatagcacaccaatgacataggcactaagaacaacatttaatgaataggacctcatgaagctgaagatactcagtttggcaaatggtatcatcctttaggtaaagcagcaggctacagagttggaaacaatctttgtacatccaatagagcagtggttctcaatctgtgggttgcaatccctttgggggagttgaacgacctttccacaggagtcacctatgaccgtcctgtatatcagatgtttatattatgatcatagcaacaaaagtaatttcatgtttggggtcaccacaacctaaagaactgtattgaagggtcacagcattaggaagtttgagatacactgcaataggaatatataaagtacatataaagaattaaaaataaaaaaaacctgggcatcaagaaaaatagtccagttttaaaaatgggccacagaactaagcagaaagttctcaagaagaaacacagatggctgaggaacacagatattgaacatccttactcattagagaactgtcattaaaactactttgagattgagtggccaaattaatgaccaaaatcaataacacaaatgacagttcatgctggtgatgatgtgggggaaggggaaatcttacttattgctggtgggagtgcaagtttgtacagtcactatagaaattagtttggtggtgttgcggtaaatctccaacccaaatatgccccggcaatgaaaacacgatacagttattatgaatacatgctgtgtgcctagattgggcagatctaccgctatactaccatcttccacatctatgagacctcttagaacttgcggtttctccaggccatgtgcttctgttcagcttttcttcgtcttcctcctcctctgcaacatctccctcttccattttcttctctctccataccttctgctccaccttctcttttatctgcccaatcatcagctgtcccttactttacaaattaaggtgggaagcaggtttataggaaatcacctgagtgctgactcttgtttacagccactcacaagagaatggaattaacatcagatataattagccccagagctatccacaacatttccccctttctgtccaattaaaagacgattttatctcagatataattgaacataactgttcttattttgtaatttataaagtacaagagacctaacacccagtccatcatctttgttattaaatagaccctctgtcatctatccttacttaaagactcctctatacctggctacgtcttgtctttagattgaatgccatctgaaaaccatcctctcaaatctgtttctctcaaagtataaagcctgggttggctaagagactatgtagtttttcaaccccatcagaaatccaagaatgactgatttcaactgaaaatatataggaagcctaacacagcttccaaaatttagccaatttatagaaaccactgatcacatggacagtcccttacttcaacatgatggagcatcggtcttcagcctactggccatggtcatctgacagacatagagaaacgggaatattaaggactagcctactctgtctctgcagaatcaagctgtcctaacctgtaattgtatcctttctttggacagttattatgtctgtagatgaaaagaggcaattcttgcctagtggctgttttgccacaattggagtaactcaaagatgctcagtttcttctttgaatccaagacagggaaagctgtcaggagcagactggtctcaacaacaattgaataaatcattattaaacgtcacattctgtggacttctgatgtttttgaaaaccaattatctatgtgaagtaatctaactacactcagccatttctagttaaataactgaaaacaccctaacaataaactaagagccatgaatttcctatttggctcttaactcacaggcttaaacatctcacaactattataataacagcaatagaaggactgggtctaagccctgtacttcaaaattttcagtatcaaagacaacctataataatcacccctagccccaaagcttagggaactgggatgatgactcttcataacttcttcaagctgaatgtgggcattgagatatttttgaagggaggggaaaggttagggaaatgtgggagttagttggccttaagaaggccacaccaatgattgtattagtctctgatgtccgtgtcctgactggatacagatgaaaaaccaagacatcaagagttcaggcaggtcagttcagtatgtctgacggtgaaattcaccaaggctgtatattctgtaacatataaatctcaaaacaaaattttagtatcatcaagataaactttgtttgattctctggaatctaattcaggggatctccctctatcagatctgatccatagaactctggaaggtgtaaataccttaatcaccttgtccaaaaacactaagacaaaaccttttccccaaatcacatatccttcagccgaaaccaggaaaacctgtggcttgccctctgtcccagaggaacaataataccacaatactcaaaatcacacacattttagcctatttaggcctttctaatttgtcatgtcagaatttaaacccaaaatttccatggggcccacattagacagaatatgagtctcctgcatggtggttcctcaggaagctgggaatcaatctacctcaaggtccagccataccattcttgggatgtaaaggactagacacccagttctgtagatccttgctcatccattttcaccaatgctttattcacaatagctaaaaaataaaaacaatctcattttccttcaattgaaaatagataatgaaaatatggtacatacatactatggaatactattcaggtgtaaagaaaaatgaactttgcaggtaaatgggtagaactagaaaaagatgatattgaaccaggtaacctagaaagatacatgaaagataagttctctcactggaggtccctagctccaaatcttcagatgcaagttacctgtagtaagtacagaaaccaggaaagtaaaacagaaccatttgcagattagagaggctggggaacaacagagggaatggcagggattcaagtcatccgatcagggaaataggaaaggagggctctttagcaagagggaagggaagaggataaaaatgatccgaaaggacgctctttatggagggggaagtaatataaaaggaaggtgaaataacaataaggatgactgaaaaagctactcagaaacatactattaactattcatctggaaaaaatctataatacatgtaattgtgtatattaatatcatctataattttaatgaacttttcttatatgggttaatggtgctcccttcaagagtcaaagaccacctcacaaatatcaggcatgagaaacactcttttgaattgttgaccagaactgtccaagacactcctaaactattcaacctattgttattgtccttgattgtttcccagagatagaaggtaaattcttttgctgaagacaccatgtacttcagaaacagagcccagagacccttgaacttcagctgacctgaatccctcctttttctgagggctatctttcatggaaccagtaggcatcatgtaagcttctaaataatggacccaaccaacagtcttacccaaatataatgcccaggaactacatcaacaaccagcatggcaagataaccccaagggtgcagtgctgacacactaccttggcagtaaccaagtaacagtcttctacgtgttcttaagacttgctcagcaagagagaaactatgcctggtactggacacctagttaactactaagtactagtgactccacagttgttagagggaaatccacaaccactactttcttttttttttattagatattttcttcatttacatttcaaatgctatccccaaagccccctataccctccccctgccctgctccccaacccacccactcccgcttcctggccccggcatttccctgtactggggcatatgatcttcacaataccaagggcctctcctcccattgatggccgactaggccatcctctgctacatatgcaactagagactcagctcttgggggggtgtttactggttagttcatatcgttgttcctcctatagggttgcagacccctttagctccttgggtactttctctagctccttcattaggggccctgttttccatccaatagatgactgtgagcatccacttctgtatttgccaggtattggcatagactcacaagagagagctatgtcagggtcctgtcagcaaaatctttctggcatatgcaatagtgtctgggtttggtggttgtatatgagatggatccccagatggggcagtctctggatggtctttccttctgtcttagctccgaactttgtctctgtaactccttccatgggtattttgttccccattctaagaaggaacaaagtatccacactttggtcttccttcttcttgagtttcatgtgttttgcaaattgtatcttggatattctaagtttctgggctaatatccccttatcagtgagtgcatatcatgtgtgttcttttgtgattcacaaccactactttcttaaaccagcataatcaccaacaacaatctataaacatttgtctttatactcaaataaagttagtgtagtcctcacctctcatcaaggaaacttctctttctcatacatggaaatcactacagaaaaccacaacccatcagtatgcaagattgtagagcctagtcccaatggatatatctacaaaacactcccaacccaaggcttacagaacttgcagaaagggtagaaagattttaagaagaggatctggaagtttgctgtgagatggtgtctcttaataatgtcagtagctacattcatataaggcttaccaacatgactgctcagacatgatctgaaaaagaatgacatcaatggacatgccagcgtgggcaggaaaaagcccatagggcctcactgaaccttacaaagggctatagacaactgaagaaagatgggaactgcagagatgatctttcttagggaagagcacagcaattggttgtccagtgtgaaaatgtgaacccagaaaacatacatacaagtaacattatacagactaagcaggttatatttaagaatctatctatctatctatctatctatctatctatctatctatctatctatctatctatctcatctatccatccatgcattcagtaactaatgaaagaagagtccatgaatttgaagaaggaaagggatataggggagagtctggaggaaggaaagtaaaagaaattctggaattataatttcaaaatttttcaaaaagttaaaaataatcaccttgaaaggatttttttttatttttgaccatgtatacatttggtttcttcaaagctttacttaagctgcaattgacaaatacagtttgtgtatgttgtactccagaggtaaaggcagctggattatgagtttgaggccagtctagaccagaccctgtctcaaaaaaaagatgtgcatgtttattattatactatgtttctgatttttgtttgtttgtttgtttgtttgtttcctatttttgagaaaaaagtcttgctatgtaacccagacttactttaaattctctatgcaacccaggctggccttgaattttcctatctcatcctcccaagtgctggtactacagggttgaccaatatattttgacatgtccacattgtaaagtgatgaaatcaaacagattaagacttgcaccacttcacatacttgtttttgtatgtgtggtgagaacctttcatacctgctctcttgacagttttcatgtatgccgagtggaaagatggaatgcactctccttgtccagcatcctcattggtcatttccatgctactctgtttctgatcttcaggttggcttatttcttaacatagtatcctccaggcactgggttgactttgtaatataaaactattatgggttctgagtgttgtcatgcacactgtaatctcagcacttgggaaacttaggcaagagaatggctaagagtttgatgtcagtctgtgttacataatgagtttaaatccagtctgagctacatagcaagacactgtcttagaaataaacagcaagggaaaaaagcttatagaaggaagtgtcctttgggtttatggtctcagacatataggactcttatcacagtcatggtaggaaacatggcagcggccagtcaatggtgctggagcaatagctgacagctcacatctcaatccacaaacaagagtagaaagttaacttaaaatggcaggagtcttccttcctcagagccatgcctcttagttctccccaaacagccatgaactggagaccaagtgttcaaatgccagagatttatggggaacatcttattcaaactcacactggtattatcagtctttcattctagctatatttggggtgtgtgtgtgtatgtgtgtgtgtgtgagagagggggggagggagagagagggatagagagagacttccttgatgactagcaaagttgaatactcctttctcatttgttaagtttctgcctggttaagtggtggtctttttttcctattgggttttctgcttttttcttaaattggtctttattatattctgatatgggactttcagttgcgtatgtacattatgagttgagttgaaaataatttcttctactctataatgttgcctgagccttttagtggtatcttttgaggaataaataattcgtttgtttgtttgagacagggtttctctgtgtagtcctggctattctgaagtcaccctgtacaccaggctggcatcaagccttgagatctacctgcctctgcctcccaagtgctgggattaaaggcttgccaccactgctcaattagaataaaaaattgttacatttaatgatatacaatgtattcttctctcacctatgatagtcctttgtgcctttgatttaggagatctatccctattccaacattataaaggtcctttcttacttttgttgttgttgttagatctatagttcaactagaaatgggctctgcatgtaatgtgatctaggccatcatggctagctgtgactgggccttttctcccaccctccctcnnnnnnnnnnnnnnnnnnnnnnnnnnnnnnnnnnnnnnnnnnnnnnnnnnnnnnnnnnnnnnnnnnnnnnnnnnnnnnnnnnnnnnnnnnnnnnnnnnnnnnnnnnnnnnnnnnnnnnnnnnnnnnnnnnnnnnnnnnnnnnnnnnnnnnnnnnnnnnnnnnnnnnnnnnnnnnnnnnnnnnnnnnnnnnnnnnnnnnnnnnnnnnnnnnnnnnnnnnnnnnnnnnnnnnnnnnnnnnnnnnnnnnnnnnnnnnnnnnnnnnnnnnnnnnnnnnnnnnnnnnnnnnnnnnnnnnnnnnnnnnnnnnnnnnnnnnnnnnnnnnnnnnnnnnnnnnnnnnnnnnnnnnnnnnnnnnnnnnnnnnnnnnnnnnnnnnnnnnnnnnnnnnnnnnnnnnnnnnnnnnnnnnnnnnnnnnnnnnnnnnnnnnnnnnnnnnnnnnnnnnnnnnnnnnnnnnnnnnnnnnnnnnnnnnnnnnnnnnnnnnnnnnnnnnnnnnnnnnnnnnnnnnnnnnnnnnnnnnnnnnnnnnnnnnnnnnnnnnnnnnnnnnnnnnnnnnnnnnnnnnnnnnnnnnnnnnnnnnnnnnnnnnnnnnnnnnnnnnnnnnnnnnnnnnnnnnnnnnnnnnnnnnnnnnnnnnnnnnnnnnnnnnnnnnnnnnnnnnnnnnnnnnnnnnnnnnnnnnnnnnnnnnnnnnnnnnnnnnnnnnnnnnnnnnnnnnnnnnnnnnnnnnnnnnnnnnnnnnnnnnnnnnnnnnnnnnnnnnnnnnnnnnnnnnnnnnnnnnnnnnnnnnnnnnnnnnnnnnnnnnnnnnnnnnnnnnnnnnnttcattttccaggttgaaggtttgaaacaaatgtggaaagatgttcacctcagagataggagttgtggaagaatggctgtcagaatttaaggtaataacaactcttctaatacagaaattttatcctaaacaaattttgtctgggtttaaattctaatggtgtttttatattttatatgccccacatgctaaatcatctgtggggaaagaatattatactgtgtcgcagtagggagcacttattgcatagtaatcttttgtggacgattaattcctttttcccaagtgactcaaagagcttattcatctgtttattctcttccttccatgtgacattaccatggccatgaatgttgatgtcaccctagtggccatcagtgacccattgtcagaaatgaagggaagtagtggaactggacatggttgacagatagtagaaggcagcaaggtatttccttaatcttcaccaagaggtctttttctagaaggctgacctaggagctgtgagagtagagttaatctttgactcattggtgaagaaaataagattagctttgtggtctcatgaactcttctctatggtagctaaactgtcttccttaaaccagctggcttttttctcctgtcctcgtggggcacttcataatcctaaagcacagacatgaagagattgggcagcaaatgtcctgtggattttatctggactaatgagcccagacatcagggacagatttacaatccaatagcactaagtttcctggctttctgcagggaaggagatgattgcccaacaacagtgacatcaccaaacaaaggaaaagataaaatttggatagcatttggagaagaggcattttaggtgaaatttaaataaagccatattttgatagtttcataccaaagcaggactgtgtgtaatgtaatgagttttacatctagtctggacttgcaagtggactcaggatcctgctgtcttggtctgaagccttcatctgtgatggaaaccaaggcttctcctcctcggcagtgatttaaactctggacaggaggggcatgtgtcgttcttactgatacacgttcagatgacaaagtctgtgatttcagacagggattctcagtacgtaagagtacagtagtagtcactcagaggagttgttcctatactccaggtgctaagcaaccatgggagaagctgtgaatccggttaactgctggctttatctgcagcttttgtctagtcctcgtgaacaccagataggctttgttactttcttagaatctattgccaccaactgagtgtgcttctttggacttctcaattcaccacgaagcagtgtggaatgtagaaaagtacactatttgacactttttgcaaattttaatatttggattaaatataatatgtacatccctcttgtcaaatttgtaatggtcattcaagggagtttttaagcttctcctcttcttcaaaggtgtttatatgttttgcgtacattgtcatgatttcggagtgagggccagttgatggaacttttctgctttaactgttgagtaccatttttttttttttgtagaccattcttatgtcaaaggtggaaaagccaacatagccagttactgattccttaagaatcacttaaggggagtgtgcagagaagagtgttaaatactggccatgggggagggggcaatgattatgacaaatgtttaaaaccatagtgcctgtgctagttctgtttagttcactttgatacaaatgtagtcatctgagtagaggaatccttgattgagaaaatgcctccataagatcaggctgttgaatcaggcctagtggctcatgcctttaatcccagcactcaaaaagcaagaggcaggcagatctctgtgagttcaaggccagcctgatctacaaagtgggttccagaatacccagggctacataaagaaaccctgtctcaaaaaccaaaatccaacccaaaacaaaaaaaattggactgtggttcagtctatagagaattttcttaattagttattgatggggaagaacacagcccattgtgagtggtgctatctctggactgaatgccctgggttctataagaaaacaggccgagcaaaccatgtggaccaagccagtaagaagcatgcttccatggcctctgcatcagctcctgcctccatttggaagtgtaagccaaataaacctttcctccccaacttgctttgggtcgtggtgtttatcacagagataggaaaccctaagataatgcctatctgctaattctttcccattcctcctgtagtgctgagatatcaaggggatgcactagggaggacagagagggcaggctgcagtattggcagttgtgtgttctggtgtctgagggaacagagtagttgtctggttagcaagaagatgcagaggtgacttgtacaagagctagctggagaggcttcattggcagattagtgccatcgaatacataagtacatatattaaggatatgagaatttgattttgctttgtctgagaaaggcactgcaaaacctggaacggagattgtcgataagaaatcaaggagtggggttagaccagagttggaagactgggtgggaagcatgggttctaaagatgtgtcagatacgcatgtgcatgtgtacatttcttggtgctgtgcttagaggaccttgtaggtagtgcaccctctcgcatagcaatatagcaagcaccaagtcttgctttactaaatactgtcttccactaaaagaaactaagagtatgaaagcataaaggcttcatctaagtaatgctttgtcattgggatgcattgctgtggcatatcaacattttgtaaagtttaaaaatttaatataacgataaggaaacttttccaatgggagagggattgatggaatcctaggccacatgaaacaaaaagcaatggtgtaattccttcttccctcctcaaattaaattcaccaaaattccaatcagtttgtttctgtgatgctatgatgtttaaatgccttcaaatttgtattgttaccaagtcaaggagtttcctatcccttgcttaatttggtgagcattctgcagtatgttaatgtgtgttgcactcagctgttggtttgataaaaaaagcgagattatcagcagtaaaccaagtaacacaaggtacaagaatgtgtgggaacaaatattctaagtgctcttggaatgaggctgccttttcaaattattgtgatgtgagactgtgtgttttagttaaacattttaagacaggaattttgtttggatttttaattttcatgtacacgtatacatgtgaaaaaagcttcttataccttggaggtggctgtgccaccgctggctcctgggacccggtgtggattctgggctcagactctgctcctctagaaggatagcaagtactcttaactgtgggctgtctctcaagcgcccactctccttttgtgttttgtttattttttaaagacaatcccatttttggccctttggggtttttgttgtttgtttgtttgagtagcacatctttggcaacatcattgtaactgactgagtgggcagagagtcagcaacaggtcatgggttcccagttctagaagcagtttactgagtaaatcattacagctcagtcagtagcattacaaaggttgccctaggtgctgtgccctggtcacagtttgaactcctcctttcgtaatcgaactcagcagcctccaaaacacagagacagtgtagtttgcttcctgtaaaacgttgtccgaaaatgtacacacaatataaactcctgtaaattttttctagtgggctggatagtttgggggagggggaggggagggagggggtgaaggtacttgccaccaaatttgatgacctgagttagagcccagaacccacagagacagctaattcctctcactgattgttcagtgactacacacacactaaataataagtaataagtaaatgtaagagtttacaataaaatcttgtgcttggagaaaaacattcagtctctgtactagctaaggtgttggttgtatgttctaagtcgctcatggtctctgtactagctaaggtgttggtattattctctaagtagactaacaaagtgactaaactagggtctcatgaataattaatattttcaatgacttatttgtaaaaaaaaaagtttcagattgctttgtgtattttatgtagcagattctaggctcctaagtttttcaattttctgatactcaatatatggctcaaaaatccattttcatgtatgaagctgttgaatgggattgttctctttattgaatcttcacccatctgcctgtcttcttccacccaatccatgtcacctccttacattttaaaagccatctgccaaatggtacttaagtatgaagcattcaacttttttcttaaaatttcgtctccattctgcattcaacagcgtaagaaacatggtaattgagaaggccgacagttcttgagttcatctggtccttaagattagttcttcaaagcaccatttattttgttttaatttttatgtatttatcttatgcctatgggtgttttgtctgcatgcatgtctgtgtaccatgtgcatgtctggcacctgcaaaagccaaaaggggaggtgggatcccttgggactggagttatagatagctgtgagtcactgtgtaggcactgagagtaggaatcaccccaggtcctctggaaggccagtcagggttcttatgttaagccatctctctgtctccctcgtgtagcaccgtaagcgcagtagttatacccttcccttgtgtagaaaggtgactttcctcacatacaaaccatgagatagtgaaggcattttgagctgtatatgatggctggttttgcctcactggttttaaaggctttcttttcttatttatcaacagaagccccaggattctgcgcttcacagagtttgagattttagaaaagagatgtacttttaactctggctatttctttttctcttttaaaaatattttacttaatatttatatgtgcatgtgtattttaatcaaaccttccccacttctctcccctgcagttcctttcctatccttccttcttactttttctcctaatttcatatgttttttcttttaatctttaaattttttttgaaatactcactgggtccatttagttgtgcctatgtgtatggatgtgggaccatctactggagcataggtagccagcctcttagggccagcatccctgagaaaattcactttctcacacgccgcagccattaattactaatagctcctcagatgggaaagggacttcatgggcccctccctctccctgctaggacttcagctgcttgatcttgtgcaaatcctgtgctgtctcagatgctgtgagttcccatgtgcaactgaggcatcatgtctgacaaatactgtttcactgcagatatccagtctctctggctcgtacagtcattgttgctgcttacagtgttcacaagtaaaacttccctagtaagatgcataaagccttccagcactgagaactaggaagtaaggcagcatctaggatggtacaagcttggcttttccatgtcctattatgtagatatctggtatctttagcagtagggttttaccttaagttctggaggatatccaagagcaatagcaaacaaaacaaaacaaaaaaaaaaaaccataccccaaaacaaaccaaacaaaaatcacccctcccccaaaccaaccaccaacaaacaacaaaaacccaagaacagaaaatttaaccctggaattaggaggggagttgtctatgtgaccctattaagtaacagctcaaaagggggtagctcatacaccttaaggggctgtcgtcattctccattataaggtagctcattttatatatgtatgtgtatatgtttacatttgaggaggtttctacggtaggtttccataaaggcctttagtgttggaagaaatggggtgagggatgggaggacagggtcagagagggagatgggaaggataataaccctgaagcctgtggcttcatactttatgtgctcacatagactccatagtgtgcttcacttgctgtgtagattaaatcgtgtgctttgcacatacctttaggcttgctttaatgagattcgacagctgatgctgttatataaatttctccagtattaggttactcttgattacatgacagaaatggaatgtggcctggaggtctttgtttctctgccttccggagcagggcatgggagctgcttttgctgttgtggctgttgctgctattgttctggagaatggtggcaggcttccaaatgcttcacatttactcaccatgctgggaaacaaagcccttattaaatcagaaagacctagtcacttacatgtcttcaggcaaaataggacctggttttaaagagtccagacaatgttagtttcaattctttctgtccctcagtgctctcccagcaaaggtctgaggctgaggctttctgttgagtgatggggatggagaggggaaaagacagctttcccttgggaagaaagtgaagtaagaatgaatcaaataaccctgctgtaagaagcgatacagcttaattttctatgcatacttatgcacacgtaaaactgtgtattgtagccacagcccatgttaaatcatgaaatacttggttatgggatatgtgtgatctggtgcgtgtcttagcatggctgttaggagtctttgagatgctgtctgttgtgggagtgagtgagcagtgatggggagacagacactgctaatgagataagctctaaaggatacgttttattattgttacagtaaattttctcttcagttttttcctgtcaccttttcacccatgcttttgagttactactgagagtctctgtctccattcctctctctgagctgaagaagtagtgccaacaggctgtggttgatggtctgtattttaactggcattagcagaattaatttgtggaagtacagttccgagtttcccagttctgaggagtctatgtattttgccccacctgcagtctagactcatctctggcagtagcatggaactcaggagtatttggaccgggtggcctgtggtgtacatgttagacacattagcacatcctcatggacataaggagatctatcactcctgatgctctgaagacggaactgtctttacatgtggttcaatattgtttctgatctaaaccggcagttaaagatgaagttttctcatttgaatgtctataaatgtgtgggctgcatgcgtgtgttcatgggtgtttgcatgtgtgtgggtgcacttgcacatgtgggagtgcatgtgtaggtccacagttgagactgagtatcttctttgattactttgcacttaactaatggaggcagggtctctggttgaacacggagcgcaccattggctagtctagcaagccagcttcccttggtaatgtcctgtccccgcctccagagtactgggactaaagtcagcaccatgccggcccagctttgatgtgggacctgggaatcctaattctgctctgcacgcttgtgcagcaagtgctttatgtaccgagccattgccctgattccaatcacgagttctgatggtgattgaccctattggtaataaaagaataaaacttttttttaaatttgctattgttgagttataatctatatcacataaaattcactgtcttaagtgagaatgcagggttaattttattttatttatttttgttcttgttcttttgatatttttataaagttgtaccaaacaccagcatggaattctggaaactatgtcttttagtcagtctttctttgtttccttccttctgtgttaatgaccaatatatactaattttcttttgtatgaatttgtctgatttagaatttcataaaaataatttttttaatttgtttagacactcccagaaacatctttgccaaattatgccacaaatttgaaagacaagagttctttagtttcatctctctataaagttatccaggagccacagagtgaggtaagtacattacagtttgtatgaataatattcagttgattatttttatttaaacataaaatataacatacatgtgtaaggtaagaaaatgtatatatttgcaaaacaagaataaaattaatttcagtgtatcattctccagaatgaaaactagaatccttactgtatccccaaatccatctttctccgtgttctccttctgtatgtctctgagtctccatagccttggaacgtctaagtcgtgcaaataatcttttttcttcagcaaatattgatgtgcctgctataagccattactatggtggacattaggggctcaaagagcagtgatcttcatcataagagaaaggtgagagagactgagtaaccatgcagaactgcgtctttctatggtttgcatggtcgttacctctaagagtcatctgggaatgtacttaccactgtagcaaatactaagaaatgggcctggtggccggagagatggctcagcagttaagagtactcactgctcttccagaggtcctgagttcaattcccagcaactacatggtggctcacaactatcggtaatgggatccaaagcactcttctagtgtgtgtctgaagacagctgcagtgtactcatataaataaaaaataaataaatctttttaaaaagagagaaagaaatgggcctgggatatggttcagtgggagagctcttgcctagcatacactaggtcctgggttcagttgttagcataacgagcaggagaaaacactgggacgaatatggggttggtgctgttcgcaaggtgagtttggcttccttagctttcttacctgtctgtcttttgttgtgaggtgatgttttggtcttaggctactcaatctgcagagctgggaaggaatgcattctttataagttaccaggtgtcatagcaacaacaacaaccaaaacaccaggccagggacaaatacagcttttccatgtagcaagtaaaacaaacactcctagcagcagggaagtgtaggagattggaggtgcaaagcattcgctgaattttgccgtttggtctgctagtgcctttcctgttctgggactagaaggagacagctctggagtagatagaaaggagataacttgcataattccttttgtttttgagtttaggaaaagatgtgacaggtttaaagtcaatctcaatctctgtctctctgtcatctgcctctgtctctctgtctgtcatctgcctctgtctctctgtctgtcatcggcctctgtctctctctctgtctgtctctcatccccacccccctttctcagcagggtcttactttgtaaccctggctgtcctagaactcactatatagtctaggctggcctcaaattcatggagagccatctacccctgctctcctgaaccctggcattgctggcctgccatgaatctctattcagtggtaggtaacatatgtggatccatgggcctttgcaaccagactgtgcactccaggagctagtgttatttgagtaattaatttgtgttggcaggagtatagagtagcctagactctacttactgtgctgtggcgttcactgtgaatgagattctagtgggcttagagattttcccgacaggccattagacttcatctggaataattgagtcacagttgtgcttgccttgtcttttcttcaccaagctgctttcctcttttcttgttgcccaggcttcctttagaagcagcactgaacttccaacaagtttgagctgtgttttcatagggaaatatattccaaaatgtcaccgagccattagcaacccagcatgttcaatcaccaccgtaaaatacattcatgttacctaggcctgtatttctcacattatatagtattgttttctgacatttgtaaacttcagctctttctcctttctggctcttatgtgtactgtccatcatgatcttgcctttctgtctccatttccttatatggaaaagtgtggctagtcatagtctacttacagtagagtgggaattgatcctgtttctgtataaatagtgctttgcaagctgtaaaacatcaaacagatgttggtgttgatttgtatcggctttaagtgaataattttaatctttttgcaacatggtctttttcttttctttaaatctgttttcacttaattatgctttcattaggtaaaagcttttaattttggatttaaaactggtcataaagactttgagtatattttgattacagttgattatgtgttcgtacagagtgtcttaaatgaattttctagcaaggtttataattgaaaatgcttgttgaacttaacaagcttcgttattgattcaattcaagcttgcttggggatttggaaatgtgagtgctggggcacagagagagtattggagcacagagcagagccactttgttctgtttgagacagtcgaacctgtgctttctaatgccaccaccactgtgaggtggaaaaaataccctatgagtgagtactgccagaaggtagataatttttttttttttttaaaaaaaacagggtttctctgtgaccttcattgtcctgaaactcacactggctggcctcgaactcacagagattcacctgcctctgcctctgcctctgccctcccccaccatctgcctcccaaagtgttgggattaaaggcatgcaccactttaaaaacagtctgcttgtctcatttgcttttttttttttttttgccacagagaatagaacccccagccttgggtgtgctaggcaaaagcagtctgtgtcggagccacattccaaggcctggttttagaagaggatagttgaacttgctccttactctacttacttagtctgtttgaaataaacatttacactactcatttggtttctctttgttgtaattattggtaatagaaagctgcttggtgtcttgatttaatctgctgcttgttaatgaaatatgtagtttgttcaggtttccttgaaaaccactacctgccactctcctgacgcgttcgaccatgttttgtgtttgaccgaaatgtatgacttaaaggaacgcttgacagatatgagagtttcttaacttgcttttctggtttttaagagtctttaataaagatatagttagtgctactaacataatttaattgggagtatagtgtgaaagaaaagggctatagaagattttaatttatgcataaaacgcagggacagtaaccatggctttaacaatgggttgggtgtaatggctctgtaactgtcttcacactaggcttcacacacatgggagcaagctgtgggcttgttcccgttttagttctttctgccctgcagacaaacccttatatgttgacttctagtctattaagaagaaaggcggtaaggaagaggcttccaacagcttagccaagatgtaagaacagggcctgaggaagggtagctgtgagtagagagtagctcgcagtggtagagcatcttgctgacatgttgcagtgtcccgccactagaatctaaactttctgggatagctggccagtgactggttttacttcaagaaagttaaaacatttgtctatttcaaacaaaaccattttgagaaaccttgcttaattcctacagtggtgccatcacatccatgtttaccgtgtccccttcttgcagttactagagcccgtgtgtcaccagctctttgagttctaccgcagtggggaggagcagctgctgcgcttcactctgcagttcctcccggagctgatgtggtgctacctcgccgtgtcggccagcagagatgtgcacagcagcggctgcattgaggctctcctgctgggggtttacaacctggtttgtattcacagagtaaccatgtgctttttggaaaactgcttttcgttttagtaaaactactattcatttaaaagaacaaagaacctaagggtattggggcacacatataattatctaaacaaatttttatgggttgaatgaaataatagtaatagtgatttaataataatgagaaaaataccaccaccagtggggtttggttttattttattttattttgagacagggtctcacagtgtagccctgactggctttgaacatgttacttagaataaatagactgtcctcaaactcagagacctgcctgtctttcaggtgctaggattaaaggcgtgtgctgccatgcctaattactgctattgtggaatctttaatttcaacatctgtttaagtgcatctttaagctggtttttgccttcacacacacacacacacacacacacacacacacacacacacacacacacacacacacacacacactcacagccagtagaaagacctaagatgagattcactagtcacaccttggaagtcccatgtctcctgagcacatgcactgtatctaacagtttgtgtgactccgcctgagtatcagttctgactgacattctgaatacttacggattgtgttctttaagatggaaaggagaggtgaggtccttctgtagacacatggcatgtttgattgacttagagactataacttgttagtacagaacagtcactacactgtctgtgcctcagccatcccgagaacagtgggactttaatgtcgttggacattttctatgtggtctgctatgcttttgttttgaaaatgcaacagtacacatgttacctactgatgctaatggtaactgataatggagttttaactgtctttaaattcctttaattctggtctttaaaaattgtcttagagggaagaaaggggagggagagatgttgtaattataacctcaaaaaattaaacctggataaattgtcctaataactaaattttatttttaaaatgttgcatgcaaaaggtgacttttaagatatttccttttacttttgtaggaaatagttgacaaacacggacatagtaaagtattgagttttacaattccatctttatccaaaccatctgtatatcatgaagtaagtagttttttatcaaagtacatttgttgggtcctaagctccaatagtcccctaagttagggtgtagttacctgtgcacagaagtgaattgttagtacctcaaaaggtattgatcatcaccacatggagtgtttactctttcaaaagagaagtcaaaaatcactaaagaactgaactaagatctgacagtgagagccttatcaaaagcactttttatctttgtataatgagtaaggcttgtcttaatttgtgtctgcatgtggggtgagtggataattgtgtactctgtgattgaattttggaaatttaaattttgattttcatttgtagtttagttttaacttgttattaaatcttggggtggaaatgtgacaggcagtctgaatatccctaagctaaatggtacacctagtaggcactctccatgctttgtgcattcttagtatcaccttcaacaaaacagcatctcttctctagccttccagcattgggtctatggcgctgacggagagtgcgctgtcccagcatggcttatcaaaagtcgtgtacagtggaccccatcctcaacgggagatgctgacagcacagaacaggtatactgcaaaggcacaattctcctagcatgccaagttgtttaaaaattgtttcagtaaatttataatgtttagtgagttaaatgtaactctgtggatatcaagccattttagaaaagaatcagacatacctagattcggccctgtgctttgctgcaggcattatctggagtttggaggatgcaggactgttacttgcagccttctgtctcctttgagtttccttactgtgtctgtaatgtgtaagcctggttctgctgcacaaggtcagttaacattcctttggtttgtcttcaggtttgaagtattgacattccttctgctgtgttacaatgctgccttaacctacatgcccagtgtctctcttcagtcactgtgtcagatttgttcaaggtaaaccagatgtcctagctttctaatcctggggtatatgaatgtaagactactaatttgttgcatacctaagttattgttgtgtgattgttggtttaaagcattatataagtcaaagtacactgcagcctactgagcacatagacagtggtttagaaatagtagccatcaaaaagcacaggcatgactatccaactgaatagtgtttggtgtaatggtgagtcagaaggggttatgttaccttcacaacaatgacatggcaatcattttttaatttgtggaatatgattgggtatttctttttatcttgcttgcctttatttatccatatttactgtgttctagttttatgtcaaaaaaataagaaaacatggcattatggtttttcttcatttaaaaaatagaggtaaatatgttggttattgggatatattatgcagcactaaaatatgagtgtaaatgggtgttctgtttgcagtaaaagttggtttattctacttgcagttattttttcctcagtttccctacttattttgtttttggtactaaagagttttgagtttcttgcaatgtccaatgatcttatgttcatcctttgaattaaaggccttttaagaaaacatttgtggggccttgacagatcgcttatcagttaagagtgcttcttaacattggatggctcacaactaccataactgcagttccagaagatccaaagcacttttctggactccttgggcgcagacacacatgcccttacacagagagacacacatacacaaaaataaaaataagtctgaaaaagaaaatatttttaatatttgagatgtttttcaggaaattttgacttttacatatgtgtgtgtgtgtgtgtgtgtgtgtgtgtgtgtgtgtgtgtgtaggtgcacagggtaggctgtggaagtcaggataatgctcaggagtcagttctccctccctctcttcaccttttgggatgctgggattgaactcaagtcgccaggtttagtgattagtgtctccacttgacgagccaactcagcagctccagcctgggactttgtggtggtagtgctgtctacacatagaggtcagtcgtattaattcattaatgtgctatcaagttgggactgtatcactcctgacacaaagtgagaaagcagccattttctagtaagttacctaaaaatagaaacttcttgtttctctttaagtttgtgttgatgatagacattttaggcaatacatatatacacaaggaaggaaaacaggtctgcaatcccataactctagctttctctgagaaatattgtgtgcctgtttattaattgcatacaagctgagatcatgcatgctccatgtgttgtttttgcaatttcacacgacccccattatttaggtagacactcccacaaacactagggctggaattcagggcttcacacatgctaggcaagcactcctttaacaggctctttgcagacaggctctctttgtatggccctggccatcctgggcctttctctatagaccaggctggcctgaactcactgaaatacacctgtctcaaaggatgcactaccaccaccctgctcctaaggagatttttaaaagcacagtttaattgcattatagtgtgctgactagtgtatataactggttctgtgttggtagttcagaggcaggcctctgagctacggctcacttgtcgctggcactgcttctcatcataagtgttttgtttgcctgaattttatgtaagttattttctttggaaaaaaaaacaaacttgcaaaccctgctgatttctgtttagaattctctcaagggtgttgtgtttagatacgttgtaaacagtataaaactgcctgtactttatttcttatatgttttttagcattattattattatttagcttctttttcaagacaagacttttactatgtagccctggctgtccaggaactcactctgtagaccaggctgactttgaactcacaaagatccacctgcctctgcctaccaggtgctgggattaaaggtgtgcatccctatgtctgggaagagcattacaattttttatctgtctgaaatttgtaatggatattttatgaagctttattctgggttatagtaatttttccgataataagtttgtaccaagaatttaatcaggagttaaagattatactaaagatctgttaatggtaagttccatgtaatgtccccagagttactgataattgagttgatcaaaattagtaaaccaaccagtgagcgtgtgactcaccaactgtgtacactgcctgccttgggctttaccgtctcttaccagtatatcatattcagggaaatgttacaggcattctgatccgaagattgttttgtagatactagatttgttatttctattgttggttcatagatattagagaatcatctgcacttaacaaatacgtttccttccatcttcccagaatatgtgtctgtggctatccccgacaacatgtaagaaaatacagaggtgtgagcagcaggataccgatttcatccggcttcatggtgcagatgctaacaggagtgtattttgccatgtaagtgtgtctcatataaaaagcagaaaaaaaggagttctattctatgcagccatatgaagagaggaacaaattataaaagacaagagggatacatagccacagtctgcctctcatagctctgtcattcattgtctctgctccagtctctcttgcaagatgtggtgacaagttgtcagactattgacttgaattcctggaagacaagctccctgtccagcaggcactgcagcccaagtccttctctgccagcgagaggctcttggggagattgcagtttcttggggttcacagacagcttcagtgggcttacagctaaagggagggacacaagtgtctctctctgcacttgccaggatggtgtcagcagggttgttatactgttgccatagttacattctgggtaacctctacaagtttccctacttttacctagtatttgggtgggagctggattgctggcgagttttcctcctttaggtttctctgtatgcctgtccctcagagggggtctcctctcccatttttaggccctccttcagcaatagaacgctgttgctagctagcccgcccttcacctactgtagcacttgggagagcaggtcctgcacctcacctgggtggtacagtagaactggccctggaggtgggaggggggcatgggtgagctagcctggagggcatgagcacaggagagctagctctaccgcttgctggctgtggcatttgaagagctagccagggcagtactggagagctggccctgatggcttgggtgtgggagatctagcaggctgactaactcagctaccacccaggcccagatccaggactatgagttgtcccacccagcatccaccccatctatgagctgctggagtgcaaagctgcaggatctccacagcagaagccaacaacaggatatctgagaggagacccagtgaggagcctctattgctagtgtagaagaagccagagaccttgaaccagaccagtgactcattgtaatgaacatttgcaagtgaagactatggataaaagtacaaagggacataccctgtgacacactgaagcttctaccatgtgatagggtttttgtttgttttgttgttttctgtgtttttttttccctttttgggagggtgttgcaagggcagatttgaagggatggggagatgaatggggttggagtgcatgatatgaaatccagagagaatcaacacataaaaaaaaaaggaaaggaaaggaaaggaaaggaaaggaaaggaaaggaaaggaaaggaaaggggaaaaggggggaaaggggggaaaagggggaaaaaggggggaaaggggggaaaagggaaaaacaaaagggggaggggaaggaaaggaaaggaaaggaaaggaaaggaaaggaaaggaaaggaaaggaaaggaaaggaaaggaaaggaaaggaaaggaaaaggaaaagaaaggaaaggaaaggaaaggaaaggaaaaagaaagatagcctggtaataggattggctcatctctccccaaaagctgtacaacttttgttcatatgaaaaaagtgtctggcaggcctgtgcttttcccatggcagtggccactctgctccttcaagcctgcaccatcaaaggccaccttttctggtccccattctgcttcccgtgtttcttgctgatgcctatataggaggcctgggaaagtccatgaacagtccatgtatatgctccaggggttgtaagctctgctacctccagagccagcgttgtgctgtactagaatctgttggagagctaagttacttcccatctgatgcttatagcctccccctcttggcctcagaagtttggttgctctccctcggctctgtgatgggttcattaaaagttaccattttgaagataacctgagtttatcttggctttcagatgggaataatgctttcactattgagcctctcttgtgctcttgatgtaattcatgcgtctttattttgttgacagagaccattatatgtctgttgacttggatgactcagttgatttttaggatgtgtttgatatatcactgaaagttgaacatatgtaatacacacatgctaaatttcttatctcttgtgtttgcaacatgctttatgttcctttctaaatgggcttcaggaggcaaagcagcagctacataggaaagtgggtaggcttgggttctcagtaaaaccatgggaactacatggtaatttgtccataattgttcagaaaattattctaaagtatatagtttattatgttctgaattactttgacagtgtaagatgcctgaaattgccttagctctttgatttttgttctataaatactcatgttccttagagaagaaacgtacatgtataaaattttatttgctattaataggcgttcagataataggaactttaaaaatacatttttaaggagaatagaatgttaagcaatgtgcaaatgtggtctgttgctttctttagtagagataaatagttcctcattatgttttgttttgttatataggataaattaaaaataatgctttaactcccatattttgcagatacaatggagaatgggatctagctcagaaagcactggatgacattatatacagagcccagctagaattgtatccagagcctctgctggtaggttctgcacttaattatgcaatttttaacttataattgtttagtttaaaactatgcattgagaagtaattcatagcatatgaaatgcctttaataagaaatatcacacctaaatgtgtttgtatggnnnnnnnnnnnnnnnnnnnntggcagctcagcctgggagactgcgctcatagccgcgctcccggtggcccacagaggaaagggaaagggaaggatgtcacaggttgtaacatagaaaactgatcctgaccttgaaggcttgccacttcccctcagacactctgaaagaatatgccgggaaagagggtgatgttactgtttaaccaagggccattgctgatctactcatttttaaaattactctgtgaatcctcaaggtccaacagggagtcataaaagagtttgtgatatttgctattaggcaactacaaaatgcatacaaaatccatttaaacatgccgagtccaaacatccttccatttcttcagtgaagttatgctgttaaatgagaataaactatagaaggaaagtaacttagtggacaccccctcaccgtgtgaaagcaggcgcaggtgcagcagactgggctgcactggccccgagagcactcccaaactactgctgcagagcagaggcgtgtaagagggggttctcaggcgcttctgccttccttctcagtgtttacatggggagtgggtgggggaatgtgggttgcacaattcaaacatgagaaatattgaagctccctcgagtgtgtgtgtgtgtgtgtgtgtgtgtgtgtgtgtgtgactgactgtgcgcacacgcgcagttttggattttcaagaaagaaatacatatcctttaacaagatggacattacttttcagaaacattttgtaggaaaaaaaatgaccaaaacaagaaaaaagagtccttacatatattgggtctctgacgcccttgtggatctaggatctgttttggttgccccttgcagactgtctcaggctacaacttcattaaagaagcccttgcattacctgttcctttatgtttattcagcttcactgcacttgagtgcctcctgtttatgatagcaaaagtgtcataattgaggatataaaagagaatggactatcaaaagaaaagaggcacactcatgagcagttagagtgtgggctgcagcgcctgagttctcactctctgggatgtgaatgactcccatccactgggctgtaataaatggtacttgcttagtcttacttgactctttataggtaggctgcagcatccttctcaagggtagttagtcttaatctttattctggcttcctgtgtttctattgcagtaacaaaataccctaaacaccttgcactgggtcccacttctgaaggatcccctgcctcacacactgccacactaggcttacctagcacccagcacccaagccacgtggaaaccacacgttcccagggaagcattgctcaggaagtttccatgtttctgcatgtctgtgatttctgcctggacatattattgttctgctttcgaacaggcagtagtttcttgtggagaggatagttatcattgtatacttcttaaatatatagacaatctcgatttaaaagtagatttaaaattttcttcatatgtaaaattttatgtattgtattttctgtaacaaaatcaaagtaaaacatttcttaagaaacagtatgaaaggacatgtagatcccagcgtgagccacagtggccattctgtattgtcatgtttctgaagcatagtactatcgaggtcacttgaggtcatgactgaagactgcgagtgcctgtgtttgatgggatcctgggtaagcactccattcagctcatctccccactctgccacagccatccccatgggaggaagggctagggctttgtaatcatgcacgagtggtgatggagcctggatgggagcaggaaaagcagcactcactgtaaggaattgtctgcttctgtnnnnnnnnnnnnnnnnnnnntttgtcagttagcatttgcaactgagaaagaaacctagtttaatatttacgaatcacaaagtgcattccttcatagtgtcttgaagtataagcatctgtctggctctcttaccccctatttaggagggttaggtatcatcatattgaaataccttggggaaatattctccttgtgaatttgttaatgcttagccttatattttatctaaaagtaaataatgcatctatttaccaatcttaaagattttttttccttgtaggttgctaatgcaataaaggcttcattgcctcatggtgccatgaaatctagtaaggaaggtacaaggtgtattcaagtggagatcacaccaacctcctctagaatatcaagaaatgcagttaccagcatgtcaatacgaggtcacaggtggaaaagacatggtaagcactcctcgggtccgagcacggctggctctttcccatggcgctctgcagctgtggtggtagaccctgtaaccttaggaaagcaccgtcggagcctagtaaacaaagcccctaggttctcatccagggacacagtcgagagtgtgacacttcttgtgttaggcatatgaatgaagaatacttaaagtttacttattgcagtagagcaggaaggtactttaggttgccaatcttaggtagctgtatgcaatcgcagacagtctcttgctcagtcaggcatcacaatgcaagttttttcgtgttggagtagaagtacccaccagtgaccttccactctgtcggaactccctggtaaagagtgccatgctgtcgatacactagacatttctgatttacaaattcattttcattcaagattatattagttttctttcttacctgctttattttactgtattaaagtgttgctggaagttaagtgcattcaccatgcatccccgtgctttgccacttccctctcttctcctttaatctcctccttattccatcccttcttcctgttataccttctctcctctctaaccaagaggagagtcagacgagtaacgccaccttcctcaaaaatgaccgtcagcaccgctttgccccgtgcgtgctcnnnnnnnnnnnnnnnnnnnngaagacagagagcttactgggaatggcatgggctttaaaacctccaagcccactcactcccagtgactcatctcaaacaaggccacacttcataatcccaaacctttccacccaccagacaccaagcattcaaatatatgaacctattttcattatctccctgtctgttcttagccaccttctacccttgccaccaacccccaaaggaaaacaatacatacatacatacatacatacatacatacatacatacatacatacatacataaacccacatcccgccaattcaaaacaccacagttgctgtgcaaaaataccctgaaaacatatttaaggaaagggggtttcttttggctcacagttggagggtgcagtcatcacatagcaggagtgcaggcaaggcagctaggaagaagacatatggagagtgctcgctcaccttcttctttccaccacttagcctcagtgcagagcatgctactacctagggtgggtgggtttccactctgtaacctagaagacaagcatccatcagaggccagtgtcccaggtgactctcaagctcatcagatggacgtgtgactcgtggctgaccttggcttgttgttgtgcactttcctgtccttgctgccgtctatccctctttttacaccaggctagaggaaggagtgggtgggggctgctcccactgagcaggcaggcagggctttctttatgactttccttccttttttatcactcaggtaagctgtgtaggcatagtggtttgtatgtgtattagagtcatcaaagattacacatagcaaacaaagacattcaatttaagcaattcatcacattgattcttttctactattagtacaatctattcttctagtccaaactcatggtctgttttttattatttattttggcccatttaaattacttctggatgctctgaaatgagtgtggtgttctttcctcaagaattgcccacggctcatattgctatgggaaatatcctaatgaaggcagcacctactttcatcttaacatttgctggcattccagggcccagatgtcttcagtcacccactgtcagcagcaccacagtggcctgaaggcccggggttcacatatgatcataattcctcctgatttcaacacagtggagtagtaacagtagtaacatttctttttaaagaaatgtattacacaactaattgcatgttgacctgatctccacattttttacttggtgaatttaatattgtaatgaatcagtttagttcagtgttgtgtctttcaagttcttcaagtctctgggaaagttgtaatgactcatgagtgtctgtgtctgctcttaaatgtggaaatggacttagagtgcacagttcctgctttgactttttataacctcatggctaatgtccttatttatctgatgataatgtaactttccaagccagtcgtttcctggattttgtggtgatgggtaattcaaggcaaaagtatattttcaaacatagatttttaaagcacttatatgttgacagctatgtagaaaataaaaggcaggtagaagaaggaaaataagagtacacttaaagagaggaactttaagataaataggttgtaatgataaaaatagtcaaaaaatgaaaattctgataagaaagataagctaagatatttataaaagcagtagcattatttaaaaaaacaataagggcagttttacttaaatattttcttttaaaatgttttaattttatttttaatttattttgtacattccatatttcattccccattgttccccatccactccccgactgctccatatcccacacctcctccctaccccacctgacctctaatctccctgggcctccagtctcttgagggttaggtgcttcatctctgagtggacacagacctggaagtcctctactgtatgtgtgttgggggcctcatatcagctggcgtatgctgtctgtttggtggtccagaatttgaaagatctcgaaggtccagattaattaagactgctgggcctcctatagaatcgcccttctcagcttcttccagcctttccctacctaattcaacaacaggggtcagcagcttctgcccattggttgggtgcaaataactccttctgactctttcagctgcttgttgggtctttcagaaggcagtcataataggacgcttttacctgatctggtattgggtgagggaaataatttcttttaaaaaaaaaaagataggaagaaaaggaaaacacagcatgtctttgcacctcattctgtggtcatgtgagtgtctgtgaaactagcggcagatgtgcaactccaaccttgaccccagagctgcaggcactgggattccactcactgcctgtccttctcacctggctcccttctcacagctctctctcccagagcaaacggaactcctgtctttatttgtttaccacaaccaacaccattgtgactcgttcttcctccactttaaaaaaaattacccacatgggaacaacataagctattttccattctttggaaatggttactgaaatcacacttccattttatctaagtcccctaattaagttaggggactggcaagtggttgcaaataatgagcatggaaaactttgtcagctagtatctaaagatccactgaacccccaagtcgttgtcatctctgtcccctttcctctgtgtgtctgtccagtcacgggggcagtaaggaaagagcattttgtatactttgaagtgctacataaaggctgagtttaaatcggccaaaggttgacttcgttctataagaattgctttgttagctatccagcaattgtgttcttggtaaatttaaattggataacttgccattcaaataatagtccttttctaaaacttaaattttgaattttctcaacttgaaattaatgtgcttagtttgagagtgctagcaggcgtgaacgcatgcacatgttacagagctcggacagcatgtctgttttgctgctgttcctgtggaggtgggaggtgcccactagtacttgacatgtcattgttagaatgagtatattttaactatctaatacctcgtatcttacttcatcttgttaatgtcaaaatagaaaatagatcccacttgtgttcttggttatttacacttaaaaccgtttgcatcaggaaagtgttgacagtaaaaaagaatgaaaatcatatttctaaagtggagcttctgagcgttaccctgcttgtggctctagcacatgctaaatgtttaatgctagcaatagtttagtttcctttcagaggtgggagggattaaatttgaggaagaagctatgtagtagtccaggttggcctcaaactcaaaaggccccttcttcagcctcttaggtaccaacatatttggatactttcaattagcactacttctaaattattttgacatacattttagaagattacaagcttttaaggttgtgaaaaggaattataaataagaagtaatatgtatttttacattttctaacatgattatcaaaagcaaataccttgaaagtattagaatgttgtactctatggaagaatcagattgatacagtttaaatatattgagcccaaagaaagtacagtcacaagttattacagcaagcagtttactttttttatatataattttggcttataaaatgtttttatttattggataccatgatacttaaagctaagcaagataacatagttcaaagagaattgtaattatgttacaaaaatatcagcaaaagtggtccatgtcataatttgcttagtgattaagtactgtcttcttagatgaaaaaaaagtgggggggggatgataaaaagattcagaggctggggaaacagctcagtagtaaaaagcttgccaggcaagctgacgaggctgagcatttccactgggactcactcgtccttccttctaaccctgaacattcagccatttctgcctgcgggcctttgacttaactctttgggatgtttggctgaaatttgaatagcaagcggccttaccagttggcagtctcccttcttccaggttgctatgtagccagcaccccttcatccttcaagtctcagcttccacaaagcagcctcccaaaccacccatctgaagtagccttgcccctttcaaatttgcctttcttaattcttgcatagtaggaaggtctggagtctgttatgtttgccattggcttctcagtgcctaaaacaatggctcacacagcataggtgctcagtacatccatggctgatgagtggaggattggaaaagtttcagggtgagcgatttgccccttttctgattgttttatggaaataggaagggtgttatttgctcatctataatccagtcagttgaggttttcattctatgctttcatatgtgtatattgttttcataatcgtactatattttaaatgtttggtgctttggttttgtttaagtttaaatgtttttctggtaatcctgctgtagttattttaatggctacctaatatatatgctacattgagttgataacttgtcatttacttgcctgtacccatatattgaatacttttcttctaatttttcctattataaataatactgcactggttagttttgtgtcaacttgacacagctggagttatcacaaagaaaggagcttcagttggggaaatgcttccacaagatccagctgcaaggcattttctcaattagtgatcaagtggggaagtccccttgtgggtgggaccatcttggggctggtaatcttggttctataagaaagcaagctgagcaagccaggggaagcaagccagtaaagaacatccctccacggcctctgcatcagctcctgcttcctgacctgcttgagttccagtcgtgacttcctttggtgatgaacagcagtatggaagtgtaagccgaataaaccctttcctccccaacttgcttcttggtcataatgtttgtgcaggaatagaaaccctgactaagacaaatactttaaggtataacctagtaaatacataaaaaaatcaccattgggtataataaattataatcattaaagatggttttatggctggagagatggctctgtggttaagaacactgactgctcttccagagatcccgagttcaattcccagcaaccacgtggtggctcacaaccatctgtaatgggatccaatgcaattttctagtgtgtctgaagacagcaaaagtgtactcatgtacattaaatgaataaataaatctttttttataaaagagatggttttaaagagtaggagttgctcaggcaccttctaccatttctgactgcatatgcattagttgtaaaggatgtgtatggctctttggggcttaaagtacttgtcacagttgctgtcaaagctctgtgactcagtgggttctgtaaacggtggctcattatttcacaaagaagtttcaggagcctcatgacatactttaactcataaggtaatttggatacaaaatgtgtaagtcctacaaatagttaaattatttttattaaaattgttacctttaataaatagaacaaccataaggcaaataagcacaggacctaagattgtttcttgggtgcaggtagactagatatttgagcttgtgaaattatgtttgacaaacatcatggttttcacgaatattttttgtaatgtttgtaattcaatccttttttttttttaaatcagaagaaatgtttaggacaaaattatttgagttgcctttgagaataaaattgaacttgtctattaaaagtgtctgtgaccagaaatggtctggaacgccagttgctccagaggctgaggcaggagaaccataagtttgaggccagcctggactatacagcaagattttgtcctaaaatagacactccaacaaagaaaaacttagctattcttaaattttaataaagtatctgtgtgtgtgtgcacacgtacctgtgtacctgcatatatatgtacatgtgtgtggagggaagggggaacttacatgccatagtgcccatgtggaggtcagaggacaatttgtagagttgactctcctaccatagggtctgggtttcaagctcagattttaggcttgcatggcaagtgcctttccctaaggcagcgttgctcatcctaagtaagtattctttaactctctttatctctgtatatgaagagtgcttatgtacatagacattataaaatgaaacagtctcagggaaatttctatttggatatttcaaattttttcaaattatttgaaatcaattgtaaatatttctttttatggatataaattaatcataatgtcttttgcatacatttttgagttccaaggaaaagcaactcttttgttatataatttatattcccttaaaacatcttctatataattttcttaaagaaagaattatctctctctagttataaatgtcagtttttttgtataacataataaaaatgaactagtttataaaagatttttgatattcctaagcattgtaacaaacctacatttagaaatgcctatgtcatttttctgaaacaatgaacttttgttcttttgtttgtttggtttttggtttttggtttttggtttttggttttcgagacagggtttctctgtatagccctggctgtcctggaactcactttgtagaccaggctagactcgaactcagaaatccgcctgcctcttcctcccaagtgctgggattaaaggcgtgtgcaaccacgcccggcaaacttttgttctttttaccacctaaaaatatttattatcttaagctgtgagttacttgactgactaaaaggaaaaaacattttccaagcttacctttttcctatgttctatattttcatcttgatttataatcgtgtaatagagattcattcagttaattaagaagtacatttattagggctaaggagatggctcagtggttgggagtacaaccatttttaactccagttccaggggattggaagcccttttctagcccacacagcattaggcacaaaggtagtgcatatgtgtgtgtgtgtgtgtgtgtgtgtgtgtgtgtgtgtacgtgtacatgagaaatacttgtacatacagaataaacattttaaaaatttaaaaaagacactaaccagtaatagtctctgctaagcttgtattaggcatttaacagtggccaaataacacttaatctgtgtagaatatacaactaggtagacaaggtaactgtagcttgttataagtgatttttaaagaaacagaatagaagagaaggcatatgaaatgtagggatgttgagacttttgatggggcgacagggaagtcttcattgacgaggtttctgaggaagtaagatgtgccttccagctattggggaagcccaggaggccagtccaacacgctggggaacaagggactcaggcacaagagtctcacagtagaaaatgctgaagagacattaaggaaaggattatgtactaaatacttgggttatataatcatgtttctccactgtctaatcttcctaagagttgtcttttctttcttgctgtttccagaataacatgtttttctttttgtttagtttactgagtacgcagacatttcagttcccttagaacaaccacatttaatttaattggaggttattgttacatttaatttcatgatttcctctctgctcagcccctgacctctgtcctgagagtgactaacaattcatctgctagcttcgctttacaaatacccttcttccatttctgactccctgcaaatttctattggcgaatcaacatttttaaaccattaacttccatcagcatgttttcacaaataaaaccaattaaaaataaaaacaaactgaccttgagttataaattcttcaggtattcttctagagtgtttttactgtgactctttattcagccacagtaaattatttgccttctttgaagtgaccaagaatctagacagataaattaaacattgttgggagatgttagagaatgtttgcgtcaggctggttctgacaaattgagttagaattcactgtgtggatggatggacatttgaaactaaaagtctcatttctttacctagtgctttctgaactgcagtttcctcttagcaaatggggattaattaaatggtccacttcagagtctcactaccatgttgttttgagaatattatagagtaatatgtaagaatgtgctttaaaaaaaagtgctgttgagtatcccttattctgttagaacacctatatgtatcttaaaaaaatttttttttataaagcttaaatattagttacttttggagattttttttggttggttggttggttggtttttatttgttttgttgttgtttttgtttttatgccctggtaactgccaacattttttattctccctctgaactgagtgtctttgtaattttctttcttgacgtggtttctacagtataagtgaacgagtcttggctgccacccaacagtgtcatggtgactactctgtgttgctataacctctgccacacaccatgataagaaccgatttgcccttacttttgaaaatagctgttggaaagtggggataggcttagctggttccacacacaggaacagccgggttccaaagcccactagcctcagcctgcctgagaatggggaacttggtatgtgaggcaaatcagacatgatcaggctaggatcatggattcggggcaacaggagcttcaaggagatggaaagtgttccctgtggctagccgtggcaggcagggcccgggtgggaatccactttcaaactgtgaaggattcagagcagagcgttgatttctaaacagctgcatgctgggagctcaagatgtgtagtgcccaaactacttcatcctatggatgaatcaggttgctgtggtgaaaatgggcacctggaaggctccaggatggcagatgtcagtgaagctcggcctccctggatcgtgcagctgtggcctctgttcttttactgtggcatgctgtttagcagacttcagcaaaattcataaggctttgacgattctagctccgcaaacaaaatcattcttctcaacagatttgtgtgctacatcttaatgggtatacagtgttcttggttttggttgttttgtctgttgttatggagtttaaatttcaccactggtctatttttcacatatttatgttatttttactacttattatagatatttacttaagatctttaaaaccttttatatttaaggcacagaataaagttatcttgatagatatttactagttatgagttttgttcatttgtttgaattactgaggctgttttcagggtaaactgagaaccagttggcttttcatatcttgttttcatttttcttcattgtagcacatcaaaatgtatagtctcaataggaacctgaagaaatggactgcttaattctaccttaagcacataaatgttactgatatttgagattctgagtgtgtgagacaagaagggttgctaagcaccaaggcatgattgaataagcagtaccttaattatcatggttgattattaagtcagactggatgtagtctaataaaaaataagatttgaagtgtacaaaggggactttctaattactttggttatcattgttgacaagagacagagtttttgcctataatttgggagcttttacctaaagtttatgtaaacttagttggtcacaatatttttaaaaggcattctgttttcctttgtgaaaaaaatgtgtttcatattccatgtaaaatgtgtgtgaaaatacagaaagtgaactgatgctcactgggctcctgtgctgccgcaggattgtaaatgaagggactgacagtgtgcgtgtttgccttaagttataccattcaatcatccagttttgttctctttggttttttgttttgttttgctgtttggttggcattttcttttgttctgtcttcagccatcattttgtctgatcatcttcaatcctagagcaacctgagagcagctgtgctgctgctgctgaagcgggcatccttgtcattcctgagattagtgtcacacatgtgtccggagagaggaccgggaatggggaaaaaggcagagctctaggagacattgacgcccagcatatgcagggtgtgcaggaaacagccacagaccctaggagtgagagcagaggcttgcccgaactcaggaggcaaaaatctgtaagaaaaatgatggaggatggaatgtccacagctggcagagtgcagttttagcagacgctttgtagccgcagcccaaggtaccttgaggcaggggcaccgtgcatgctatgtgcgcgctcgacagttgcacagtcacagacgatttgcatgtcatctgataaagtgcatgaatttgcatcgtaatttctcgacgacctttaatgctcttcagaatggtcaccctatgtagtagcaggaatttgttagagaaacggaggcagaaatttgcttctgaagtaattttctgcttaagttttggaactaaaatgatttttccatttcttaaatatgaagggtaatgtatatagacttttaacaagttttgagcttgtgatagttacagtgtatatatgtatgtatatgtatatatatatatatatacacacactaagagtatctagaatggagaacacaaccttcctaaaaaaacctctctgcatatatttctgttttaacttaagtttattagtaggagctacgatacagaggtcatcaccagcatttaatgtctgacctttctaattgcttctgctctttgcatgcatataggagaactcttcataaaactgtagtggggtagtttacagcatgcttgtggtttaatatattctaaatcgctgtcatttaattacaatgaatgtgttttgacatttataaaatatttcaacttatcctttgatttttgttctgtaatctattgctttaagaaattctactaaggtattgattgcaatgtaattgatttggtattactcttttaaaagttacttaagatatttaatgttaattaatctttgtcatttctttgtttaggagatacagaattaacaggtcaagaagaactgatggacataactgaagttgacgagggattttattccagggctgcgtctagcaccagccagtcgggtctatcaaacagtagtcacaattgtagcaacaagacaagtgtaggaaagaaccagagacggtcgggaggaagcaaagctggagcgaaggagagagaaactgcaggggagtcttgcagagatcactttgctcgcaagcaaacccagagagcccagagcgagaaccttgagcttctctctctgaagagactgaccttaacctccagccagtccctgcccaagcccagcagccaaggcctggctaagactgcggccactgtatttagtaaatcctttgaacaagtcagtggtgccccagtcccacgtagcccttctcccgccattggctgtgttgctggagcagatgccaatagattttctgcctgtagtctccaagaagaaaagcttatttatgtgtcagaaaggactgaacttgcagtgaagtgtcaagccggccagcagggacctcctagtattagcgtcactctgtctgcagagtaactgtcacttcgctcctggagccagtgaagctggaaagacggctctgctcccttatgaaagcactgagtcttcatgcctggtcctggcaggagcctggggtcttgaattctgaaggcccccctttgactatgaagggaataatgtctagtttgcagtaagctgagatgtggtcgtgttatttcttgggaactcttttcccctgggtttaagttctttattcttgtattctcctttcctgttacttgttactgttaacgtcctcagtgaggttatttttaataccttgttttttagtggttgtgtatttgccctgggaagtcaaagagagtctgtgagaggactgggctgtagagcccagggggaggagcgagtccatgaagccatgctgctccacaggcatgtgagaaaacagcctcacgtgagagcagtggggatgctacgagctgtgaccacatcatgcttaggatgggacagtgtgctccacaccgcaagttgcctggcaggacagttgcaaggggaagctgggagaatttctgttgcagtccttagaacattaaatagcaaaagtgagattgctggtaggtgaccttctgaagtgtgtgatctggactgcaggcatgaaagtccctttcggtgtctaaagtgtaaccagccacaaagctgttgggctgtgctgctctggaaatcctagttagtttgtatcttagtggtcagagcacacatcatagaagacgtcctgaaaacccctgtaaatcttgtagcacagctaccgagataccagaatgaagcatttatttaatagtaaatgtctgtgaatgaaggaaaccaggtcatgtttcatccacaaaatgtggtgaaagaaaacagtaggtgtgggcagaggacatttgtgcattagcttgtgtttgttcttgaatttaacataagaaagagtgcacttcttgtttgtgagctttaagtattcttgttatgttgtagaaagaattcagctatcacccattcctgccaaccaagcagtaagaaatgtggtaaggcagaagctaaactctgcgtcctctagatggacgcccaggcttggtgcctgtggtctgctcagttggctgacgctcctgtgaggtgcacgtgctgtggtgctacactggggcatgagaggagcagggtcagtggggaggcctgggactctgtctacttctcagctttcctgacttagcacactgaggcctccttaccggtggcctctcgctgtgctcacagaacatgctagtggtcctgtctcaaaccacgtgggtccagctcatggagatgagaaagctgcatgggttgcagagtgcaaagcatttttacacttgagatacattttttaaatgcttacctcctagtttaaacctgattatccaaggcctatgctttttagcataaatgagcttaacattttattttagtttcagtaacagaacgaactgctggcttaaattgtcctcatcaattttaaggtaactagatagtaaaattgataattggaataatctaatagtaatcttttatacagttgaaatgtttgtaaaatgtcactgtgaatttcctgttgtctttttgtaattccttaagaacttttcttaaacatagttactaacagtgttgatattattaagaagaaatttaaagattgtcactaggcaagttgaagtgcttgcttaagcatagagtaagtttaaagaaacattagctggcacaaacaagagatcagaataatgttcagccaccatattgaaacctcattttgatattgttgtagacatttgctacttgtgtggtccaaagaccactggtatcacctagtatcttaataaaacttcaaaatttcgggggcagacctagtaaatcagagctgaccttgttaaactagggatgctagtatccatctgtctttgtgaagacagtttcagagtgctaactgctggtctaatgtagggtcctcagtggtctcacagccctcaagcatgggcattagattctaggtcgtcacaattgtcataggttttgataaccaagtagcttttttaataacattgacatgtgacttcttagagactctcatttcaaatccccacttctcatttgtttctgtaataaaaatgcagcaccttttgcctctcttgttggcaataaatgagcccagcgctgcagacacttcgggtttaagcaggaaagccctctttgctcttgagctgttagatgagacacagaggaacagttgcacacacgtccatcctcttacaaattctgtaacagcttgcacagtgcaatgagtctcaagtttgctccaaatgatttacatcaattgatttcctggggtgtggtgttacatgaacagtaaagttcttttatactacttttgatactatttcaagtaaggattgtgtacatcaggggctttcataccagctgccaaagccggatgctgtcacctgtggcaacagctgttctagtcactttcctactcatctttcaaaggtgagaagttgtgtggctttgtaggtttgtttctattaagatgctagtgtaggcatctcatgggatccagaggaatagcttttaccaactgggattccacacagaactggggtctggcaccccatagttagctctagataggggctttggattgactcaacccctgcacgcctctgacactgggcctggcatgaacctcggcaatccaagtgaagagagaagcagaggatccagctgcccgggtgctgctaccttccacttcctggagcctcgagaaagccccttggcatggctgggacacgcctgacccctttaagtccatctctgtagcacagaacagcaggaattccagaatgactggtttgttttgaaaaggtagtgtttcattgccctttcgattgtaaagcagcaactctgcaaatagcactctgctgttaaaaaaaaaaaaaaaaaaaaaagttgaattaaagggaaatctgtctttaaatcaaaatagatttttaaaaatcccggtttaaagggattgtgcctattttgaagtatcatagttaaaatgttgaatggtaaattatggaggaaaatatatacactctaaaacatgattttaagcaaagagttagagtaagacagctcaatgtttacacccgtgggcacatgagacctcagtaaaggagagcacgctgaggaagcctgtgctaagtattgtaactgacagacaatgcgaaaacacacaatgttggcactaaggcactgtagatagaaattaatgtacaatagtgtcttcccaacccgagtgaaaggctaaaaccccagtcctttagtgagcacgagtttacacttgcacatttgctgctgagtggtagaacattgggaaatggagatgtgtgctttttaatactgctcgtcttcacagagagcactcgtgggctgccttctgtactttgtaacttgcacatatccaaaaagactgagcgtgaacaatttgaagatgttttgtatttttgcagaagcgtgctagtggacatgggcctcagttgtgttttttgggccccaagttgtctgtcttgttggaactggccatctgcctctggcctttccttctgatcatgtgatgctaaactcttctcacaaatacacgtgtcattgtatgcctagtgtttacattcctaagaataaatcttggatatcattatgtgctctttacatttttaaggtttgaaataaactggagttgagttctttgaagttttgtacatttgtataaatgttctccatatgcagtactttatacatcaagtgtttcctcttgttttgttgaaataaaaactaaaagaaaaaaagtgttcttctagatcattctattcactaaaaactgctataaaatctgtgagcttgctattggggcagaagaaagcttgtgtggacatagccacaggaagctgctggggttggcccgccgttaccctcactcctgactttatgtctcaggatgaggaactggaaccgagcatccccactggtgtccatccgaagctgagccccagggccctggcgtggtggctgacttataccagaagcatgagcaaagtggccttcggtgtgggggcatggagacagggaacacattgggtcgctgctagtttccagacagtgggatacatcacaggatttatttcttggctacaggaggtcacagtggcattcctggtctgcatgtgtttactgaaaccaaccccattagaaaggaactgttttagtgggcagttgattatctgtgtgaataattccagctgatcaaaggagtaagttaggaaatattttctgagttactcttggaagacgatttgtagaaaccagcgcctgacgatttagagattattactatgtctgtgaaatctgaactcctagttactgcagagtccctgacacgtagctggctcccctagtacagtctgactgttaatatctacacgcacactttataaccactaatcaggactataaataactagtcattctataatttctcttggattattaccgtaggccttattatacagaggccgatttgtgacttaaattaagcattcaaaacaatctttgaaaggaaacagcaccccattttacaaaagaggaaactgaaacgctcgggcagtgggcgccagatgctagggagcatgccctgaacataggccttacaactctttcttgcttgtcgattactcaaataggatcctaagtaccgtcaaatggacatgtatttcaaattcctttattccatttcataaggttaaaatttaaagtaaaataaagtacaattttcatgaaactaaatgatgctatgttttgtagaatatgatataattgtatgtcattggtaatcagattattattgctatactaaaagtatgctcatttaaattaaaataaaatggttctttagtttttcagattgacagattggaactagtatttgcatttatctggagtaatcattagcgtctgaaataattggtggggaagtaaattgctacaaatgaatgagtgaacaattgagcagaacctttacccatgcatcctgacatagtaaatctaccctatagctcttctactttttttttgcattaaattgacccatatgaataaacattaaaatgcaagatattcattgtagtattgcttgtaaatgtctcaattattccatatactggaatatggcatacccattaaaatccaagtgtgtatatgtcatatacatcgcaagcccatttaattacatttgtgttgagtagttaatgtgtatgcatattctatatatgcagtatacgtgtgtttgttgatacgaaggaagaagttttactcaaaatgtggtcttacatatgggcttggggctcaggaaatagctcagcagttaagagtgcttgctgcctactatagggcctgtgtctgatccctacacctgctggctctaccagctccagttccaaggaatctaatgccctcttttggcctctgtggaaacccaaacacaaatggcatatattcattcagatactcctgccccccacagataccacccacaattaagtcttaatgaccacctacattatgagaaaccaatgcttttgaaaatggagatgtttgggccttgtgctaattcccaagtatcataatcactgtgtgtatgtgaaatttggaagcccgtatttctagtaagtttctcagtttaatacaaagtctggcctagtaactaccagtaatggattaggtatttggtagccgcttgttcttagaaaagacttctcaaggagaagagttctcggtattcttagagaggcttcccaaagatcggatgtcagggagtttattgacagagacctgtagtgaaagacaaaccatcctgacatttttttaaaaaagactatttccccgtaaaagagtacacacccaatagttaacagtctcttttaagcatctctgctactgtttaacttcagataacgagtcaacaaaacaaaataaaacagaacttcctaccctcagggtcaccttggcatctctagctggatctgcaccgtggagtaaggtccatggcaaatgaccatctctgtctagtgggaagcgggtgttggaagagttaatagttagaatttgtggtggcagcaggcagggttcctaaagacccttgctaagccaagcactgaggagtgactcaaggactgcagctattattccaacctgtttagtgcgtgggaagtgaaatggagagtctttgtgctttgacttcatttgtttccgttctactcttttcttcatggacttgaattactactccttttcaggactggtaagtcagtgtgtaggcagagtgtatccatgtgtttctcctgacttcaggatcaccctgaagatccccacagtttcatctgaagcaccccaaccccagcagctcttgggcctaactgggtgctccactacagttgttttgcaatgtgctgtgctcctggtctctctagtgaggcttttagtacacatgctacaggtgtgctttactggacagagtctgactctagtccaggaaagcagcagaaaccagaggctccgtatgccttctcatgcattccagggaaatcagaaaaccagtccctccctttcgtctgcatggaggagaagactgtgaaatgtgatcagttgatgtggatctgcgcaagacgccataaattgtgacatcatgtttctttgtcctcgaagctatagtgggatggaatggtttgtttggcattaacttaaagttttctacagcatcattctctcttgtgtatctagtgcactttagcaataatgagactccaaaaaggcaacaaaataggcaagccctgtcttcatattacacattcttcttgcctgggttgcagtggctgcagctaggtacagtgctgtgcagtgccctgagaacaccctctgaaggctcttgctctctctttatccaactcctttctactctgagcctctcagagttccacataatcatccattgcagtttcttctgtctcaccacttaaaaatgagacccctaccataatctggcaccactttctctcctgttgttaattccacactagttcagaatcctgtttcgagaattacttctttctctaagccatttaattcatttgcaccagtcaagttgaaattcctaaaatctttgaaaggagaaaacaatccaaaaagaaagccacaagctatacctgcaataggaaataatacattttgagttcactgaagaggagaaaccatacaagcaatactgcacacagtgctggcatgaactagaagaagctgaggtgttaatgccccttcagggttggtgctagaggacagtggagcagagtgagacatgcaggccgtctcagggagccatctcaggtgttgatctgcatcctttacacacagccaagtgcttggggacctggaattctggactagatgagtgtcggaatttgggagctagaggtatgattggacttctgaaaatgggcacagagtgtgagaataattgcaacataaatgctagacacaagcaccattgtgaaggatgagggtgggtaggggtgtcagtgctctttggtgtccctgttcattcaacagatatataagtatgaggaaagactaccaattacgctggatcaaggctatgcacagatgtcagcaagatgggcccccttccatcaatacatcctagtcaaggagagacggttgtctgtcctcccagaaaatgtttgatcacacagtctggatttaggtttgccttccccaaatgtcatgtctctatgtgcaacatttgatactgtgtttgccatcctggttctctccgaaggtccctgaagaacctcaccttaatatgtaaggagagagagagttggagtttcatttctagtaacaactcaacagacaataacccagaaaggcaacttgagcaaggaagggctacttttggccctggcgtgaagccagaggcagtccgtcatgactgggaagcagtccgccatgacaggcaagttctgcagcaggaccgcaaagtcacactgcatctgcagcaggaccgtgaagtcacactgcatctgcagcaggaccgtgaagtcacactgcatctgcagctggactgtgaagtcacactgcatctacagcgggactgtgaagtcacactgcatctgcaacaggaccgtgaagtcacactgcatctgcagcaggaccgtgaagtcacactgcatctgcagctggactgtgaagtcacactgcatctacagcaggactgtgaagtcacactgcatctacagcaggactgtgaagtcacactgcatctgcagcaggactgtgaagtcacactgcatctgcagcaggactgtgaagtcgtactgcatctgcagccaggaaggagaaagaaatggatgctggtgccagcttgctgctttctcttactcagtctgacaccccagccaaaggaaacctgccaccctatgcagggtgggccttctctcatcagatatctttacagaaacaccctcacagatacactcacaggtctatttctgtggtgagtcttaatcctgacaatggaaattaaccatcacagtaattaacatcaaatcttccattagataataaacaaaaacttaggaaaagactgtacatttgtttattgtgtatgtggcacgcactcttgtcaaagggcaatgcctaggggttgattctcttccaccatgtgagtcctaagaatctaatttgggtcagacttggcatcatatgcctttgcccattcacatctcactggcccaacaaaaaccaagttctaaaaccaacttctctcctggggatgctggctggggctagaagaaacacttaagatgtagcttactgttgctcttcttattgatccaggaacctaaagattggatgacaaagctgccaagtcatgagagacacctgagaaaatgccttaggttaggtcagcggttctcagcctgtgagtaatttaccagatatcctgtatatcagatatttacattatgattataatagtatcagaattatgttatgaagtagcaccaaaagaaatttaaggttgtggggtcaccacagcatgagtaactgtattaaagggtctcatcatgggctagagagatggctcagtggttgagagcactggctattcttccagaggtcctgagttcagttcccagcaatcacagttgctcccaaccatctgtaataagatccaatgtctagtcctggtatgtctgaagtcagtgtactcatatacataaaataaacaaataaatctaaaaatctaaatgtaaacaatttgggggaggggaggtcacagcattaggaaggttgagagccactggcttagggccttaaacatctctaccataggagtaagcatggagtaaaattaaaactctctcacagacacacagaactcaggaacccttcagtaatcccagtccagggaaggtgtgtgctgctgtctagcacttgagaggatgaggcaggaagacactgagttcacaatcagcaacgtctgcatacacagcagaactgtctcagtcccctccccatgtcccaatttctgaagctgggttcaaatacacctctagctgccgggtaaaacacatctcctctgggagatgaagcagtgcatcatcgtgtagcagtttctcaaaaacagtgcttagcaagaaggaaaagcagcctgaaggtttatagcaatgtaacactcagaaaaataacactgcgtgcaattccttgaaaagcaagcttgaggccactgaacttttaagttgggctttggctctggtctgagcacttagctttctaagatgctcctgcctttcctgctctgccaactgcttatactcagctgtgcagtttatgctgagcaccttcttcgggcattcaatacagaccctgcaatacagtaaggtagtacacaagccacacacgagctttgacagtcagtaactaatgagcatccctagccaggcaagatacaggctgaatcaagcacacgggtgtggaaaggacactggacccttgtttcccctggatctcacccagtgcatcatccctttgtcattccctttgttgaccttactctctgttattctgctgtaataactcataaccatgagcaccactgcaaactgagcccttggaacccttttgtgagatgtgggagtctgccagtacagaggatagtctggggaaggggcacatattccatagctatttcttccatttggaatttgctggggtttggcacaaattagggcaaagggcccctgaaaagagtcactgtgaaatatcagagaagcaagcatactagggcaacatcacaaagaactcgaaacaaatgaaaagctaccaaaccagctggtacttgagagagtcaaaattccagtaagggggagactcagagaagtgagtgtggccttgatagcgatccccttaagtgaatgtgtttctgtcttcatcaactgcgcagagaagaaagactgatgagagaggagagagaagcagaaagatacagagacagagaggttgaaaaccaggcttctagtaatgaatgggcaaaaagaaaaagtctgtatttaaggacccctcaagaggaagagacaagtgtatatctcaaaggctcacttccactcagagctcagagggtgcatggtgctaagtcacagcttcagtgtgtgcaaagccctgggtttgatccccagcaccagaagaccacaacaaggtcacagaaagacctagaacaccaaagagctttaccctagaaactgatgggtcagagtaaattaagcattataaagttgcaacctggatcaagtcaactgaattattgattagattaatgcaatctacacatacccactctcttctcactaggacatactataatccctttttgtaaaatgtgtcatacacagttgtagaattatgtgagaattacaaatcctcagaatcactgaggtgacaacagaattaaaacagattaacaaagccaggtgtggtggtacatacctgtaatcccagaatttgagaagttgaggcaagagaatcaggagttccaggctagcctgggctgcatagcaaagtgcaggccactctgggctttacagccagacccagtctcaaaacaaaaccaaaaagaagctgaaccacagatgacccaactgtttgtgctgtaagatttgagtgatgtcacatggggaattttaggagagtatgattttttgttttattttctgaatatgtttttgtaaaggcatttgggggctacagatggctcagtggttaagagtacatattgcccttgcataagactggagctcagttcccagcacctacgttaagagccttacagccacctgtaactccagctctgggggaatccactgccctcttctggcctctgtggatacctacaggtacaagtgtgcatgcactcatgcacaaacacacatgcacactccttaagaaaataataagttgcgaggtggtggtggtgcacgcctttaatctcagcactcgagaggcagaggcaggaggatttctgagttcgaggccagcctggtctacagagtgaattccaggacagccagggctatacagagaaaccctgtctcgaaaaaccaaaatgaaagagagagagagagagagagagagagagagagagagagagagagagagagagagagagagagaggagagagagagagagagagaggagagagagagagagagagagagagagagagagagagagagagagaggagagagagagagagaggagagagagagagagagaaagaaaaggaaagaaaagaaaggaaaggaaaggaaaggaaaggaaaagagaaaagaaaagaaaagaaaagaaaagaagaaaagaaaagaaaagaaaagaagnnnnnnnnnnnnnnnnnnnnnnnnnnnnnnnnnnnnnnnnnnnnnnnnnnnnnnnnnnnnnnnnnnnnnnnnnnnnnnnnnnnnnnnnnnnnnnnnnnnnnnnnnnnnnnnnnnnnnnnnnnnnnnnnnnnnnnnnnnnnnnnnnnnnnnnnnnnnnnnnnnnnnnnnnnnnnnnnnnnnnnnnnnnnnnnnnnnnnnnnnnnnnnnnnnnnnnnnnnnnnnnnnnnnnnnnnnnnnnnnnnnnnnnnnnnnnnnnnnnnnnnnnnnnnnnnnnnnnnnnnnnnnnnnnnnnnnnnnnnnnnnnnnnnnnnnnnnnnnnnnnnnnnnnnnnnnnnnnnnnnnnnnnnnnnnnnnnnnnnnnnnnnnnnnnnnnnnnnnnnnnnnnnnnnnnnnnnnnnnnnnnnnnnnnnnnnnnnnnnnnnnnnnnnnnnnnnnnnnnnnnnnnnnnnnnnnnnnnnnnnnnnnnnnnnnnnnnnnnnnnnnnnnnnnnnnnnnnnnnnnnnnnnnnnnnnnnnnnnnnnnnnnnnnnnnnnnnnnnnnnnnnnnnnnnnnnnnnnnnnnnnnnnnnnnnnnnnnnnnnnnnnnnnnnnnnnnnnnnnnnnnnnnnnnnnnnnnnnnnnnnnnnnnnnnnnnnnnnnnnnnnnnnnnnnnnnnnnnnnnnnnnnnnnnnnnnnnnnnnnnnnnnnnnnnnnnnnnnnnnnnnnnnnnnnnnnnnnnnnnnnnnnnnnnnnnnnnnnnnnnnnnnnnnnnnnnnnnnnnnnnnnnnnnnnnnnnnnnnnnnnnnnnnnnnnnnnnnnnnnnnnnnnnnnnnnnnnnnnnnnnnaagagaagagaagagaagagaagagaagagaagagaaaagaaaaggaaaaaataagtcctttggagcaaggcatgttgtattacaactgtaatcccagcactctggagatagagagttgaggtggcctgggctgcagagtgagttcacatgtggacttggattacatattgagaccctgtcacaaatccaaaacaaaactggtacaaccacaatggaaatcagtgtgatggatccttataaagctaagacagccactgagccagctttacaactcctggacatagagcccaaggactctgtgccctacttcagatccctgcatatgcatgtttactgtggcttcgttcactcggaacaagccttgtccatcagtgatagtgacatatgttccagagaacttaattcaaataaacaagaataacagtatgaaatttgaaggaaagtagatgggtctggaaaacattatgctgagtgtgtagcccagatccagaaagacaagtgctgcttgttgtcctttacaggcaggtcctagctgcatgctttagagtagtctgctaaacagtgaatactggtaaaggtctgaaaggcagaaaggggctgttagagtatggaggggtacagcagaccacataacacatgagacggggggcagaggggctaagcagggaaggacaggggtgatagaaaagagggcaaggtaactgaaagtaagaatgggaccatctagtgattgccatatccagggagtccatcccataatcagcttccaaacgctgacaccattgcatacactatcaagatcttgctgaaaggacccagatatagctgtctcttgagagactatgcaggggcctagcaaacacagaagtagatgctcacagtcagctattggatggatcacagggctcccaatggaggagctagagaaagtacccaaggagctaaagggaactgcaaccctataggtggaacaacaatatgaactaaccagtaccccggagcacttgtctctagctgcatatgtatcaaaaga

SEQ ID NO: 1587 - DNA, 5596 bp, Mus musculus
cggcagtggcggctgtccgggctgggttgtcagtcagagagaggagggaagatggctcgcccggactcgtgctgctagaaggagaggggcaggtggcgcggctgccggcggagcgcagtcgcccggtcgccgtggtcgccgtggtcgccgtggtcggttgaaggtttgaaacaaatgtggaaagatgttcacctcagagataggagttgtggaagaatggctgtcagaatttaagacactcccagaaacatctttgccaaattatgccacaaatttgaaagacaagagttctttagtttcatctctctataaagttatccaggagccacagagtgagttactagagcccgtgtgtcaccagctctttgagttctaccgcagtggggaggagcagctgctgcgcttcactctgcagttcctcccggagctgatgtggtgctacctcgccgtgtcggccagcagagatgtgcacagcagcggctgcattgaggctctcctgctgggggtttacaacctggaaatagttgacaaacacggacatagtaaagtattgagttttacaattccatctttatccaaaccatctgtatatcatgaaccttccagcattgggtctatggcgctgacggagagtgcgctgtcccagcatggcttatcaaaagtcgtgtacagtggaccccatcctcaacgggagatgctgacagcacagaacaggtttgaagtattgacattccttctgctgtgttacaatgctgccttaacctacatgcccagtgtctctcttcagtcactgtgtcagatttgttcaagaatatgtgtctgtggctatccccgacaacatgtaagaaaatacagaggtgtgagcagcaggataccgatttcatccggcttcatggtgcagatgctaacaggagtgtattttgccatatacaatggagaatgggatctagctcagaaagcactggatgacattatatacagagcccagctagaattgtatccagagcctctgctggttgctaatgcaataaaggcttcattgcctcatggtgccatgaaatctagtaaggaaggtacaaggtgtattcaagtggagatcacaccaacctcctctagaatatcaagaaatgcagttaccagcatgtcaatacgaggtcacaggtggaaaagacatggagatacagaattaacaggtcaagaagaactgatggacataactgaagttgacgagggattttattccagggctgcgtctagcaccagccagtcgggtctatcaaacagtagtcacaattgtagcaacaagacaagtgtaggaaagaaccagagacggtcgggaggaagcaaagctggagcgaaggagagagaaactgcaggggagtcttgcagagatcactttgctcgcaagcaaacccagagagcccagagcgagaaccttgagcttctctctctgaagagactgaccttaacctccagccagtccctgcccaagcccagcagccaaggcctggctaagactgcggccactgtatttagtaaatcctttgaacaagtcagtggtgccccagtcccacgtagcccttctcccgccattggctgtgttgctggagcagatgccaatagattttctgcctgtagtctccaagaagaaaagcttatttatgtgtcagaaaggactgaacttgcagtgaagtgtcaagccggccagcagggacctcctagtattagcgtcactctgtctgcagagtaactgtcacttcgctcctggagccagtgaagctggaaagacggctctgctcccttatgaaagcactgagtcttcatgcctggtcctggcaggagcctggggtcttgaattctgaaggcccccctttgactatgaagggaataatgtctagtttgcagtaagctgagatgtggtcgtgttatttcttgggaactcttttcccctgggtttaagttctttattcttgtattctcctttcctgttacttgttactgttaacgtcctcagtgaggttatttttaataccttgttttttagtggttgtgtatttgccctgggaagtcaaagagagtctgtgagaggactgggctgtagagcccagggggaggagcgagtccatgaagccatgctgctccacaggcatgtgagaaaacagcctcacgtgagagcagtggggatgctacgagctgtgaccacatcatgcttaggatgggacagtgtgctccacaccgcaagttgcctggcaggacagttgcaaggggaagctgggagaatttctgttgcagtccttagaacattaaatagcaaaagtgagattgctggtaggtgaccttctgaagtgtgtgatctggactgcaggcatgaaagtccctttcggtgtctaaagtgtaaccagccacaaagctgttgggctgtgctgctctggaaatcctagttagtttgtatcttagtggtcagagcacacatcatagaagacgtcctgaaaacccctgtaaatcttgtagcacagctaccgagataccagaatgaagcatttatttaatagtaaatgtctgtgaatgaaggaaaccaggtcatgtttcatccacaaaatgtggtgaaagaaaacagtaggtgtgggcagaggacatttgtgcattagcttgtgtttgttcttgaatttaacataagaaagagtgcacttcttgtttgtgagctttaagtattcttgttatgttgtagaaagaattcagctatcacccattcctgccaaccaagcagtaagaaatgtggtaaggcagaagctaaactctgcgtcctctagatggacgcccaggcttggtgcctgtggtctgctcagttggctgacgctcctgtgaggtgcacgtgctgtggtgctacactggggcatgagaggagcagggtcagtggggaggcctgggactctgtctacttctcagctttcctgacttagcacactgaggcctccttaccggtggcctctcgctgtgctcacagaacatgctagtggtcctgtctcaaaccacgtgggtccagctcatggagatgagaaagctgcatgggttgcagagtgcaaagcatttttacacttgagatacattttttaaatgcttacctcctagtttaaacctgattatccaaggcctatgctttttagcataaatgagcttaacattttattttagtttcagtaacagaacgaactgctggcttaaattgtcctcatcaattttaaggtaactagatagtaaaattgataattggaataatctaatagtaatcttttatacagttgaaatgtttgtaaaatgtcactgtgaatttcctgttgtctttttgtaattccttaagaacttttcttaaacatagttactaacagtgttgatattattaagaagaaatttaaagattgtcactaggcaagttgaagtgcttgcttaagcatagagtaagtttaaagaaacattagctggcacaaacaagagatcagaataatgttcagccaccatattgaaacctcattttgatattgttgtagacatttgctacttgtgtggtccaaagaccactggtatcacctagtatcttaataaaacttcaaaatttcgggggcagacctagtaaatcagagctgaccttgttaaactagggatgctagtatccatctgtctttgtgaagacagtttcagagtgctaactgctggtctaatgtagggtcctcagtggtctcacagccctcaagcatgggcattagattctaggtcgtcacaattgtcataggttttgataaccaagtagcttttttaataacattgacatgtgacttcttagagactctcatttcaaatccccacttctcatttgtttctgtaataaaaatgcagcaccttttgcctctcttgttggcaataaatgagcccagcgctgcagacacttcgggtttaagcaggaaagccctctttgctcttgagctgttagatgagacacagaggaacagttgcacacacgtccatcctcttacaaattctgtaacagcttgcacagtgcaatgagtctcaagtttgctccaaatgatttacatcaattgatttcctggggtgtggtgttacatgaacagtaaagttcttttatactacttttgatactatttcaagtaaggattgtgtacatcaggggctttcataccagctgccaaagccggatgctgtcacctgtggcaacagctgttctagtcactttcctactcatctttcaaaggtgagaagttgtgtggctttgtaggtttgtttctattaagatgctagtgtaggcatctcatgggatccagaggaatagcttttaccaactgggattccacacagaactggggtctggcaccccatagttagctctagataggggctttggattgactcaacccctgcacgcctctgacactgggcctggcatgaacctcggcaatccaagtgaagagagaagcagaggatccagctgcccgggtgctgctaccttccacttcctggagcctcgagaaagccccttggcatggctgggacacgcctgacccctttaagtccatctctgtagcacagaacagcaggaattccagaatgactggtttgttttgaaaaggtagtgtttcattgccctttcgattgtaaagcagcaactctgcaaatagcactctgctgttaaaaaaaaaaaaaaaaaaaaaagttgaattaaagggaaatctgtctttaaatcaaaatagatttttaaaaatcccggtttaaagggattgtgcctattttgaagtatcatagttaaaatgttgaatggtaaattatggaggaaaatatatacactctaaaacatgattttaagcaaagagttagagtaagacagctcaatgtttacacccgtgggcacatgagacctcagtaaaggagagcacgctgaggaagcctgtgctaagtattgtaactgacagacaatgcgaaaacacacaatgttggcactaaggcactgtagatagaaattaatgtacaatagtgtcttcccaacccgagtgaaaggctaaaaccccagtcctttagtgagcacgagtttacacttgcacatttgctgctgagtggtagaacattgggaaatggagatgtgtgctttttaatactgctcgtcttcacagagagcactcgtgggctgccttctgtactttgtaacttgcacatatccaaaaagactgagcgtgaacaatttgaagatgttttgtatttttgcagaagcgtgctagtggacatgggcctcagttgtgttttttgggccccaagttgtctgtcttgttggaactggccatctgcctctggcctttccttctgatcatgtgatgctaaactcttctcacaaatacacgtgtcattgtatgcctagtgtttacattcctaagaataaatcttggatatcattatgtgctctttacatttttaaggtttgaaataaactggagttgagttctttgaagttttgtacatttgtataaatgttctccatatgcagtactttatacatcaagtgtttcctcttgttttgttgaaataaaaactaaaa

SEQ ID NO: 1588 - protein, 519 aa, Mus musculus
MFTSEIGVVEEWLSEFKTLPETSLPNYATNLKDKSSLVSSLYKVIQEPQSELLEPVCHQLFEFYRSGEEQLLRFTLQFLPELMWCYLAVSASRDVHSSGCIEALLLGVYNLEIVDKHGHSKVLSFTIPSLSKPSVYHEPSSIGSMALTESALSQHGLSKVVYSGPHPQREMLTAQNRFEVLTFLLLCYNAALTYMPSVSLQSLCQICSRICVCGYPRQHVRKYRGVSSRIPISSGFMVQMLTGVYFAIYNGEWDLAQKALDDIIYRAQLELYPEPLLVANAIKASLPHGAMKSSKEGTRCIQVEITPTSSRISRNAVTSMSIRGHRWKRHGDTELTGQEELMDITEVDEGFYSRAASSTSQSGLSNSSHNCSNKTSVGKNQRRSGGSKAGAKERETAGESCRDHFARKQTQRAQSENLELLSLKRLTLTSSQSLPKPSSQGLAKTAATVFSKSFEQVSGAPVPRSPSPAIGCVAGADANRFSACSLQEEKLIYVSTELAVKCQAGQQGPPSISVTLSAE

SEQ ID NO: 1589 - DNA, 90487 bp, Homo sapiens
tttactttcagatcagagttcagtcccttcattttacagataagaaaactgagaacacacatcttacaagagcgatgtgagctttcagctcaagcctgacttctggttcaaggctctttccattctctcactctgcatcttttataatctctctgggtcttctcattatcttacttcagcctcaaaattccacttgctcagatctctggtatctcctaggcaaggaaaaagagggatgaagatttcctctgcaggcacacataggctgccaacactaggctattcatccgaataaggaaaacattctcagtttctgcaaacacaaggcgcaaattgcacaggaataaaagcaggcttatattaaagcctggctatatctcattggctgagctggatggatctgaagaactggctcaccaggagaggtcagcttgatccatccaactatgccacaggtattccgtgtggcaatctcaataggtgatggaggtggccaaaattaggttctactagggttagtggtggcttgggccacctgaggaatgtagggcacttaaggtttccatgcttcagggccagccttggggaaactgggaattgattgacctttcttttaagtgacctcatacccacaccttcttccaaggttccttcttccccttccatctctaagccctggcttagcctggagccactctctttccttttgaatgaggcttcattgaatgtggtcccacatttcagactgtccttggccctctgctcagttgaggcttaactatcctttagggtttcccttccagtgagatttctgcaggggttctgatatctaactgttcagggtggctacttagtgtgtaatgtgttacccttcccaagtacttgccccattttctcactcttggctactctctccacatttacaatgtctcagtgtgataaatagaccctgtgatggaatgttcatatactccagtcagtctgtaatgcaggcagcaagggaacacccacctagcatcccctcttggttaggatgcacaggaaggcaattcagagcctctttttctaaaacagaaggagcttcccattggccgctgttgcgtctttggacaaaactctgacagatgggatttgaggttaagtaaacctgtctttgtccctcaacaatcatcatgttaccagaggttcatccacattttcagagaaactgttttttctatgagttattcagagaaagatctttctgggagatttttatttcatagtatcatcaaacaactgttatagttcacttttcccttgtttatgaggactagtgttatctgtagcagtattaaacattatcctattttatggctgataggttaaattatgtagttgtagaaactgtcatcaactattcttaagccagaaagcttgaaaatccagctggttttcattctctacactcaaccccattcctgccctctgcccccagccctgctgggacattctcttcccggaagtgctctctccacaatgtcagtgataatatatcctagagcgaaaccagcaggactgaccagaaaccacttagtccagaaaaaaactctctcaccaccaccttcaggccgggcacatggaggcatctaacgtatgtagactgactcacggtagggacttaataaatggttgttgattttaaatctcaatacagctgaggaacgatttgcaatgaaacagacatgcagagttgctttaaaattgcagagcacgaaaaaatctgtgtgagtcatcagggaaatgcaaattaaagccacaatgagatagcactacacacccaccagaatagctagaatttaaaagactgataatacaaatattggcaaggatgtggagcaactggaactctcatattccactggtgggtgtgtaagtgatacaattactttggaaagtcatttggctgtattatataaaggagagcatatgcctaccttcttcccaacaatacccctcctggatatataccacagaagagtatgtagatgtgcaccaagaggcacgtacaagaatactccaaacggcattcttcgtaatagtctcaactgaaaagaacccaaatatccatcagctgtaggactgtcaaacaaatcatggcatattcatatagtagaatacctaacagtaatgaaaatgaacacactacaattccaataagaaatatagatggacttcacaaacacaaacttgatagaaaaaaaccagacacacaagcatatatcccatatgattccacttacatgaaatttagcaggcatagatgaactaaaccatcatgagtcaaaacagatgttgtctttgagaataagagacagggtgatgattggcaggcggtccaagggagcttctggattgcatcaatattctttttcttgacctggttgcagtgtttgcctgtaaaaatccactgaactaatcatatttttgttgtctctactttcctatatgtatattatacttcaatgttttttttacaaaagttccagttgcagagcttgtaggactgatccaggtcaacatagtctgccccctttgaccctttagattcatcttatttccttcaacagttgctttgattcttctcagccttggttgtgtcttactgttcatggtccccagagattgagtcctccctggatactcttccaggctcagatatctacatttcctcccactgccctccccatttttttcccctaaagccccacactttcttagggacctaaccaattaatcttagctaagttgctgatgactaatgtgacttctcatcctggtgcaactcaactttgaaaaacaccctcaagagtgctttaaaggttagtatcatggtccaacccacaggggtagaggttttttggatgatgccctttcaatgacagggtagctggccctagacatgtctatgctgaggacttgcttcaggtaagcagagaagatgagagaataagtgctttgcctctgccagcataacaggggttttgataatgggatgggtcacttccacatggtggtagaggaaatggaagccacacttgttcttattgaactttgatgatgtactcgcttgctgaatttttttttttttggcataagtatcagggtgtggtgctgatgactaagtaaatgagaacagaattgaaaaaatggaagtattactcatacattggactcccttagcacagagttacaaaccagcgagagtcagctggcaaaactttttgggggtatgcctctttctggcatttcatccctcctcttgcagctgggccgagttcccaaactcaccctcccttcatccagtgcttgtgcttgttgaattcctttgtgggaaccacttagcaaaggaaccaaggaagtgtgtgccttgattgctgcctctgctctctgggtgaggggttaacacatgggaaatgattttggaaagataaaaggtgatacacaatgaagtgttaaactgcatctaatgaatgcagccagtggtcagaaacgggagaagtcacattttccaatccttggcctgtatgcttggggacaggtgtgtaaacctgaaaaagattcaaacccaaccaatataagatggaggaggaaaatggccatcttttcatgtgctcctttaacctgtctttttgaaggtcctccattggccaagcactatactattgcagggggtccaaagatgacaaaaaaagttcaacttcttctgcgggagtcagtttatcatatttacctatgtattttccccatgttattttctgttcgctgggccaccatttgtcagagaaaatctgtatacaagttcatgcttctatactaaatactcattagcaaggtcttttgcttgtcagcaataaccagagcttctctgtggaatttatgagaacattttaaagaattttgaataatgcattagctaaaagtgaaaggaagaatgtttaactgaggttcacttaggcagaattaacaataagcaaggcacagtctgctgtgtcttcatctaaagaaataatgtacacttctgctttttttttttttttttaagacagtatctcactctgttgccaggctggagtgcagtggcacgatcttggctcactgcaacctctgcctcctgggttcaagcgattctcctgcctcagcctcctagtagctgggactacaggtgcccgccaccatgcccggctagctttttgtacttttgtagagatggggtttcaccatgttggccaggatggtcttgatttcctgacctcttgatctgcctgcctcggcctcccaaagtgctggaattacaggtgtgagccaccgcgcccggccacacttctgttttttttttttttttttttttttaataaaaccaacacttgtttattgtagaacatttggtaatttgaaaacatgtatgaagaagaagataaaattcacttatgatttctccatgcttatatgttgctgatatatcctcctgacatgaacacttgccagatagtgaccatgtcatatactgtgcagtttgtaaccatctgtttcatctaacatgatgaaagaaatgtctttttcccatgtcatcaaatatttttcaaaaacatgatatataaaagctgcataataatcctctcctgacaggaattcttctagaagacattggttaataaaatgtcttagaagataaatgtggatatttttcatttccagtcatgtgagggtagcagttagtcattatgttttccactcctatctatatgacctactcgtaaatatgaaccaggttggtgcagctattaaaagacaagagaaaggagacgtttttccccttaaaatataacattataaagttttaatttatgtcttgttgtttaagatgtgaagaatgttttcttcttttgagagatgttactcctagaaaaaccaaaattctcttcacaaaatgcaattggtccagcttctttcactgaatgcatgattctggaagtctacgtattggtttacacaggggtgaaagacacaatgatttacttagaataggtgatggagatgggaatttcggggactctgggaacagctgcagttggaactcacagatgttgaatgcaaacactgggaactggagcaattcagtgcagctgcaggaaatggattatctcattgtcctttccacaacaggacctcattgatccccatctttgttaccgtgactcattccattgtctctacttctgccactcctttgttacctattacttcaccatccactttatacgtcttgacgctacctaatggcttcagtttactgaaaacgtgccctttttatagcttctcagggcttctttctactgactgattttttagcttctgcttccaccacgtgattttctcttcctatttccagttcaaattcttgaaagagagtgggtgttcatgtcaggtcacctcttgaggttggctgcccttgggttatacagttcatgaagggggttgtatggtatagatcatggctcaggttgctgcctcagctgggtccactggctggggtagttcccttaaaaagggaatctgatatagcaagcccttgaatgacctctcaggcacactctttttgttttgacttcatttctttgattttcttttttcttaaagaatgtttaacataccacaaaagcaacattttgacatatttttcatgttttttttaaacaaaattctttttaatttaaaataatcatgttatctattttaaccattttaacaacagttgttgtccaattgactttaatagaaatatataatatttgaactaggccgggcatggtggctcatacctataatcatagcactgtgggaggccaaagtgggcagatcacttgaggccaagagttcgagaccagcctggccaacatggtgaaaccatgtttctaccaaaaaaatacaaaaattaaccaggcacggtggcacacacctgtagccccagcaagtcaggaggctaaggtacgagaatcgcttgaacccaggaggtggaggttgcagtgagctaagatggtgccactgcactccagcctgggtgacagaatcagactctgtctcaaaaacaaaacgaaacaaagaaaggaaaagaaaaagaaaaaaagagaaagatatttgaactaaatttttcttaaaattcctgaaatttaatgtcatagggaaaatgtttatgtttataatgttcaactggcacttttatacagttatttgcaagaagataaatgcattttaatagttactttagaattatgcgtgtggatatcagagactagcaaagatgagcaggaaagatctggaatatgttgacttttataaagtaggttaaaagcattttccttttgaaacagaatgttctcttaggcattttttctggtgctttgcgattaaaatataaacggctatgtgtaaaacttaactgcagactgttattgttggaaattatttttatatgcacaaattgtgatggaaaggagagtagactggaaacataaatttgtgctttcgttttactctgacttagagggaagacaacttaaattgccttctatactaccttaccactgcaaaatgggaagtgaagtcaggcagtaaactgcttcctgtcttcttgcaggaaggaaacaaattatatataaatatacatagccaaacttcagtttctctccactcaatctatcctatgcacggcactgatttggcactagtaacatgttatattatttcccttttgtcaaccttgggtgtatattagaaccacttgggaagcttttttaaaaacccaatgactagcctcacacaccaatttatttatttatttactgtggggtgcggtttgagtactgataattttgaaaggcatcctaagtgattctaatgagcagacaggaagccacaaggcaaaaggagaaaatctgaacaactgagcttgccttcaaggtgttctattatctatctgcaacctagcttgccaggcttggctgactcaagttgcctcccatgccctctgaacattgcttgtgcttcccctcttgtgttatttctccaggcattctgggagttactttctcaccattttatctggttcaaattcctccccagttttctagacccagcccattttgcctttttcatgaagccttccctgactgcccttgactgcagtgcttgcatcctcctctgaaaacacagcggctaatgcctagaaaatcatttgaacaatgaatcgattatgtactgccttatgtaatctctccactgctgcattaaataattactttaatctttgcttaacctttcatctgtttgttatgcagctaactatactataagcaagcttctagcattcatctgtatccttgacaagccacgtgccttgtacagtacaggaagtcaataatatttacctgtcccttccatcctgacttccacaggtttggttcgagattctctcctggaatcttgtcctggtcttggctgggcttcctgccaccagaaactttggctcttcaaatcaggtcaacacattactggcacacatggccaatggccagtaaaactgatggtgtgtgtgtgtgtgtgtgtgtgtgtgtgtgtgtgcatgcgcgtaggtgtgcactcttttgcccactcttgtttctctctatcttatgatctggctgactcggtttctttccttccttggtccctcactctcctactcaatgggacttgacggcagaattcaacgtctcaggttttgactgcttgtgttctctaagatgaataacatgctgcctggatcttcctctccctatttctttgagtaaacacttgtcctgaacaggctctggccaaggggacctaaattaagtcagtctgatctgtcaagaatttcctctctaccctgtttttttttctttggattctcaccatttaaaagaaacctgattgcattgtccacatgattaaaagctgttgtctgtccctcattgccttaagaagaaaatctaaacctgagctatccaatatgggagttgttaaagttaaaattaaaaattaatgccagacatggtggttcacacctgtaatcccagcactttgggaggctgaggtgggtggagcacctgaggtcaggagttcgagaccagcctggccaacatggtgaacccctgtctctacaaaaaatacaaaaattagctgggtgtggtggtgagttcatgtaaccccagctactcaggaggctgaggcaggagaattgcttgaacctgggaagtggaagtgcagtgaggtaagatcccaccactgtactccagcctgggtgacagagggagactctgccaaaaaaaaaaaaaaattaaaaattgagtttcagccgtgtatggtagttcatgtctgtaatcccagcactttgggaggctgaggtgggaggatcacttaagcactctaccccagtttgggtgacagagtgagaccttgtctcaaaaataaataaataaataaatacattgagctcttcagtcacaccacatttcaagtatttgatagccacatgtggctaatggctactattttggacaacacaaatatagaacattttcaccagtgcagaaagctctgctggacagtgcttgtctgaatatcttagtgtagcttgtgaggtcttttacaatctcacctcaaccttttgctccagcccaatttttggccgttcctcatcatttaaccccatctaccttctcaacattccacaatggctctgtgccctttcacagctccatgcctttgaacatggtgttctccctttctgaaataccctttgactttcttctctggcaaactcccatttaccttttaagatccaactcaaacattaccttccttgtggagttcgctgactttcctaaacagtcatttcttgtcctctgtttccattgctcattgaaccaatctctattgtccttatcactgtagtttgttattatttactcattaatctgatcctccctttggagggggatcctatctgttttagcaatctgccctaataattacctgaaattgtttgcttgatacccttttgatatcaagtaatatatcttcttatttatgtgcttgttatttatgagttcagcatgtttgaaaagttcacttagtgtttctggagaaatcctgcccatttctagtgtaaagctagaatgaacttcctgtcttctagggtggaggtcagtttttcttctaattaatcctgaccagacttgagaaggatgtggtaggaggggtttacaaggtcaaaaacagcaggactgtctgcaggcgcaggttcaggtgttctcgggttccagttattatacaaaatatttagtatatgttcagagaaaaagtagggaggaatgatggaaaaaataaaaacaacccccatggaaagaaaactgaggcatcgtatttgactttttccaggctaagcccaaaagcaatgatgtagtgagggggaagtttgtatttccattttgcaaaaacgtaatttttttttcctcccgggatttgataagattttgataaattcttgtgaatttaattacagggaagtaaatcctactgactagtaaattatcaatttgtttctcttttctcacaaaagagaaacaaattgatacccttcacatcatccggtaaggtttatttttttctgagaaggccataagccctaacggctcagaatctaagagaccttcgctgattgtcatcgcctagcggccaccgcaaaccttacagtcaatcaacttccctcggacgcccggatcacgcccattgctcagaccacgcccactcaaggcgcctcatggctccgccccaggcccagcagaagaagattctcattggtggagaagttgttctgatcccgccccggaggacggcgataggctgaactggcgtggggcggtggtggttggctgcttgaggacgggtccctggtcgtgcctgtcagagaggctggcggcagtggtggctctcccggctgggttgtcagtcagtgagaggagggggaagatggctcaccgggacccgttctgctaggaagaaggggagcaggtggtgctgctactcgggaggaagcagagcagcctccgtcgctgtcgctgagagcctcacgagtcgaggtcctgcaggtggagctccggcagccgccctggtgagtccagccgagagacccacgccgggcccccagggcgtccggcaacggataacttttttttgtcagggaggagccggggcgaggcggcggcgaggacaggaccgggactttgtccctggggccgcggctccactgggggtaacggctcccgcgcgaggcgccatgggtgggtgcgaggcggcgcggggcgctgggggcggctggcgggcgggtgggctgcggccggcgctgctcgccccgaagttgggcgcagcctgcccgctgcctggagggcggcagctttgtgcgcgcgactcgggtctttccttcccggcgaggagcagtccagcctcctgctgtgacccgggtgccgccgcctcggccccaccggccgcccctctgccgggtgggcctggggcgggagccccccgtcccctccctgccgcggcggatgctctggcctctgcctcctctcccactcgcgccctctacttcggcgaggccgccactgtccgtccggtctggtggccacaatggtcactgtcgaccccccgccctcgccccctggagagcagcgttggcccgagtcggtctttggtcccctgcagggcggagaggttcagacagcagccacgcttccttccttggttatttcgctgaagatctcttcttgagcccttgccccttctttctatgagttattcctctcctgaggctcattttaacatactcgggaatcctcgggggtttggctgaaaatggttgcattaaaacacccccaagtttgtacgcttccccgaaatttgctgtctgcccgtcagcttgcacatgtgtgctttgtgagtttagacattcctgaaagattttaattttgcctaagtggtttagtactgcacagaatctgctctctgagaaatacactatcacaagcctggcagccgcggcgctcttcaggtagggggaatttgttccaccggcagctacttcttatctcagagactgccctacaggcagtagggccaagctgaccttttgcaaattatttatccttggatcacacagtagtttttggagcaggtgggccacctctttggttcatgtaacactttacagtttgaggttttcagctttcaaatcttattgccataaagtcagaaagactgggaggcttgttttccatgaaaacattctactgctaacatccacaggcaccccacctcccccgacatttccaagtatttttttttctttaggtgaatacattttaaggtttacaggatgaatagtagtctaaaccaccatatttttgaagtgcaggcaaagacaaggaaggaaaaacatttaagatctgcttggccaatagtggcttcaaagtcagctattcaaataatcagttcaatcaaaccaagtggcaagggggaaaagcatcacatatttaggaaacaaattctggatttggctcgtttatccttattcgatttattgaaattaccatgagggattagaaggattagaaaccttcttagtcatcggcattagcagtacctggatacagacacccgataaggcattagctgggtcagcgtttatccttgctctgcttcctttcattgttgtatttctgttttatgaaatttgctctgggttgtattttttagactggtgtctttgacggtgagtttaaatatatgtactgttttattcagcatcctgttgcctaatatttattttataatggatcttaagaaattttaagaaatcttagtattcaagacctattttggggtatcgtttatattttataaatgattgaaattatatcaaacataaatttattttttcactcttccaggctgagtaggtactagggatacagaaatgaatgtcatagctcttgtcttcaaggaatttactatctaacatacaagatgttagtaacattacagtaaattaacaattataatactatgtagtcagtgggaatagagatatgcctagtgtagtaggagagtttagagtaggagatagttaacttgccttgagtgtaggtggagttgggagcacacagccaagttgtgaaggatgatatgattttgccaagtgcaggaggtaagtaacttcccaagaggaggatatagtaattgagaaggcaaggaggcctgagaaactgtggcaatttagataagtcattgacaatgacgagtcagtgtcaattgacattggcagttgacaaagtcaataacattgacattgatatggcttgaatgcaggggttagtaggaaatggtgccagatgaagatagtgagggtggtagagggccagatcagggaatggtatccttagctaaagggattggattgaacgtgatagatgagaagccatttattggatttgtattttagacctttactgtggcagagtgagggaaaaactaacaagtcctaatcacctatgagaagaaaggaggactcaggactgtgaaggtttgacttggggttctgttgatggaaatgaggaacacaaaaatggaaggaagatgataaattctgttttggctattttgaatttgaggaagcagtggaacttcaggcgaagatatagatagatgtttgtatctgtggatgtgaaaatcaggattagagagatgattgggggttgaattgaagctatattgatttagttgtgatgaaatgactcagggaaagcctttagcctggtgaaagtggcagccagagaacagactctcataaatagcagaagtaggaagaagaattgtctgaaagttagaggaatagtagctagcaaggtaggaggaccatcaggaaagatgccaagggcggggagattttccagtggaggaggaacaggttaacaattttgaatgctgtaaggaggtgtcaagttaggagagggccccagtgaccactgaatttgtcaggagtccataggtaactttaacaagaacagttttaactgagtggtggttcagaaaccaggcttcagaagattgagaaagaatgggtgtgataaagtagacatgcttaagtgagacttttcaagagaactgaaataaagaagggagaaaatgatagctatagctttcattgagtagtggttctcaatcttggctgtgcatttacaataatgtaataataatttacaataatctcaggaactttaaagaattttgttttccagagggaatccctataccaatttggtgtgggggggtgttgaacccagatatcaatatttatttcaacagcttttctattgaagtgtaattgacatatagtatactacatatatttaaagtgtacaatttgatatttgacatatgtttatacctgcaaaaccatcaccataatcaaaataatattcacctccaaaagtttcctgtgtgcctttataatcttttcctcttatccccaggaaaccactgtctactttgtgtcattattgattacttgcattgatacttttttatagtttcttaagtaattccagtgtgcagccatggttgaaaaccattgcagagtgatattgtttgagggaatgttatgtttgtttgtttacatgcataaggaaagagtgagtagagacaagtaggaagagattcttaagcaattcaggaaatgagataattattggaactaagaccctgaggagatagaagtgaatggaattcagagctttggctagtaagaaaggaagacattcctggaagcgacatctctaagaatataatgttaaagacagtatatttctttgttatcatcatcaaagttggcatatagtatccaaattggttccctgaagtacttctgaagtactttaaaaaattagagagcatcttaatattgtgaaaatggatacccctcagaacaattccttaaatggagcctgagatccctggcatcatcatgtaatgctttgtcattttttggaggggagcagatggaattagcagtttgactattgcttattgttgagagccaagtcctgccagagtctttttgcccttctcagagttaggctgcatatctgcactaaggaaaaagaacatttaacacttgaaaatctcctatttaaagtatctttgctcagaagaaatcttgtttgcttgccctttggatatatgccttttaaatacactggaggataaaatcattcctctgtctcctaaatgagacagagaagagttgtgactagaagttctcaaaggctcacattttctatcttgagaaaagtaatacctatcctcacctcaccacctttttttttctttttaaaatttctggctcaggatttggatataggaaaaatctgagtcctgctggttctgaagtccagggcttgttcctcagccttgactcttggctttcatagggggctgaaaacagaatagcttatccaaatattatttggcattgtaacttggtcataaatagagaggaagtgaaaagttttgtctgattgtcttctagagttctgaaaatttctttcattgtgataaagaattaaagtatgattcttttctagagaggaaggcatccctaattttggtgcagcctaaaagagtggaaatatcaatgttagcatgatattggttattattattgtcacagccttattgtaaacattctatagtttcttaattactaatataataatcattgtaggaaatttgaaaaattcaggaaagcataaatggtaaataacacttataatgtctccacccagagatacttatttcctttatgaaatatctattagtgtcctttgtctattataatactggagatttttaaaaactaagttacgagagctctttatgtatacaaactattaggcttttgtcaaattacattgcaaataatttccctagtttgtcatttttatcttaattttgtttttgatgtgaattttctttttaaacagattgctaacattttaatgtgtttaaacctatcaaatttttcttttatgatacctcactacttagaaagggcttgcatttccaaattatgtgactattcacctctgtttccttatattaatttcacagtttttaaaaaaatttacatctttagtctatttgcagtgtattttaatgtagagtgatggttcagttattttaatgctgtttattgaacagttatcgtcttcagaggttttaaataccaaatcatgtgtgtatactctgtctgtctatagatatggatatatgactttttctaggtttttctatttagtttaattgggctatttctttttgctctagtaattccaaactgtcttaattattgtgagtttttaatgtatttcactaaatggttttgtgaatacttattattgtctttgtcaaaacattttcagtatttctcatgtatttctttattcatgttacattaaaggcagttaggatcctaaaagaacctcactggaatatctgagttaattttctagagaaagttgtactatctctattaatacaatgttatcatttattgaagtcatcttttatgactcaaagatgtagttttgagttttcttcatgtattttatagtttgtagttttcttcatgtgggttctgcccatttttcaagtggtatatttgatattttaaaacttattgattctattgggaatggaactcttaaaattattttataaagaggattaagtgtacctgatggaacatagaaagatggctaattctcgtatactgttttctaactggtcattttatgaaactcttaattctgatagtttttattgtgttttgtagtaactaaattatagcatgtgtaaagcgcgtaaatgattttgtcttcttgctaacacttaatccttatttctttttcttaggacattgatcagaacttctagaataatattaagttatagcagtgaacagtgaggatccttggcttatttctcatttaaatggaaatgcctttagggtttcacagttgtgtgttcaaaatttttatttatggtatgttaaggaaatagtcttctatgccttttcagggggaaccaagatagatattcagtttgatcacatgccctcttaatgtaccttgagatgatcatatggttttccttcttttacctattggttgatgaattgtgttagatttccaagtagctttcatcaaacagttgctgttttagggataaaggcaacttgataatagcatatctctttaaaatagtgctatatttgatttgctatatgagattgatctttagtattccttttgtattacctttttaaggttttgatttctgaatatgccagctttgtaaaaagagagactgagagagaagctttccatgtttccatttttgcatgtgctctggcaattaatctcttccttggaagatttgaaatagattggctctaaaaatgtctaggtctttttggactgaatacaattataaagatcttaatatgtgcttgtgtactaagtattttgcataattaatttcatttagtccctatataactttgtgaggtgaagattattatttctattctacagataaactgagactcagaggttaagacagtcgtccaccatcaataaagtacacaaagtttaaactcaatttctatctgatgtaatagcccatgttttctaatcagtaccgtaatgtttttcttaattaggactctttcttcaccccatattactgagaagtaaatttaatcattttatttgagcatcttattaagtatttttcctctttgcacacttagttttaatttttggtaaccctgttatattatcactgttctgttctgtgttgatgtgtcatcttttgctattttaataaatactgtgatcttggagtgaggtgggatagggtgggggaacttaaaattgttgttcatataatgcacttaatataatttacattttaattcgttgagtgttcaagatcaatttgcattcctgaatcttgtttgtaccttgtaagaatgttatgttaagtgtaccacatacaagagatcaaagagttttggaaacacagtacttttccattttagtttgaattatttttgttgtgagccttgcatcagggtagctttttagtagtaatgttaagtgatatatgtttggtgtgcgttttcttgaacaaagagtcttttcatagttgacaaacattagttgctttctcatataaatacatagaattcagtcatttgtacttgacttaatgaaaacataatatatgagttattaaactgtaccatgaagattaggttttagctactggaatatttatatttactattatgttgagtgatgtataggcttggaaatttaagagaataatgtaagccttaaaagtgcttaaattggccgggtgcggtggctcatgcctgtaatcccagcactttgggaggccgaggtgggtggatcacgaggtcaagagatcgagaccatcctggctaacatggtgaaaccccatctctactaaaaatacaaaataattagccaggtgtggtggcaggcgcctgtagtcgcagctacttgggaggctgaggcgggagaatggcatgaacctgggaggcagagcttgcagtgagccaagattgcgccactgcactccagcctgggccacagagcgagactccatctcaaagaaaaaaaaaagtgcttaaattgggaaagcagtcataaactctatatttatctttttgaactcttctgttccctccctttaaatataaattaacatttaattaattcagttagggttttggttataatcagcacacccagactgcactccccattcccttcctatggggacaatctgaccctcttaaacctgccagacacatgcatgctcttttgttctaaatttcaaggttcctgctgatttgttaatcagtatatgtcacagtagtggacaaggtgacaaatagcccccgcagcagtgtacacattagtagttaagaaaagggagagactgttttggaaaatcatgaaacttcaagtgagtcctgatagggaaatggagaggaaggtgaaaatattatagaaatggatgggggaagaagggaagataaaaatgtgtaaatcaaatagattgttggagaaatatagaaaattggaagaatggttacatgggtggtagaaccagaatattcaagtcagtgaggtcaagaagtagagtttcagaaaggaagactcttgcttcaggttacagaagaacaaccaccatagagaaagagctgatagagttgtcatttataaggtcatggagagtagatgatgagacccaaatttatactgtaaaaggggttaaggaataaattgatggtgagcagctggaagtgctggtagtagattaagctactaaatcagaaagttaatcagtgaagagtaaataaggatggagtaactagggcattagaatctgatgaagccttactcctgtgccccctcttttcagaactataagatcataaaatacattctcaattgtccaaatgattaatattttgttagtgatacttagaggtatcattcattgagtaccttttgtttgccagtgctttatttgcattatttttaatccttaaaacatccctaaaagatagatgttattatctatcattcacagttgaggaaactgggacttagaaagtttaagtaacttgttgaaaattggcccgggttttttggactccagagtcagcattcttttcattatgccatgttgcttcctttatttattgagctatattaaaacactgggggcttataagaggaatataggtgggattcctctgcttgtagaaagtagtagaagaggccgggcgccgtggctttcacctttaatcccagcactttgggaggccaaggcgggcggatcgcgaggtcaggagatcgagaccatcctgactaacacggtgaaaccctgtctctactaaaaatacaaaaaattagccgggcatggtggcacgcgcttgtagtcccagctactcaggaggctgaggcaggagaatcgcttgaacccgggaggcactggttgcagtgagccaagattgcaccattgcactccagcctgagcgacacagtgagactccctctcaaaaacaaaacgaaacaaaaaaagcagtagaagagaaatcctaattatgcttgctgtaatttgtgttgactatatttttatttaaaatgtttttataaagggaatccttctagtaagcttccctactatacttataatatctaatttttaacaattgctgttatttggagatgagattttttttttacccatgataatgatgggttgagaggaaaggaaggacaggccaagaaaaagcatgtaaagaaaaataagactaaaactttttgttttcactatgagaacatcaaatatgtcatacaattttaggttgcacctcagaaaggccagcctcttcatggaaatcatattgagctagtcacaagatggtaattaaagcagatgctctccatgtcaccagattatagagctccaaagaatttattgtaatacagtgtgatttactgaatttaggtttcatcaatcaggaattagttattggtgaaagggtctaagcagatgtttggtttttctataataaaccctttcttcaaaaacaatgtgtaattgaaaaagaaatgcttaaaatactttagggattaaacaatcttataggactttcaattactttgggaggaaccaagatagaaatttttgctctgctaattttagcctcacattcagctacaaaacaacgtctaggttacattctgctatactagtataagacagtattattgaaaactttatcttaaaaataattttatatttcagcctctgctaaaacaaattgactcttagcccagttaatatgaatcagcatggtcatactgaactatttatttctgctttggttactataatgtttttaaaccaagaaaaacaactatattcataatatccacatagtttctgattggggagaatcaaatagaattttgtacagtcaagatctgttgtttttattattatggccctattagcacacattaccaccattaactgtgtttacttacattttctcattgcacttccctctttgccctactattttctgttgaacatctgagcctctattggcagacctcattaaaggctgaaagtctcattccaacatattaaagggcagcgactccctctaagacattaactcccaacttagttggaatttgattctcttaacatttctgtctttctttgtccccaacattgtaaaaaggaaagcacttagaatgcaaagaactttaaggaatcaaagtagagctgtgctttggaaaccatatttccatatgctgttatgtttgggagagaggaaagaggggttattgatagcaaaatgattgaaagataatgtttacattgggctttcttttacattcctcctcattttttctcatagcatttatttattttattttattgtttatattctgatttaccttgatttgttttaaaaggacttaaggcacactcatttctgctgttttaggtttatttgtctctcctaatagactgtgaatcccctaagtcagctatgtcgtattcatttttgtaaatctagtatctaggacatagttggcatttaatagtttatgaataaatggatgatatttaaccaccttaatataagaaaaaaaaagagccaggctggttgctgaaccctagcttactgcagctttagtggtattatgggctgcattgtgtcccatccaaaattcataagttgaaggcctaacccccagtacctcagaatgtagcatcatttggaaatagggtctttagagaggcagttaagttaaaatgaggtaattaggatgggtcctaattcagtatgattggtgtccttgtaagaacaggaaatttggataggctgtatagaaggaggacaatgtgaagacatagggagaagaccgccatctataagccatagggagtgacctgaaactattctctcagagctctaaaaaggaaccaaccctcctgaatcttgatcttagactcctagcctagagaactgtgagaaaataaatttctgttgtttaagccacccagtctgtggtactttgttacggcagccctagcaaacaaatataggtggcttttatacttggatgtagcaaaatctcaaatacccttaatttgcctgttcccaagaaatagtttgccaaggctaatgtcaaagcctcaaaaatttatatacttcccctaggtaaaacatggaagagaaaaatttggatagcttaatgaagaaagtaataactatttgcctcctccttcacctttcccaatacagccaatggcaagcaactggctaattccttaatttaattgaatttgtttagtttggcaaggagaaagtgtttacagggtatttgtgttcctaggtgttcaagagcctctccctggttgcttcttcatggtagaaaatggaaggggaagactaaataaaatactttttaatatgatgttgatttgagctaattgcttgtgtataatcttagtcacattattttacttgtgttatagtcaacaggggcaaaacagtatatcttttacatgcccattgctgtggtagttgctgtaccctttgatcatcaactagtcatactgagttgccacagtggtttttcagcatttttcattacatgctgtagccgcaaactatatatatatatatataattgtatatatatatatatatatatacaatttttaccattatttcttcttgacaattttaattgagttgtatatcaagtagtgctgtgttcagtcaatttttatagtgctttgagatgctttgtgaagagaaaatttcaaacatatacaaaagcaaaacatttgctctttcatcgtttggaggcagttttcccagagttctgaaagtagggtaaactaaattagagaactgaacaaaggtctcagccccagaattaaaaaaaaaaaatgtttgccataaagcaaaggaaaccaaaaccaaacagaaaacctctgacttaggggcaaataagaattttggtctaattttggcatttcaacttcagtcacacccatgtttttggatcactcttgttaccagtatgtaggcactgtggtaaataccagttgatagatttttctcatcttttttcttttccttcattccaactgagaaaaatactgcaaccacatgctagcaagtggcagagctgggtctaagtaaattgaatactttttctccagtaccctaccatgttcttttactaccctatagttctcaacctggctgccaaacacaatcatctgaataatttacttttccctagcaatttattttaaaatgaaaatatcctacttttcaatttagaatgaaaatattaggaagaagaaaagagtaaaccagagtaaattatttatgagacaagggaaaggttttgaactgttttaggtgccatgggtagggattgctgatagcatggtgattagaatggggtctttggaattgggctgcatgggttctaaccctaacttaaccactttggtagtgtgtgatcttgggcaagttacttctttaagtgttagctttcttttttgtgaaatagaggttatgttaatttaccagctaggatggctatgagaattcaattaaaattccaataaatcgcttagcatagtgccagaaacataagtgcttgaggaatgttagtcattatcacaacattatctatggacatctaccattgctatgtatgacacatttggtcacattgagtgttttccagaccatattcccaatgatgccagttgtgtatggacagcaaaggatcccatggtcaaatacatttaggaaaatatttcattccaaatgcttttcttagagattaataatacagatttagcatattaaaggctctgaaaagtcctttgataaaaaaaaaaaaacttctttaactttgtcaagtagttagttaaattttcacaaggaaagccttttttttctgctgtcctccgaggtctgtcttcatgtggcttcttatgcagatgtctatccctcagctcttgtagcatggtggttgccttctaagagggattattcaagaggacaggccctaggtggaagctcttattaagtctctccttgcagcaccttgctaaattccactggcaaaaacatgtcactttgccaattccagcattgatgtggaggaggactatacaaaggactaaataacaggagagatcgtttgttgaaggtcgtaaatataatagtaatagtgtaccacatatttttaaaaaatgtccatgatatattaggtgaaaaataatcaagttttggtagaatgtgattgtatttttatgttaaaatcaaaatataaatggactatgtatacatgtatgtgtatatgtgtatatatacatatgtacatgttttgatagagcagatatattttgtttggttgagcagatatctatatagatatagataggtacctatctatataaatatattatttggttgatatctttttcttggttgaggagatatattttgttttggtttagatatactgctcaatatttttaagagtagagagttttcagaactgctgattatatagcatatgtgtagaaaaaagtttgaaataatataaagttaacagtattttcttttgaagagtgggatagcagcagtgagaaggatgattatttattttaattatgtggaaaagatttaagtgtggccatttaaaaaaatctcccgtaaagaaaaatattagcagggatgggagatcggttttctccctaggtgttgatagtttttgtgtatgttttattttctttcttggtggaatttttataatcttttatagttgcatagtgagcagaacccttgttttaaacttttcattgttgattttgtgtatttctgataattttctcatgatggcccttgcaattattcgtctagaaaatgtaaggtgctaccttgacttattttcctctcgtctattccctgcttttcctttgccatctggattacaattgccttgaggacacagatcatattttactattcttttgctaatggtgcaaactaatagaaacactttgcattatactcagcaggcaatcaagggcttgctgaattattaatgttgcaatttgaacatatactagtattgactttttgcatatacgacctcccattctatgtttgtttttgctacttctgtttctttgctcttactctgactctgcccagcctactgtctggataaattatatgaacgggctgtcgacttgacatcctgttcagtgaatatgtagaaagcatttctaatcaccatgttatttaatatgcaattgtgtgataatcatgttaatgaatgtgattgaggtaattattatagttcagcacttttacactgatctcttaaaatctgttaacataaactttatcatttgtatgttagttatcagggcttactgaagtttgattcactgaggtaatacttgaatcacttagtatgtgctgtaattatattttgtaaaaggtggtgcaaacattttggaaagctttatttcagcaataactgctcttgtagatttttacccaatattaaatgtaaaataatttgtttgtgatatttttatatttagtgaaatacataacatattaatggacttttaagatttcttataacattctaataagaggttttctaagtcaagattatctgcatcaatcagtctttaaaataatcagatgatgctgttttggttcacagatgcagtgccagttctctcctggcagcttaccttgccaatgcatgcatttcattaataagagccccaagtttttcctaggtagggtgtaaaagctgaggagtgaaaggaaggtagagaagagaagcataggcaaagacatggagcctggagtggcatggattattttggagaatagtgttaagtaaaatttggataggtaaattatgaccatattttagggaaagtttgatgtagaagatttgtgaggtctgatgtcatggtgtgttcaggagaaaagaagtttcagcaagattatatggcagcaacatgcatggtgcactggaaaagggaagaaatcaggagccagaaggctgtgtgatcagcagatgcagaggaaataagggcccagactcagggcgttgctgtggagatggagagcagatggtaaatttgacgggcattataaagggtgaaatttattcttctattcaataaatatttattagatacttgctgtatgttacttatgcttatagtatctggactgaaatttgcctgtagctactaatacagtttaaaacttaaaaattatgttatataatttttatttgaaaaaaattttaaaaaatgttgaaccactgagtcatgtgctatgttaatgtcaataagaagtgctcatcgtagtgccatagttcccagagatctcaccattctgtctgctcttatctaaaagaaatctaaattgttaataaattgtacatgatcttagtcaaggctatttgaatgctggctcaaaaaagagggagaatatttgcaatagaaatccaagagcagtaactgttggcctcagaagtttcatagcattctgtttgctgcattcttttggtcaacatggttattaaaaaatagttcttcctaacttctcttattagagtccaaatcagatatcctttccctggaaaaaatgttcttctgaagtcctggaggatcttgtctatgaccataccaccttgaacgtgcctgatcttgtctgaagtcatggaggatctgagaagaacaggaagatagaaatgggaaatgagaagaaagaacttcttaccttctaattgttctagcttttccaacagaaacacactgggctggttgccacagcacactgatatcccaacatgatcttatttgtccttggggtaggcaaaagatggtttagccaaaaaccattttatagagtaaaaacctatgttctattcttgataatcagacacttgttttgtgatttttggggaaaataggcctaagtaataggcctttggaaagacttcccaaacctctcttactatgaattatattacttctcctggtgccttgagaggcagctttatttacttgatgacctaggtaggcagtgaggcatcaacacttctttttaagcaacagcacatatactgtcctccttcacaattgattggtcagtttctaagcagcaaaatcctaaaattaaattaattttattctgtaacataatctgaacatttctctccattctgttttcctgaaattcacccaggaattcttgataatcttctggtagcgcttaatttaactacagcaatggcctcattgcataggagagaagtttaaaatttcgtgatgtgtcacaatccatttatagaaatttggttgctctataaatttatagaaacttaagcttcataatgatatataaaacaaatggttataaaaagttttatagtagtttgtcgttagtgcttaatggtgaaggggatgatgtaaaagataggaataaggaaatttttagagttttacagtgaaagttacaaatacttttaaaatattcttataaaataattaaaatgttatatgtctctgatgacaacactaaaagataaattttggtaattgttattaataacataatgtgggaattgaagaataagacatttgacttagaaaggttttattgtacattgaaaatataaaaaattaatgttatacagacttattgggctagtgaaatactacatagactcctagcaagccttctaatgtaattttaaatattctgctccggaacatgtttggcaaaaataggaagttagttacacagcaggaaacatgtattttaattgtctcttttatctttgagaagaataaagtttttacaaatgcaagtatattttgaatattactagagatgtctaattagatttataaagcttgcagagttatatagtcaagtctttggcatagatgttaataggttacatattatatatgaaatgtgggggtgggttagcaacttgtagagagcctcttgctgcttgctggtagagagaaacagtttttaaatcattttgtggccagtttgctttttgtcctatctaagctttactgatacctttagtcagaactgttactcatcttgaagcccagggctaatggaaagaatttttttttttttttttttttttttaacaattgtactgtacgtggtaaggacaaagaaaagcttatgtcagctagtaaacactgttggctttttaattttttatttctttaaatacttatcctacaatagtactccaaacctcaccatcacacagtatacccatgtaacaaacctgcacatgtacctcctgaatctaaaataaaagttgaaataaaaaaattatcctatactttatagaattccattattctctttcctacataatgcattgatatttcaggattcatttttaatgtttgtatatttttgcttcttttttttttttttttgagacggagtctcactttgtcatccaggctggagtgcagtggtctgatcctggctcactgaaacctctgcctcccgggttcaagtgattcttctatctcagcctcccaagtacctgggatcacctgcacatgccaccatgcctggctaatttttgtatttttagtacagaggggtttcactgtgttggccagtctttctcaaactcctaacctcaagtgatcctcctgcctcagcctcccaaagtgctgggattacaggcgtgagccaccgcacccagccatactttctcttctaaagatattcttacttttatagttaaaaggaacttaccaggggccaggcacggtggctcatgtctgtaatcattttgaatggtacttgatattcacatgacgtcgtgttgatgttagcttagatcaaggcagtgcttgcccggtttcaccactatacagttactcttttcctctttccgtactctctttttttgcaagtgaatagctatgtccagtgcactctcaatgggggagcaaggactaagctctacctcctggaagagatagtgtctacatctgttactgggaattcttccgtaaggaaactttatctcctattctcttatttatttaatcatttatttatatgagtatggcctcatgtatgtttattttatactttgggttataatgcagtactacattacttgttctgttgcttggattgttccagctttggccattgggtgttctttcaggttggcttaatatttaagagtataaagagtccctaacccaaatgtttgaaaacaggtggtctaggctatgatcatagactttgatcgtaggattgagtagctgaggcaggtaggaagaaaatattgtaggaggagaattctaggaattaagacttctaggaatttagacttcaggtaagaaaaaaaatcaccaagatttaagcaggagttgtttgaaagcatgacagtgagctaggagctaagatcatccagaaatgaaggggagggaccgagcagggcaagggcgtggggtggattgattgatagatgatggtgatagagtttcaaagcagctttgggtggatggttgaaggaggaagagaatgatcttgagtggtaataagaagaaaggagaacacctactttacctctaagcccagtggtttgtttcagggatgtgtgaggaaatgcaatcactatttggtaagcttgcatgcagggaaactagtgtctcatgaaaagaagaaagcaacatttgaagaactgttgaagatgtagaggattttgctggtaatagactgtaaattccagaggacccatggaagtatatcgtccttccagaattaggatgggatgggagatgggagcaaaacagaagatgtacaaagagttatgatgactagtgtgtgagatgagtgtcatctaggtgtctgtagcttcttgtggtgctggacataaacagagatgaagggaataaagactttagtcctggtggacctaaagcagacagtggtggtgagactgtgaaagtttcaggatagggaggcatgtcatagactcccttttgagttctgcaggagacagagaagtttggggaggaacaattttattctgagcttgcatgcgtgctaaacaagtgagtgtccatgtgagctcagctatacaatgagggctcccatttgatctctatcaagtggaagataagagacccagggctgactggtgttactaatgtataatatacatacagaaaaatgtacagtttatgaaatgtttagcttggcaaattttcaccaaatgtatacacttgagtaaccagcacctagatcaagaaacagactgttatcagaaccgacaagataggcccctcaagagcagccactatcccaacttctaacacaaatggattcgttttatctgttcttgaaatttacataaatgtaattatatagtatgtactctgttttcctgcattcttttatccaacactgtaacacagatatagtttattcattaaaagttatattttgttgtatagaatttcagatattgtacagtatactgtaatttattcgttcaactactgatggacatttggtttgtttctagtttttgactattaaaaaatacctgctgtagccaagcatgtggtacactcctgtagtctcagctacttgagaggctgaggtgggaggaccccttgagcccaggaatttgaggctacagtgagctgtggtagcgccattacactctagcccgggtaacagagtgagactctgtctctaaaaacaaaacaaaaacaaaagcctattgctcagatgaacattttctgaacatagctttcagagaacatatgtcctcatttctgttgagtattaacatgggtagaatttctgggttcgtagagtatatgtatatatcctcaagtttagaggatattgctaaagagttttccaagatattgtaccaatttgcattcacattagctgtgtctgaatattgattgctccatatctttttcaacacttggtgtgatctttcattttagctacacatgcgtacgtgtgtgtgtgtatgtgtgtgtgtgtgtgtgtgtttgtatggtgtatttcactgtgggttttaactgacatttccctgatgactaacaaagttgagcacgtttcatgtgctaagtttccatttgagtaagtgatggtcttgatttcctataggattgtctaccttttttcttaataatttatgagttccttatatattctggatatgagacttttgccatgtatatgaattgcagatatcatctgccaccctatggctttgccttttcattctcctagtggtatcttttggtgagtagaaattcttactttcaaggaagtccagtttatccttttcccctccttgtgattagtgcttttgtgcctcttgtttaagaaacctttgcctagcctaagattatgaaagtactctcttgcattttcttctaaaagccttatggtttactgttcacaattagatctgtggtccaactgaaactgtttttatttttgcatacagcatgatctctagggtcatggttctttttgtcctccccatgtagctatccaaataacctagccccatttattataaagagcatcctttcctcactgaatttcagtgtcatttttgtcataaatcaggtgaccatatatgtgtgggtctgtttctggccactctattctgttccattggttgttttctattcttctgacagtgccaccactggcttaattactatagtttttggtaagttttatactaagctttgctgttggaagtccaggtcccacagttctgttgttcttcaagacagcccttgactgttcttggttccttgtatattcctcttgatttcttttaatttttgaaaaattaaccttaattttaactggagagttattttgaatttttgtaaaaattttacctccccatttctatgtaacttgatgtagtgtggttccatttgtgataactttctgtcctaatttattaaacaatggaattcatacaaaagaaaacttttgtgcatttatattggctttgctttacaaatatacataacaacataaaaaaagtagatacaggcagacagaaaataacagtaagacaaagagaattggttatgaaactcacagtattcataatataaaaacaaacaagttactccaaaggagagattttcctagtactgaaaacttaagatgtgaattttctagactctgttggcttttaaggaggataaatgtcatctagcagtgctttggtaacattttggacataatttcaaagcccagtttctccaaacagacagttctataaaatcaataatacagtacatatatgtggttttctgttagtctgacttgatccaaggagaaatattttttattttaaaaataaaatgcgtattacccaagtaatcttttatgagtgaatgaatgaatgaatgaccaaaaaatgttttaatcatgtttttttatgagaattagacagcaggaaccttagaatgtattctttgacaagaacctgcgttgttcattaaggcatatctggatactttcgtagacagctgagcagagtttataagaattaataataataataatattgcatagtgataatagtttgttgccaggaatggaaataactgcttttatttgcattttaaaatgtactcctcacaataactccttgcaaataggtactgtcattatccctattttgcagattaaaaaaaagtaaggcaaatatatcttacccaagtaagtaatagaatcagaattcatttctggctactctacctaagtttctactaccttataatgctgatgaaaattaagtagcttaatgaaggatttgtgactgaatttggaagttaggaaattcagatagagctcaagttttccgtcaggaaatagtttccaagtctactcccatacaaatggataggtaaagaaaaatacgttgtattttgacaaacattttgcttgagataaaactgttctgcatttcctttagcttacttctttaaatttatacttaagtaaatcccagtcttctgcatcactgttgtcaaatatggtcattttgaatattgtcacttttactttttaaaaaatgaacattacactttcaagaaaccacatggcttgcctagttactgttgtaaagaactgaaatataagcaaattaaattactttaatgctttctataaagtcaattttggatgcgtgtcttcttatattttcacaattttgaaatattttctgctttcttttaagataaatgatctttttgaaattattttattgaaactagggaaaaatgtccaatatgttttgcagctggcattcctgaaaactaaatgaaaattggagagccaatttcatcatgttatgatatttatacttttgtcaaaattcttgcattttaaggcttgtttgtgcacattggttttgaaatgaatttagtaatttatgtttgaaactcatttcacaaatatgaagtaaaaactttataggattatctctgttcatagtaatctgactaaataaaatatattcaaaacgttaacatttttctatgttaattttcaggttgaaggtttagaacagatgtggaaaaatgtttacttcagagaaaggggttgtggaggaatggttgtcagagtttaaggtaatatttactgttctactatagtaattatattccaaggaagttttgtctggcgtttaaattccagtgatttttgtattttatatgactgaaaggctaaatatctgtggaagtattttctatcaaatctcaatagagagttatttacacatagtaatcttttctaggaaattgattccttttttcccccaagtggttcaaagagtttattcatttgtttattttctttctttcatggcaataccacaaagtagttaaagtctctgaatgttgatgtcattctccagcgaccatcagtgattcattgtcaaaatgtttcttccagtttggagggcagtggaactggggtgaccaacaatgaggagaggatgggaagatatttgctcaactttataccagtgaatctttctctagttggctaacccagtggctatataaggggtgtataacctttgattagttaatgaagaaaataaaacatattttcttgtctcatgagcttttctctaggatagctaaaatagtatttctttaatcagctaattacttttctctgtccttatgtgacacataattatgtgcacttgcatgatcatgaaccacaggaatgaagagtttgggctgcaactatcagtttgattttgtccagcccagtcagcccaagacctataaggacaaagttacagtctgacaaagtcaggcttattggcttgttgcattgagagagattgcccaacagacaccatgggaccatctcaccaaaccaaagaaaagataaaattatagtaatttggaggaagggtagagtttaggtgaaatttaaatgaaacggtattctggtagactcaaaacaaagcagggctatttataatggggtgaacatctggtctggccttcaaagtagacccaggatcttgttgtcttgaaaactacaaagttaatgtagatttgaaatgttatgttcagaaactccatatttatatctctgcacctgggttgaaaatcaaggctgcttctctatgtcaaagtgacttcgatgctctaggcaagagtgggatgttttgttcttactgatacatgttcaacaacaaacttttttataatctgtgattttagataacaagtcatcttagtaagtaagaacttagtagtcactcaaagaaggagattgttatgacatttttcagttgcagtgtgtatttaggaaaagcaccgtttcctgttaattttaatagctggccttatctgtctcttttatctaatcctgatgaatagctgggcagacttttactttctcagcttttatagccatgaattgagcatccttctatggattccccaagtcatcatgaagtgacattagaatgttacagaagtgctttctacatattttaataacttgtggccagatgaggtggcttatgcctgtaatcccagcactttgagaggcggagatggaaggattgcttcaggccaggagtttaagaccagcctaggcaacacagcaagaccccctctctccaaaaaaaaaaataaataaataaattagctgggcgtgttggtgcatgcctgtagccccagctacttgggaggctgagttgggaggaacacttgagcccaggaattcaaagatgcagtgagctatgatggcaccactgctgtccagtctggtgacagaatgagacttttgtctctgaaagaaaacaaaacaaaacaaaaaactttgattaaatcttgtgtgtgtgtgtgtgtgtgtgtttcctgcttgtgttatctttgtgattaaaatagtctgttatcacggctttttttttggcagattgatggaaatagtcaagtttaacagttgaatgctatttcttctagggcattcttatgttaatgatgaagtaaaatatgcaaaagcaaatgtcgacagctatccattctttaagatgggagttgtggaaagagagcatgttaaagggtgggttgtaggggtgagatcagctagtaaggtaaaaaatggaaaaccatgactgatctccttccctttccatctgtttgtttattcccttcccctcctggtttggatatatagacacctaggaagtgcagtaccgaggagtgaggggcagagcagcggttaacagcagtagtgtctgaggaagtaggtggttggggtgaagggctgcagaggtggcgtgtagaagaatagccagagtagttacattggtagattggttacattgagcaaataagttgattgaagaaataagtaaatattttgaggataatgggagttagatttctatctgtctgaaaaaggaattacaatcatggaacagcgaaagccaagaaagaactctaaggtgttgtattggaatcattatgaactcatgggttctaagtatgcatatgatacatatgtgtgtatgtatctgtacatgtatgcatgcatatatctcctagctttgttcactgggaggacctagaaacaatggcaccctggtcgcagtgagtacactaagctcccagatcttgttttccaaataccatcttccactacaagaaaccagagtatgaataaataggaaatattatttaagtaatattttatcaatataacatattatgtgggtagcaatattttattaacatttttcataaatttaatgcaagcatagggaaacttttcctttaggaggagagagtgaatcatggcctgcaggaaataaaatgtagtttaagtagtttctcctgcccaaccccaagattaactttacccaattttgaatcaatttgatattcaaatgttttaaattatcttcaaatctgtattatagccagttcaaggagggatatttcccattccttggttaatttggtaggcattcctgataattatttggagtgttattctaaattgggttaatgtgtgttgtattcagctctatgtttgacaaagagaagaaatcagcagcataccagaggtaatagaatatagaaaagtgcttgggaacatgtctgctaagtacttttaaaattagagtaacgtatctcttgaaatctctggtgttaaattacatatttttgttaaaatatttaagaaaggttttggttacatacatatttctagaaaagcttctgcttgattgttttatttaataaccatgatgctaataaggccaagtcatcatgattgagtaagtgaactgaaagaaaccctttgacttaattctaattctccccaagctggttttatgatgttgggcataacctctccgggtctcatattttcatcagaaaagttaaagtactgtaagtggtttatgaagatgatttttagctctacactgttgcacagtcagtctgaactcctaacctcacccaacatctctcagatgtgtagagatgaaatttttgaaattgaaaatttggtaaaattattcattgtctgctctagctatggactctcattagtattttctttttttaaaatttgagacagggtctcacactgtcacccaagctggagtgcagtggcacagtcttggctcactgcaacctccacctcctgggttcaagtgattctcatgcctcagccttctgagtagctgggattacaggtgtgcaccaccatgcccagctaatttttgtatttttattagagctggggtcttgccgtgttagcgaggctggtctcgaactcctggcctcaagttatccgcttgccttggcctcccaaatgtgttgggattacaggcgtgagccaccgcgcttgtcctattttctttatgtaccaactaaatgattagtctaggacttcattattttaagatttcatgaatagttcaagctctatcttttcaaagatttacttataaaatattatctttcagattgtgttatttttgttactgctgtgtggtagatttatctagcagatttccagactcctgatttttttaaattttctgatagttgctgaatctcaatatgtgactcaaaatcaaatcttatgtgtgatgttgttgaataggattgttttaattactggttcttcacccatctgtccatcttcattaattctctgctactcaacccctatcacctccttacatttttgaaaaaccatctgtcaaatgatactttagtatgaggcatctgtcttcaaattttgttgttgttgttgttgttttttgagacagagtctcgttctgttgcccaggccggagtgcagtggcactttctcagctcactgcaacctctgcctcccgggttcaagcgattctcctgcctcagcctcccgagtagctgggactacaggtgcgtggcaccacacacctggctaatttttgtatttttactaaagacggggtttcaccatgttggccaggctgatctttaactcctgacctcgtgatccacctgcctcaggctcccaaaatgctgggattacaggcgtgagccatcgcgcccagcgtcaaattttgccaagaataatataccaacataattttccattaggtgcttttcaactccagttatgccttctgaaatgtgagaaagctaagctagtatttaagaaggtcactacctttgaactagtacagtgtgagaaaatttaaatgtttttgctataatagtatttaaattcatttggctcctttagatcttgttttttaaaacaccattcatgaacacaacattttctccctctctacagacaaaattaacttttcccacattcattaaataaaatgatgacagaattgtgaataaaaggtattattactgcactaatatttaagatacccttcctttcatttatcagtggtagcctgggtccatggtattttccagagcttgtcttttcagacaaacagctgtctttttgcctttgggtgtttcacagaaaatattttacctcgtgacggtcagctagtatataagctgaacattgtaattcatgtttttaatgaatgatctagttttagcctagatgatatatatatatatataaagtagtaatctttctattcactaatttttttaaacatttatattttggttcatttattcttcaattttatagttagatatatatgttagacatgtatacacagtatacatagacatgtatacatgtaactatgtatacatagttacatatgttagacatcaatgtgttttaaatatatataatgcattttatatatataaattatatatataatttagatttatttttattcagaggattaggaatctgctgtttatttgactgttattcccttttatataaattcccccagtattaggttactcttgatcaaatgacggaaatggaatgttgcctcgagatcttttgtgtcatacttttgaaatattgaagaatgccttaatctcgtctttatgtaagcagttgcagtaaaacctttttttcccccgtcgggagaattgtgaaaggtttccaaatagtccacatttgcttgcccttctggtaaataaaactctcttattaaacttaaaaaaaattctattcacttatatatcccaaggtgaaatatgacccacttttaaagaatctaccaaagtataagcaatggcaattttcatttcttattttgtttatctataatatgttccctcagcaaagatttgcgtatgagggcctgtggtgagtgctgtggttgcagagatgataagacagttcttgccctcaaggagctcacagtaaagtgaaaatgaatcaaatgtctttattgtaaaaatttatgctgtttaatttatgcacacatccacctatatactaatcataacccatattaaattttgaaatactaggatatgagacatataaggaataatgtatgtttagagtgagttaggaatatcctgagacatggtatctactgcaggattggcaatgactgactgaaggaagtaatttgggtgagagagaataatgacttaggaaacagatatcgctgaggagggggtgtgctccagaaggaaaggtttttatcattatgataatgaaatgtttttattcagatttccctactcttttattcaaaatcatctgacttactactggagttttatctcttcccattactctctggtcatggtgtttgttctgaataggtggttctggcaagctgtgactagttgtctgtattttaaatggcattaggaaaattcgtttgttggtagtgtggatatctttttctctagctctgaaaagtctaaattttcccttcaattggttaagtagaacagccttctcatgctcaaccgtcagagtatgtaactccggagttaatttgaccctgtctcattctgttacccaggctggagtgtaatgctgcaatcatggctctctgcagcgttgacctcccaggctcaagccatcttcccaccttagcttctcgagtagccaagactacaggcatatgccaccatgcccagctaattttgtttgtttttttgtagagacgaggtctcactatattgcccaggctggtcttgaactcctggggtcaatcagtcctcctgcttcagcctcccaaagtgctaggattacaggcatgagacactgcgcctggcctatattcccatctctaatcccaaactatgatcaaagatgaagtgttgatgttagtttatgtccttgttgataagaggataaagtatattttttgttttattttgaatttttgttgagatataattaatataagataaaatttactaatttaaggtaaacatgtttaccttgccttggtttttgatatattcacagtgttgtacaaccaatgccagcatctaattccagcacatttccatcaccccaaaaagaaacttcatacctgttagtcactcctaatcttcttctcccatctgcagtcctggcaacaactaatttactttctgcatctatggatttgcctattctggacatttcataaaagtaaaatgtatttttttaaatttgtttagacattaccagaaacatctttaccaaattatgccacaaatttgaaagacaagagttctttagtttcatctctctataaagttatccaggagccacaaagtgaggtaagtacttttatggtttattgtgctaacagtattgacttgattgatttttaattttttattgtgaaatagatataaaggggtaagaaaatgtatatgtttaaagaacaatactgaaatgaactctagtgtaccattccccaagccaagaaatataatttattaccgtattccagaagccatctctgaacattttctctctttttctctctcgctagaggtagctttgaaaagtctatgtcactgcatttcattttattcattcagcaagtatttgagtgcccattatgagccatcggctatgctaggcagtagagaatcaaattgagtaacacatggtttttatcctgaaagaggaaagtgggagaaaataagtaaacacatggtttcaaggcaatccttaatccagtctacggataagcacaagttttccaggtggcaaggtaaaagaatattccatgcagtggggatagtatacggaggctcagaaaatgcaaggcatttaaagaatggcaaatagtttagcccggctagtgcctttcccagtctttcctcttgccccactaccactctttcttttttcagatggctaatttagattttttttttttttttgagacagggtctcattttgttgcccaggctggagtgcagtggtgtgatcatggctcactgcagccttgacctcccaggttcaagcgatcctcccacctcagcacccccaatagctggtacttcagtcgtgcaccatcacacctggccaatttttgtgtttttggtggagatgggatttcaccatgttgcccaggctggtcccgaactcctgggctcaagcaatccatccacctcagcctcccaaagtgctgggattacaagcatgaggcactgtgcctcactagctgcccatttagtttgaaggtaataaaataatctatattccagattctgctgcttgtaaatcctaccattcatagtagaaatagaaaaaaaattggaaataggatgaaaagtaaaaaggtatggcatttggaaaaaggtgaataggctaatgcagtagttaacaatagagggtaaggctgtgataggagctgaagctagaaagctaggtttaggacgtaaccatggtgggcctcaaattccatcttaagcagtttagactttttttgcactgaggggttaggaaggtggctatgtggaggatagattggcaaatgaaaagatggggaatgcaagaagactaggaagctatgacaatagcctaggagggagctgttgagaacctaaacttgggcagcgtcaggaggagtggaaagaggtatggtagaagagagggatctgaagtacataattccttttgtacttgagtttgattgatggcatgatagactctaacagcagattcagtggtaaagtaacatatcctggagtccagtccaatatggatctatgtatctctgggatgaaactaccaaaattgagggaggctcttcttttgagtagttaacctcttttggagggggtatagaatatcccactcctactggtaatactataatgcgtatcatgaattttaggtgctgaagggattagggagtatattgacaagccaaaaaactttaactggaataactgaattgaagaatcatatttgtcttgtctcttccttcttcccaaagcttcttaacttgtatagaatgcacaggtaggctgttttcttgaaggattttactttttaaatattgagtgaaagctgttttaaggttttccatgtttggtttagaattatatatttcaccaaatagggtaagtatagccatacgctttatgttttttaacaaatgttgttgatcatttattatttattattttgagaagcttaaaaattattctgtcatgaagtatgttttaactaggctactttggaaagtgtttgtaggataaatttatgattggctagattagtttatagcattccttttattcagataactctagtgaatatagctctaatggttcagagcagtgtttctcaaactactagtgatgatggaccagttttttaaaaaaattatcatctgtcacagacaaatatgtgtatctgaaatacatgactaacatgaactcacaccatgtgtgaggcaccacacaaatttgatattccctaactgatgtatactctgataaatctgctaatcactcacttggatcttgtaacaatattaagttgctataaaagtttataaatatttcctctcaatttctatatttatattgttggagattgataacagtttgtggatgatcctcaggaccacactttccgaagcattggttctggtcttgcatgttagtttcgtgcttttattctggttcatgtggtgaagactgtgtgtattctgtattcttaaaaaaaccactcgctctttcagatatatttggaagtgcttctaaaatataacagtgtaatctactttaacattgtaacctcccttttgctgtttagaatattttgtgtctaaatttgaaaatattcctaacaagttgatattattattttccagaatttttgaaatttgagatattgtttctggtattatttgaagtgcaacaaatttggcatttaaacttcactaatagtactttttcattattcagttttattcatttaataaatatttattaaacgcatttaatgtgtcaggaaccacttaggaattatgagaacaaaatagactaaattcttgatcttgtagattaaaacttgttttctagttagtgagaagacattaaacaaataactaaacatataatactatgtcagttagtgataaagctataaggataaataaaatgaagtaagggaaatatgtgttgggactgaggaagttggcgattgaatcaagatccaaacgaattaggagttggggtggaatcaggggcaagagccttccaggagagggaactgtaggtggaaaggccctgcgatatgtgatgtgttcaagaaacttataaagaggcagtttatatgggtacagtgcagtttgcttaaacggcgcttttagttgactataactttgagacaggcctatgagtagaggttgatactacttaagtctgttatgaaatcagctgttttttgaaagacctacataaagtctccttggagttctaggagtcgggagtccagagagtggagaggtccggtaccagtagctgctggttcctgaatagtagtgttctccaacttttccgtatctttttcttacccaatgttcctgagtaattgttcaatacaaaaaattttgcaagattttccttctaaatttaccaaaacttgactcttttcctgcttagtcattaaagaacattttccttacttagtcattaaagaacatttttgagtcatgtgcctgttaccactagaaatctctcttaggatacagacttgttacttatgaatgaattgttgtaaaaatccatttgcagcttagttgtttcagaactcaaaatttattttacaatggagagatgacacatggtgactaggttctcattaaacccataaaagcccatttaacacatataaatatacttgaggtacagtctctcttaataatactgtaaaacctaaccaccataaataatatggtttccatgaaaaaaaaaaaaaacattaaaaaatgcaacccagacaccaggaacacagcaggttctaatgctcctttgcttgcttcaaatatagtcaagttagatatgtcagacactgtccgtatttcccacactgtatatcattttattcttcctgacatttttcaggtatgttggtaaagaagtcaaaatacctggctccaggtctgacccttgtgagtcatgtgattttggtcatagtggatagcctctttgtcttagtttccttctgtggaaagtgtggataatgatattttaccctccagtgttgtgggaatttaatgggtttatgtatgtgtaagtactttgtaatctgtgacacactatgcagatattgatatttatctgtactaatttcaaatgcataatttcatctaatcttgttgcaatatatttctacctcccctttgaatctgtcttgttatattttcgtatggcaaaaactctaaattttggattttaaatgggttataaagccttttgagtatgttttgattaaaattatgtgttcatacaaactgtcttgaataaaatttcaaataagatttcataattttgcaatgtttgttagactatctcaattgatttagctttctgagggatttagagatgagggagggatgttatgccacaattcaagattattgatgtgggtccgcaaagaaaattttgaaaactccaccctgaaagctaaatatccctaaccagtcattctttcttccagccacctctatccccattccaaattcctacgctaaaaacttttcttgctatctctgaatggcatgactttacctcctgcccctctgtttttctgttatctttccatggccacagtggacatctgttgccctctaaagaccatttcaagagtggagaaagtattccttgtggaagattaactgtcagaagttaggtaatttttcaataggaaagactagtttgacttagtgtttattgaagtataacttttgttataccttttataaacaatattgactttaattatattcagtttacatatttcacttacttgaaatcaaaacatccactgtaaattagtttttgttcattaccattattggttgtagaaaatctgtttagtatatttaaatttgttgccttaggtgaggtatagttcattggatatatataataaatagcctgataatttgcttgaaaaatcagtaccttgtgaacagtaccttgtgaatctcttaacatatttgattatgacttgtgtgcaatcattgtatatgctttaagagaatacttacctataagagggtcttaccttgcctatctgattttttaaagcccattataaagatacagtcagctctattaactggataatgttgagagtgtggtgggagaggaaaaggttgtagatgactccaaattatgtttaaaataaaattacagcaatatttagattatccagggccaattaatcatggttacaatagggttctagatccaggggagtctgtagttatttagcccccctatgtaccaatcattcctgtcagatgctgtcaaattataaactcaggaggcgggagataggacagtaactacccaggattcccattcaatttcttcaaccccatagtcaatcctttatatagtggcatgtgttttaccaggaagaaaggatattttaggaagaaactccctacaacttagctattttaagaacttaaaaagatatgatttttaccaatctgagaaaaccttttatacttcatatagtagttccattcaaatacagtccagttcttgaattaacattttgtctttcttctagttgctagaacctgtctgtcaccagctctttgaattctatcgcagtggagaggagcagttgcttcaatttacgctgcaatttctcccagaactaatttggtgctaccttgcagtctcagccagcagaaatgtgcatagcagtggatgcattgaagctcttcttctaggggtttacaatttggtttgtatttaatggagttaacaaaatcttttttgacaaaatcaaatatataacctgtgcaactgcttttcattttaataaagctagtgtttgttttttcatacaccaaatgactcatagcccattcttccaaatataactttctggggattgggagacatacaagcgtacatgtaattatgtaacttacctttatggattgattgaaggttgaaaatcagaccatttcatttcttttatagagatatctgaaaatatcagtgttgcattttaaattttgtaaacttaaagtccattgtctataaatgatctgtttctgaccttcacagaaagtttgggagaaaagatttactctaatattcaccaatcatagttgcataaaatctagactgtctccagagtgtacaacattattttaacatacggcttgcattactaatagagtttatatgttaattcgtatggtattctagatacttaagttttgtacctttcaaaatagaaaagaaatataaggtcattttcttcacatatttcatatttaaatgattacttcgcttagcaaatataacttgttacatgagtaagatcaaggattattaagacactgtatctgtatctcagccatcctgaaaatttgttacatatgttttttaagtggaaggatgtacagtttaactaccggtgttgatgaataataatggattatcatggtttaaggttttaacttaaaattcctttctattcaggtctttttcaaaaaaatgttttagactatttaaatttagtttgtaaatttgtgtgtaagaaagtatgtattttaatatattttctttcacttctataggaaatagttgacaaacagggacataccaaagtattgagttttacgattccatctttatccaaaccatctgtataccatgaagtaagtgacattttatcacagtaagtttattgaccctaagctttgatattgccacaagttataatctagttatttaggaaaaaaattgatcaatttattagtacctgcaaaagtataaacacccacaaagtatttactatttccaaattgagataagaaatcaaaataaatgaacatcaaactaaaatgtgctaataagagatctattgaaagtattctttttgaaatatttttccctcttcctgatggatggctacttgtgtgtgttggccggcgggcaggggggtggtgggtgggcaattgtgtatttccatggtagaatttgtgaaattaaactaatttttatttctcatttgtggtttgttttaaaattagttattaaatcttcgagcagaaaatttggtaggcagcctaaatatgtttaagatatatgatgttcgtggtagctattttagtggtatatatatattctatatatcaccttttcagcagaatagctttttttttctttattcaaatgtcttttctctagccttccagcattgggtccatggctctgactgagagtgcactatcccagcatggtttgtcaaaagtggtatacagtggacctcatcctcaaagggagatgctgacagcacagaatcggtatactgtggggataaaaattcttatcttaatccactaattttttaagaaaattatttcagtagacttataaataatgtttaatgagttgtgtgtgacaatttatttgaatactgagtcattttatacaagagaaaaacagatctagatttgtcactgtgctttgcttcaggtgtcagctggaacactgaattttaaagacaggtttcatatggctgttacttggaaagtctttttttccttgtagtttttcattattggtgtgcttatactgtgcaggtctgttctgtaacattgtatctctccccaaggagtgctctctcccctattatagttgacttcttagaattctaaagatttgttaatattctttttgtttgtctttaggtttgaagtgttgacattccttttgttgtgttacaatgctgccttaacttacatgcccagtgtttctcttcagtcactgtgtcaaatttgttcaaggtaaagtaaaattcaagtgcttctaatattgaaatatatgaatctatgattgctagtctggtacatacctaagttatttttgttttgtgtaatcatttgtttaaaacattaaataagttaatgtaaagctcagcctacccaacacatggaaagttccctataattgatagtcacaaaaaacatgataaagggccggatgcgatagctcatgtctgtaatttcagcactttgagaatctgaggtgggagtattgcgtgaacccaggagttcaaaaccagcctgggcaacatagcaagacccctgtctctataacaaattttaaaaaatcagctgggcatggtggtgcatgcctgtagtcccagctacctgggaggctgaggtgggaggatcacttgagcccgggaggttgaggctacagtgagctatgattgcaccactgcactccagtctgggcgatagagcaggaccctgtctcaaaaacaaagaacacaaacaaaaacaacaaaaacaagaacatcatgaagaatgtaaagctgaataacgtttaaattgactatttaatcagaaaaggattatagtatatagctaaatgatagagctgttatgacctttcaagttttggcatgtggttggcttctttttgtttgcatttatttatttatttttactgtgctctaatttggaactaagaaataagtaagagatactggttcttaaacttttcttgttaaaaataaattgagccaaggggttataaaataaattatatccttgagtatagtatattcacattttaaaaatcctgatttaaaagagtagttaatgatagtatgtatggtatgatttcctgattggttgaatatgaccagaatattaacaatgattatctctagttggtggaattgtggtttattttaattttctcctttgtgattttttttgtgattttctaaatttttggtaatgtgaatgttactttttttaaaaaggagaaacaaaacaaacaaaaatgacagattattcccctcgataattcaagtaaataagagatattatagaactaaggaacatgtggaataatttctatttgaggaatttatttagaaaatgcaacttatcctgagtgtattagtccattttcatactgctatgaagaaatacccgagactgggtaatttataaaggaaaagatgtttagtggactcacagttccacatggctggggagcctcacaatcatggtggaaagtaaaggaggaacaaaggcacgtcttacatggcagcaggcaagaaagcatatgcaggagaactcccctttataaaaccatcagatctcatgagacttattcactattgtgagaacagcatgggaaaacccaaccccatgattcaattaccccctgactgggttcctcccacgacatgtggagattatgggagctacagttgaagatgagatttgagtagggacacagccaaaccatatcacagaggacgggatcattgagcaatacttagaaatgaaatgaaaacaaaataaacaaaaaatcagaacttgatactgaataggatagaaagccatgcagaatcagcagaggaagagaattcacaagacaaagggcttggtagagaagatagagacgtgaagtctttcaggtgttttccaaattagagcataattacatttcctaaccttaaaagatggtaccagtggttcatctctcccactcaccaagtcgttctaagatgttttttgctttaaattgtttaaaggcagaaatgtccggacttttgaatttcacagatctgtaaaatctcaaaaaaggtggaacagctgggttatttacataagtgttggcaactttttattttgccaagtcattatattgtaaatgtctaccatcaacattatttaacaaaagggagactattttaatatcaaaaaggtgggagggtggaagggaaggaaaataatttataaattaaaaatgggataagtttagctttccttgcttttcgtttcactatggtctagtgaaaactctgttatcgactaaaatgggtataaggaccaacattcagaaatactggtttaaggagtaacaatgcagcaattttcacctctagaacttagaacacactgcgaagtccaggtcctactttgaagcagtgtattagatggtaggatccaggaatgcctatatatgtatatatttgtatttttatgtattatatataaatgtattttttgaagctccatagatgttctaatacagtgcccaaccactcttgacgtttccctgaaactactgacggaaaagttagaaaagaacatgtgtcactgatttttagcctatctaactctaacgtagtacattctaatatacttacttttatattatgagtagaaaattgctaatataccaattttacctgaccagggaactgaataattcttcaacagagaatgcaagtaaaaactggctttaaaaacaaagagaaacagattattttaaaactagctataggattttggccaaggaagttttggtagaaatagatcaatttatgccacaagagaaattaatttcatataaatgtccaccagctgtgaaaaaaaacaagagtgggggaaaagatctaagtaatttaaaagacttaagctatctaaataatgctaactcttaactacaatgtgttatattagaggaactctatcaaatttatcattcctgtcatttttagttgtttatgtctttaagttttcattttagattccctattgactgtattctcaatgataaaatccagttatttatttctcttacctactggctttcttaatcatttatcagatattctaattaggaggttttgtacatttctaagatgaatagaaaagaattagaaaacacttttgttaatcatgttaagcctagttcatatctatggaaagaaaattggttacagaactgtggtgataagtaagttagaaatggttataccagttaaagtacaagagcttcttaatgatcttagcactaacacaggttttcctgaagatgaaagtgatcctgctgttacatgggccatctaatcctgtttgccatgtgatagttgttttagattgctgctcaatttggttgatgactataccaaaatgattgactgggtcatctaggagaaaggatacataaatacaaccagaaaaaattcatgggatagatgaactagattcagtgacaaatgtgttacagtctttttttaatcttctgattttaattagttatgaaaataattaaaacaatcttgaacacttcccaccctccacctatgctcacacaaattcattctactgagcaaaaatctgttcagttactataagctttgccttcctgattcagactgattgatggccagcttgatagcctgttttcttcctacatagtatgtgtgaacaacttgaagaagagatctgacagcaagcaagagctaaactgaataagctatagtcaggaagcttttgttctctgctagtactaaatgtatatggcactatgaaaagaaatatactcaccaatgctacaaataagttttgctagtatatgccagagtcctctaagtttgaggaaatgatttctttctgttggacatttaatacaagactgtttaacaaatggcttatcttcttttttgatgtggaatataaatattaagaatgaaactatgctcagctattaagttgaattctctcccattgtctaagggacagctctgattttgtttagctagtgagtcatctaactgacgaacctggatatggatagctgtgagttcctgatcagtgtatttgtttctgtgtacctgtaatgaatccctgcctctcctcacttctaggtcaatttttctgaccacctgaacagattgttttctgtcaattaagggcagctttgttacgagtaagccattttgctcctgactaataaaatttatataaatataaagcacttaatgcagcatcagccactttgctatcatctagtaaatgacagctggcatattattgtaccccatcagtgagcacacacattcactatggatgcacataagtcattgctttcattttttttctcacctgtttgctatgactgtatcaacaattctagagcatatctgatataaggtcatttctggttgaaagaacctatggcaaatttttcaattgcttgttattttatttggaaacttctttttaccggtatgtaaatcttgcccatccttcacaacccaactgaaataatctttcctccaactacgtgagcatgatttttgtgtgtgatcttcacttgagaaacatgacagaagatgcagactttattaagctcttaaagagcagaacaagcaggacagaaaagtgctcattactattcaggcaattcttccactttctcttttctcctttcccctttttctattctcctggtcttttcctctccacttctctctgcccctcttttttttttttttttttttgtgagatggggtcttgctctgttgcccaggctggagtgcagtggcacaatctctgctcactgtaacctccgcctcccaggctcaagcaattcttgtgcctcagcgtcctgagtagctgtgactacaggcaaatgccaccatgcccagctaattgcttgtatttttagtagagacagggtttcgccatgttgcccaggcgggtctcaaactcctgagctcaggcactctgggggcctcagcctcccaaagtgtttacagatgtgagccaccacacccggcctgtttccccttttcagccaagtttctactcactagcctgatgatctggagatccgataataataatctgataataatattatatgtaatattataattatatatttatatataaatatattatctgaatacatttatattatctgataattaacctttcttttctacttttggttctggtctatcatgaataaataaactcactggaatgggtcttcctaatcattttatggtttgtaactgaggctatattaacaatcccaaaagtttatttttattctaagaataacacacatgtctctcaccagagaatgagaatcacaacaagagtttttctcacttacacattgatgctaagaacttctccaagaaatatattgaccaaatacaccttccggaaaggattttattttcacatgccttgtgaatttggcagagtaaatttaatacagacatagctgttatggcactcagctgctcttttgtaaggacatacccttatgtttggatttgtgaagggaaatcagagaacttcaggacatagccgtgatgaacagaggagccaggcattcatgtggcatatagctttattgctttgtttttttggcatttaaattcagtgaagggtatatgggcaaacaatatccttgaagataggaatcagaaaaaacctaattcagagaattcttaagtaccaaaataaaggagtagagaaaagagatgccattaccagttaatgatgcagagggataggactagattattttgggtctcagctcaaatgatacctccttggagaggctttccgtgaccatcattcctaaagtagcactttcccaccctagtttatttccttgtagcactcataacactgtaattaccttgtttgttcttttgatatagactgtcaactgctagaaacttcaagaggtcaggaactttttgttcactgctgtatcacaagagcttagaagtgcctggcatatgatagaacctcaataactgttgaatgagtgaatgatagatgagctcttcaactcagatttatgatttgataagtagagttaggattaaaggaaataattggatttttacttttaaaaaatctttcattggtaaataaaatcatcagttttagttttcctagttataaaacattaacaatttgcatttctgaataaacgtttaatttcagcctctgatagatgatcacttatttccttacaagtagctagtatagaaaatgagagaacctggaattttatttcctttgtaaatctttcatgtgtgttggtatttgagagaattgtctctgtaattcttacataaagtaagtttaaaagatgagtgaccatcctagagccatgcaaatttttttttagttgtataataacaacagtaacttacctatgttctgtttcctgaaccctatactatttccttcctgattcctaaacctgtatattcaatccaggaaccatctctgtcaacatgtcccatagataccgtgtaagttttaggactcttcctatggcaaccaactgatatctacatcaaactaaattataccgaaggggccagatgcggtggctcacacctgtaatcctagaactttgggaggccgatgtgggtagatcacttgaggtcaggagtttgagaccagcctggccaacatggcaaaaccccacctctactaaaaatacaaaaattgccagatgtagtggtggggtgcctgtaatcccttctacatgggaggctgaggcaggagaattgcttgaacccgggatgtggaggttgcaatgagctgagatcatcgtgccactgccctccagcctgggcgacagagtgagattccatctcaaaaaaaaaaaaccaaaaaaaaacacccaaatttttgtacctaggaagagcagtcatggaactggcctcaggatggccagacgttggctcatgcctgtaatcccagcactttgagaggccacggcgggtggatcacttgaggtcaagagcttgagaccaacctggccaacatggtgaaaccctgtctctaataggaatacacacacacacacacacacaaaataaacaggtgcggtgtgggaggctggggcatgagagtcacttgagccccagaggtggagggtgcagtgagcagagattgcaccactgcactccagcctgggcaacagagtgatactccatcttaaaaaacaaacaaacaaaaaaagaactggcctcagggtcagctggatccagagactcagatatttttaggatattccctcccatctcatcatcttcatttgttggcactgtactttgtttttgcagataggcttcttccatgtggtaagaacagtgacctcaggcagctaaaggcttacattgtccacttttttttttgttttttttgagatggagtctcgctctgtctcccaggcaggagtgcagtggcgtgatcccagctcattgcaacctccgcctcctgggttcaagcgattctcctgcctcagcctcgtgagtagctgggattacaggcacatggcaccatgccaggccagtttttgtatttttagtagaaatggggtttcaccatgttggccaggctggtcttgaaacctgaccttgtgatccatctgccttggcctcccaaagtgctgagattacaggtgtgagccaccgtgccaggcccttacattgtctgcttttagtgacctcagcagaaagaacttctcccagcttcagtattaaaaacatccagcaaagggggtgacagcctgagacttctacatacccctatagggccatgttgggtaatacaattggaagagtactctgtcaggttaaatattgctttggttgtattaacacagataaacaatgataacttaaagtagatatttatttctctctcacataaaagtccaagctggtaggtggtctcagaggtagattgcttatgtttccaatgtgttcaagttgcttctgtctggggattctgccatttcctatggtattgcccttgttggtatggtctcagatcactactattacatctgccttctatcctgcaagtggggagaaagggagtgaaaggcaagtagctgctttttaggggtatgacatagaagtttttttaggggtatgacccggaagtttcaccactttggttaatacaccattgtctagaacttagtcacatgatcacatctaaatgcaaggaaagctagaaaatgtagtctgtagtggagcggctggcattcctagctaaaattgctgggggaaaggaagggaatgtgacttatatgtatgtattattacaaatagatatggaggtagtgatctctgtaatagatagttttattagcagactcaccataatcatgtgattattcttgattttatggggaaagactagttcctaaagggaagagggatggcagtgcttttaatagaagatagggatggtggcatggcagacaaaattgatactataccacggtacctaaaaatcaacatatctgaaacagtatattccagtgttcctatttgttctaactcagttaatgacaccgtcatgtggtcagctattcaaactaaatgtggaaataattatccactcttcttatttctttggtctcaccttctttatacttcctagatatgactccaaacctacccttcctcctacccaccattatgtcttgtattcagtcctccttcatctcactactgggatcctcatcccacccatctccagtttcaatgaactcttccaatatagccagagtgatgttatcggaagaccaatctgattttggtactcctttgcttaaaacaaaacaaaacatctttagttgcttaccagtgtctacgtggtaaaacctagcaggttataagatattcatgttctggctccatgatgtgatgagcttctctagtatttcctagtgtcctagccctctatcctgctaaaatatccacagtctcctcaatgtcatgctgtttcatcccacctctgcctttgaactttcctatgttttccacttggaaaaatatcactttttcttcaagactcaattcaaaggaatctcttttctgagaattcctctctgactctccgcttcttctacctgagtttaccattctctcctttaccacatcttgaacttgttcattgaaaatatttgcttactacacagtctccatgattagattgtgagtccctgtgggagctacatccatcatgtatatctctagagtctgacacagtatcaatctttaataaatatttacagaatgaataaatgaattaactgaaaatttctttcatccatcggttctctattatttacaaccatacaatcatccctatcataacaatgtgagatgtaagaaagtaaaattttttgtttgcttctttagttaataagagtaacaggagtctctattctagtttgggcatacatttttgtaaattcaaacaaaacttgagtttgttttatttcacatgcagctaatttttctgtttccctgcttactttttactcttggttctaaaaagttctgggatcctctaatatcaaatgcatttatgttgattttttaaagttgctctgaattaatgacattcttggggaatatttttgaaatggtctgtggcatacttagacattttaaagtgaaggcttagattcattgagtaggggaaataactttaagttctaggtagtcagtgcgggggaagagtgagtaaataattacaatctattggctagtattatattaagtgaagctcatattatatcaagcatagaatattatgtgaaagcatctattttctagtaaatttattaaaaataaaaacttactgtttattttaaaaacagtgcatgctgaccaacgtggtgaaaccccatctctactaaatacagaaaaatcagatgggcatggtggcacaggcctgtagtcccagatacttgggaggctgagtcaggagaattgcttgaacctggtaggcagaggtggcagtgaaccaagatcatgtcactgcactccagcctgggcgacaagagggaaactccatctcaaaaacaaaaacaaaaaacaaacaaacaataaaacagtgcatgttggtcagaaagttcaaaaatacatgtaaatataaagaagaaaatagatctataatcccacagatcagagataactatgactttttaatgtactttttgcagtgacacacactatacgcctatttgtttattgcaaaatgggattatgctgcatctgttgttttggacagttttttttccctgtcatttaaatagattttcaaaacattatgtttagtttctatagtattctctgaatgatttatataattggtctcctgtgttggacttttaggttgcttccttttcgttataataaatgctccttagctttagtactccttaaatattcctcactataatacatatttctggagctgagtgtgatacctgtaatctcagcgactgggaggctgatgtgggaggattatttgatgtcaggagttcaagaccagcttggacaacatagcaagaccccatctcaaaaaaaaattttgttttaaacagctaggtgtggtgacatgcacctgtactggggaggttgagatgggaggattgctggaacccaggagttcaaggctgcagtgagccatgatcatgccactacactccagcctaggcacacagcaagaccttgactttaaaaaactaataataataaataaatatttctttgttttttttttttttttagtttccatgtcttctttttatttttatttttttactttaagttctgggacacatgtaccgaacatgcaggtttgtcacataggtatacatgtgccaagaaataaatatttatttacatgtcattttgtttatggtagtttcttgaaaaaaaaaaagtaaaatctattgatctttctttagcattctacctttggtgtcatgtttaggtagcatgcaaagagtatgtaactatttgcctatgttttatttcctttgtggtttttaaacattaacggttataatctatctgaagtttattatggtatactgcatgaagtttgagtctaatttatagaatttttttggatcctgcagtttgtgtcaagaactttgtcagaaattgtggatcataccacacatctatttatgacaaatagtgccaagtttcttttgtctttctttctttcttttttttttttttttaatggaatctcactctgtcacccaggctggagtgcagtggctcgatcttggcttactgcaacctccacctcccaggttcaagtgattgtgctgcctcagcctccctagtagctgggaatacaggcacatgccaccatacccagctaatttttgtatttttactagagacagggttttaccatattgaccaggctggtctcgaactcctggcctaggtgatccacctgccttggcctcccaaagtgttgagattacaggtgtgagccactgagcttgggcagtgccaagtttcatgtagtaggtttagcagtacccaaaaattattggtagttaattgaccaaaattagcgaactaaccagtaagtgaatctggttcacttactctgtgtatcaacatacctcagctttatatgttttttcctggtataacttactcaggaatgtattacagacaaatgttctgtttggaaagattctttgtttcataaatattaggtttgttatgaaagtgtacctagtacattgttggcttataaatgttaaaataaatcacctaaaattttaccaattttagaaatacatttattttggtttttctagaatctgtgtttgtggatatcctcgacaacatgtaagaaaatataaaggtataagtagcaggataccagtttcttcaggattcatggtgcaaatgttaacagggatttattttgccttgtaagtatctcatcatatgcgaaataaacatttaatttctttggaaaattatagtctgttcatctattgtcactatattataatgtcaatagataagtgatttgcatactttttgtgaaatatgaagatcttgataatagttttaatactttaaaactattatcttagtttaaaacatatcttttaaagttctgaagaatttctaaccaactaaaacacttcatcatctttcttaaattcaaggacggaatgaaaatcagtaacacttaaatatattcatggtccctttcttcatttttttttttgctataatttccaaatagctttttttcctcaagaaatatatttttccattgccagaaactttagctcttaaaaaaatttcagagcctctttgattagaaatagtttattattagctttctattagtttctaatattggcgctcagtctgtcttacctgatgacttgggtactagtatttttctttgaaccctatcttttactttataattctcttattatatgtatctcatttactttgcattatattcacttgatacttttaattttctctagtagagtataaactttttgaagacagaatttataaacttcttaaaggcagaatttatggtctgtgggcccagtctggcctgatgcctgtttttgtcaagttttttgcaatacagtcatgcgtgtttgtttatgtattgtctatggctgcttttgtgttacaatggcagagttgaataggtgagactgtacggcccacaagcctaaaatacttattgtctggcccattaagaaaaaattttctgacccttgtgttagaccattaatattgtcccacagttcttggatgctctgatctactttattttatcttttttctttgtgtttcagtttgagtaatttctgttagctatatcttcagcatttatggatttttttccttgactagatcaagtctagaaaggagaccactgaaggcatttttcatctctgttaccgtgttttatttctaaccatttcattagactctttcttgtagttcccgtctctttgctgaaatcttcatctgttcatgcatgttgtccgtcttttccactagagcctttagtatattagtcatagttattttaatttcccaaataacttcaacatttaggtcatctatgaatttagttccactgcttgctttatctcttgacagagttggtcttgtttgttttgcttttcatgtgccttgtaatttttgattgttcatgattttgtttagcagtaggacagtagagactgaggtaaatattatttatgacaggaaatgggcatgcctcttctaggctgctagtggaattattataggcagaagtgacctaggattgggttttgttgttatggttaccctcagggcaccatctacttcaaattcctctagtgctacctggtacttaggtggagagctggattgctggagggtttttcttaatactcctgcttcgtcctcagctttcagccttctctgtatgcctccactgcagataggtttctttccatgttctcaccccttcctccagcagtacagttctgttgcttggttctgggtgtgcactagcctggtggtggctggggcggtggtggggttgggtgggggggcatggaaatggggggaggtagtgttctctgttgtcctggtccagcctcagttttaggctgatcccatgtccccgcatctcagggatgggagtttctcagtagtcctgccccttcagtgatgacccccactacttatctcagcatagaatgagaggttttttgcttttttttttttttcttaccctcagagccgaattggtcttcacttgttcgctggggggtgaaagggattgctgctctttccccaaaggctttaaaatttttgttctgtgtgataaaggcatctggctggctctttgtacttttctcacaggagtggttactcttttccttcaggcctataccatcaagggcagttttctctgacctgccctgtttctagtttttcttgtgagtgcctaaaggagatttatggcgaagagcctgtggtggatacaggctcccacttgtatgtgcttttagagattctgtactctcctgctagcccatgagttaccttttagcaatttggcttctaggaatttgttaagaaaattagctaaatgtttcttacctgcttgtattgtggcccatctctccttagaggcacctgtctccctttagggttccggctatgtggaagcccttgttacctcggctctttgatggattcttgagaatttataattttgtagattacctggctttatcttgtttttatggtgggagcaatgttcttgccagtttttaggcctcgcttgcactcttgatgtaatttatacctctttattttgttggaagttgatcaagccactatatccctgttcatttttgtaatttagctgatttttaggaagggtttggcatatctttgaaaattatgcatacacacacactcacacatgcacacacacacacatgcacagacacacacacacatgcacacacactttttccctcaagttgctctgctatttgcaacatgtagcaaatacacttctaagtgattatcagaatgcaaagaaataactactcaggatactgcaagccacactggtagtagattctcattaaaaactgtgggagttacagaataatttggccataaagtgttctgaacatttttctaaggtatataatttattattctctgatttgctttgaaagtataaaatgctttgaaattgccttagctttttttatttctgttctataaatagtcatgttctttagagaagaaatgtacatctataaaattttctttgctattaataggcatttagatgcaattgaaaggaattcaaagatttaaagatacatttttaagaggagtagaatgttaagcaatgtgctaatatgatcttttattttcttcagtaaagatagtttctcattgtattttgttcagttataaataattataatttcttcatttaattcatctaattttatagttataatggagaatgggatctagctcaaaaagcactggatgatattatatacagagcccagctagaattatatccagagccattgctggtaggtgcctgacttatttatgtaaatgttataatttaagatttctcaatttagaactataaattgagagagagccattcatagtttattaatatgtcattaatactcagtgtattcatgctcttgttatacatggaagttttataacttagaaaagtaacaaataatttttttttaaattttctttgagacggagtttagctcttgttgcccaggctggagtgcaatggcacgatctcggctctccgcaacctccgcctcctgggttcaagcgattttcctgcctcggcctcccgagtagctgggattacaggcacgtgccaccatgcccagctaattttttgtatttttagtagagacaggatttattcatgttggtcaggctgatctcaaactcccgacctcaggtgatcaggccccctcggcctcccaaagtgctgggattacaggcgtgagccactgcacctggccaaaataaaaatttttattagactgacttcctagacacctaactgtctttttaacttatgagaattgttctccttaacatactttagctgcatttattaattaacattaggcatttggaaatctaattgaatattttgaaatttttaactttatcatttacatatttttttaaccatgaatttccctcttagcctcctattcttatcttagaggatttctgtatcatcttataaaatgcttgggaagagcctctttgtataagcctgtttagcatcatgttttatcgaagggttagataatatatctgctctatctgctcatgttgatcttaaactatattttttctccttaggttgctaatgcaataaaggcttcattgcctcatggtcccatgaaatctaataaggaaggtacaaggtgtattcaagttgaaatcacaccaacttcctctcgaatatcaagaaatgcagtaaccagcatgtcaataaggggtcataggtggaaaagacatggtaagaaatacgtaactcttcaagtcaaaccattgttgattcttttacatttttcactgtacttatggtgctataacttctaacttcagtaaatagtaatctggaagaaagagctgtggagttgcccttaactcctaatttattatctaggagcaataggcagtaagaaaaatggagccccttatgttacacatatgaatgaaaatgtatttaaaaatcatattcaatttgaaattgttacttcagtaggagaataaggaaaatgcattttaaaattactcatacattttgggcttgtattcaaaagtatttgcaaatgttccttaattaatatttctgatttctcagtgaactcttaagcaagtgaatttacatattgaagtagaacaactaatagggactttaaacactttgtctgcactttctggtaaagaatgccatagtgttgacgcaacactagttgtattttcttgaagttaattttctttcaagattctgtgtatgtgtgtgtgtatatatatatcccttcttgtctgcttcattttattattttaaaattttattggaagtcattttcattcactatggctttttcagtgctttcccatttccctcccttgtcttttaatttattgttctttatttaatttcatattatttttataacttccctcctacctagaagttattgtagtgtcaacaaccagtctaagaaggaaattatcaccttcctcagaaggtaaccatggtgggaagcaaaaagctacttctttaccctaagcaaacgtgtatattagaggtaaaacaaaatccattctctattttcttcttcctgtaaactgaggtgaaaataatagttccttttggtatatttggtactggttgtgttgtggtttctatagagaaaatgggaaaggagaagaatggagctatttatggtaaactagaaagttggtgatgagaacagttgccattgttttcacttaaagaatctaggtgattgtatgtcagaaaacaataatgattatccagcttacctagtgatcatttttggtgtttttaaagtgtagcaattcttgaaagttccataggaaagtataaaagaggcggtgatgtttgccaatagcaaggcaaattataccaccatttaaaacatatagtctaaacatacttcagcttcttcagtgaaaattatgctactgaatggggctagattacaggtagaaagtaatttaattagatatggtttaccctgaggttggtttttctgttttggcattaatgtgtgagaacaggcacggaggcaatgaagcagatcatagtggttactgtggccataattgcttctaagctactgctacaggaagcacaagaatgaattttaatttcttttccactttccttcttgctatttaggtagacatattgggaatttgggagagaaatgtaggtcctgcagttaaaaatgtgaaatattgatgctcccttgtatttgtgcatatgtgtgtatatgagagagagtatgtgtgcatgtccaggcgtacatttaaacaaggaggtctgtaccctgcaacaaaatggaagccatttcccagacatattttataggaaaaaaattacaaaacaagagaaaagactgcttgaatgtattgtttctagcagattcttacatatcttccagattgtattttggctgccacttgaggggttagcactctgtcttaggattgtaccctcattaaagtagcattcttatcacctgtaccccttcacaattctaacacttgggaaactctgtttattataacaataaagtcacagatgagaatatagaagtgaatgaactataaaaagtaagtcacatgcatggaacaggtacagaatacagcttagccttgtttatcactcttctttagtgtgaattccctttatccagtggactctaaaatactcttaagtccttcttatttgcctctacaggtaggttgcagtctcctccctttttagggtagtcttggctttcccttctagagcagtaaagttaccatgttcggctgaatttgaaaggtttctattttccatcctcatggtcctgcttcctacttgaacacattgtttttctaggctctctaacaggcactggcttcctgtggggaaggtagacacctttgctgtacttcttagatatatagacaattctcaaattataaatagatttttaaatttaattttgtttatatataaattacaaatttctcaaattatagattttttaatttaattgtgttaatatataaattctattgttaatatttatatataaatcaaaacaaaatttgtttatacatttctttagaaacaatgttaaagggcttgtagatcccagggtgagccacaacagcctttttatctcataatgtttctgaaacataggactatagaatgtaagttcagtttatggctgtatgaaaatacatttagagtttctatatttaatggaactctaaatgtgtttcccattccacccactcatatccctactattccctcaccacaccaaccctcacagtaggacaaatttcttcccaaaccctcagctgtatctatcatacagtagaaacaaggaatatcccaccttaagccagtggtgatgaggattgggaaaggagaagggacgagaaccatgaactttaagaaatattctttttttcctctttctccttgcctctttgttttcctagtttttggaaagaagaaagcaattggcccttttttctttttttctgttggagctcttctctttttcttttacttatttgtctttatttattattgcatttcctctaatttctcctctttctatcttttctgggtagaagagggaaacgagtgaatgaggttttctcatggaagacgccaagtaaaactttcctttttgctttttttttttttccatctccctttaccataaaagaatatacgtaattaagccatgtgaatgtactggtgtgtttgcatatctgagtcaccaaaaattattacacagccgacaaatacattaaattagagcaattaatggacatttattctcttttattatcagtaacagaagaatctttcaattttctttacagcccaatctcacattgtagtgtttttaaaatgaattttgaaaagttttaattgtttacattttaaaatattttaaagctatcctagaatgtattttaggattctgtaacgcttcatagatctgccatttttttcttaaggttaagaattattcacaacatattttaatggaaagtattataatggaagtttaaaaattactttattcttaacatttctacacatttcagaatacgcatctctggccatggttttgctgttgttatcaattcaagtttctagaattgtattttgaccagtcctgttatttgcttggctctgttttttatttttatttttttagtaaactttattttttagagcagttttaggttaacagccaaattgagtggaaaataagagagttcttaaatacctcatgaccccacattcatagcctcccccagtatatcaacatcccgcaccagagtggtacgtttgtaaggacctataatttaaattttgaccagacagtgcatcctcatgtcaattaaataggatgatttttaaagaaaggttggttttaactgaggtattatttggagagatctgtttgacaactaatggtgtgtttgcttgatttgccccacttttcagtttaagttaaacaattgtatggacatggcttaacttaatgtgtttttcaaattttttaaactttgtgtttaaatctttgagaaaattctaatgacttcataattttatgtcagtaaatatgtttgggaaataaaattacagtgtagaattgctgctttcgacttttaaggaacataatttcagaattaaaagctttatgtgttgcttattcttttatgcgtattgtgtttaatttagtctatagatggcaaataattcaaggcaaaggtgtattttttcaaacatagattttcaagtcacctacaaattgagggctgtctagaagtcataatttgaaagtaaaacatagtgggagaaagataataataaaataagctttaaaaagcattcaataagtttagagaagactgaatagattatgaccataataaaagtcaaaatgaaaattccagtaagaaaaatgagataaaatttagtaaaataattcattaatttttcaagttaatcattaaaattcaattttgcttaaatatttatttccttttaaaaataaaaagaagttaaaggaaaatagaaagttatttctttataattatgctttaattctatagtcattcttaaatgtcgtttccaaagataccttcatcatctaccatttcagctattttaaaaagccccttttcttaagtccctgaaaagttctctaccactccagtattctagtatacaatttatacttgtttatttccttgtgtttttccattccttcctccttttctagagcaaatctaattgctattttctctctgttcacgacaactactactaccatgattactcattcttcttccactttttaagaaattatccatacttggaacaatgtaagagatttcctcctttctttcaaaatagttattgtaatactagtcattcattctataaaagtcccctaattaagttatagttccaaataatgagtgcttatattttttgccaactaatcaaaaggcttatccagtggaatctcgatttttttattgctgcccatcattcttcccacttgtgcctttgtgagataatgagacaagtaagtgaaaacatttggtatactttaaagcactacataaaggtagattattaattaagaacagttttgtttgttttactagctacaaaataagtatattcttaataagtttttattagctagtttgctattcaagttgtcctgtgattctttagtactttcccaaaactgtaagtttttgaaacttgtaatttggattttctcaatttgagttaaacttgtttagtttgagtatagcatcaaatgcaaaaatacacgttatataatagtaacaattactttaaagattttttgtatgttctgtgatactggagtatagtactctaactttattatctaacgtgtatatcactattacagtaaggattttaaaaatgttgttattgtttcaatcccaagttaatataaaaatagaaattacatagacaaaatttatgtttcttatttatgtacagttataactgtttgcaactagtaggtatcaataataaaaggaatgtttataaacaagatactttcaatgtttccctacttttggtcctggcagatgttaaatggtttattttaataacagtgcatttaattattttcagttaggggatccaagagtacaaaattttaagtagtaaaaaagaattaaaagtagcaactgtatatatttctaagtcttctaacttaatgatgcaaaataagtactgcaagaattttagaatatttaattatatgcagtgtttatgtgaacaatcagactaaatgaaatttatgtagttgaaataaaaagaaagtacagtttcatgttgttaaagcagttttattgcatttttcagcatttaaaataattgcttctctttaatggatgccatcatatttaaataaagttaaatgattataacagagttcaaagagatttaaaaaaaacaaaaaagtgatttgtttcataatttgcttattcagtggtttagtactagcttgttagatgaaaaaagaaaagaataaaagattgcaattcatatcggaaaacatttaaaactggttattgatttagaaaattctaataaatttctgctgtataataacattgataaagcaaggaagtactaattattgaacaaatctgaaaaattataatgggtgtattttagtaaatattataaataataattgtttataaatatttttaagcatttaaggttgtctttctagatattacaaaaggtaaatggtaataaatcttgaaatggaacatttattttgtaaatctgattttacaactatgagaaaagtcttcagttgaggagaaataaagttgctaacagttaagaagcattttgaaaaacaaagaaatggtaataattttaaaccccaaagtagtaaactttacagaattgtctattggaatgatttttacatcggcaattaaaaatttataatgtgtatgtttttattttaaaggttgtctatacttattaaggaaatttagaaaataaaaaattatctggcagttttattttaaaaaatgtaaatacttttagtatcattttgagaagctccattactttcagattctaaaatgctatttgaggaacagattttctttcccaatatagaagataaaacatttggacaaaaataagcatttctttcttaccaaaaattttgtgaattttaactggcattttcaatgtggaacttccatggaggacaaaataaaatattaggaaatattagattactcaaggaaaaaagacatattaaccaaagagctgaaatacattgatatgtttgacacatgtggatattaagtttgagagaggaaagaaagactgtgtacagaatcctgacttagacaatttttgaggaaaacaaaaaatctcattttatttccaggtaaaatgaagttaaaaaattttccagccagagacagaattattggtctcatgaggcaaaaaaacttgttcgtaaattattgtattctacatttttactaagggggacttacataaatcttgctgtagttaagaaagttattattttttattattgattattgagcactcctcctttctccacctttttatgagcatttgctgcacattgcacaccaaggaagaaataagcttttacaggtagttttgtaataggtgttgctgacctgtttttggtctgtgctacgtggtcatgaggatctgtaataatcataaaggattcacctggtcctgcagcggccgtatgttgcaattctctattggattttatttaaaacttgagacttaataaagatgacaaaaggagttactgagagtaattgaatccacctcaataaggagaattctgtcatttaccatgtatacaactaaagctaaagatctgactgtttatctcttatggaaactgctgatagctcctaactggtgtgtctatacaaattgtcttgttccagactgtttttctgtatgccccaggctgctcttttcttacctagaaagactacttactgcttcagagctcagattttgacatcttagtctttgtttttgcccttgctcagagtgcagccctttaactgcagggtcccatcctgtgtttctgtgatagctttgttttcctctaatctgccttgtaaatactggcccaggttaagcattgccacagtgctattctttatgacttgggacacagtttatgctcagtatcttgtgttacgcgaatgtgacttctattgataaaaaaggctagtaaagtatgaaagatatgcaaatagttttttcatgtagctgtcactggccatccactgtaatcacaataaaatccagacttcgtgctatggcatatgtgatcctggtgatatgacctcttgactactgctttgacctcactttaagaccactctcaccctggttcattagactccttcattctaacacttcaacgtactaagccattctgccttaggggcattgtctagttatttggagtatttgagctgaaatttgaatagtgaaaggtatgttgacttcccttactccagattgttgtgtggctagcagtttttcatcattcaaacctcagcttaaacatctcttcttcaaagaggttttcccagaccacccatctaagtacttttatcccctattaccctacttcctctttcccatcttatttttttattgcattttctgctatttaaattatcttgtttacttggttccgatattacagtgtgagctctgttcccttattatatagtgagggaagaatctatctttttggctgttgtatccccagcatctaaatcaatgtctgacatattataggtgctcaacaaatttcagttgaatgcatgaataagtgagtgaatgataaagaaatgtataacatagggtgagcaagttgttctttcttttcttgttttgttgaagaacagtataacaacatgatagtaaactagattaggggatatttacttataattccagtatttaaagaattttcatttagttttttctatgcatgtatgttttcatggttgtactctatttaaacttttttggtattttgtttttgtttagttaatattgtcagacattttccctagttctcctagtaaatacagttattttaatggctacatgatatcacattgagttaatattccatcatttgcttaatcattcttctaatatgttaagaaatttgtttctgagttttgctattataaataacactgtaaggaatagcttaatgaatacagataacatttttctccattgaacagaatatattataaacataaaatgactatattaaaggatatttgttctggtatggcatttaaaatatctacatctcataaattgtaaaagaatgtgtatgactttgttttggggtttattctaagttaaagtatttttcataattcatgtaaaaaattgtatgatgcagacaaataataaattatatttttaaagcttcagcttattattttcacaaataagtttgtaagcaccccatgtcagagccagatgcctttagactcaaagtaatctgagtacagagatgtataaattctatgaataaataaattattcttttattaaaattctcacctttagtaaatatggcagccataaaacaaataaaagcaaaagctaaggtggttttgtaagtgacataataaaatagatatttgggattataaaatgacatttgagagaaatcacaacttttcgtcatcagttttaataatatttgcaatttgcttcactttttttcttaaagctggaagaaatttttttgggcaaaattatttgagtacctttgagaactaatttggaaatgtctattaaaagtattctttaactttcatttctacatgtggagagtttacctatttgtgcatatagggggttacacaaataaaatatatcctgagaagtttctttttggatcttttttgagctttttgaattatttgaagtcaagtacttgttttttgttttttttttaaggtgtggattaatcatgactccatttgcatagattgttaagttctgggaaaaacaaaatctattttattatgcatttatattcccttacagcatcttctatataattttcttaaagaaaggattaagttctactctttagctatatatgccatcctctggataacataataaaaaaatagattttaaaaatgatctttttgacctaagcatcttgctaaacctacatttagagacggctccttcacttttccaaaacaaagaggctttgcttttctttgccatgtaaaaattcttattagcataagctatatgtatttcatttatccagtcaagtaacacattcacagcttacccttctcatgtcttctgtatgttttctcacttttatttattctaataatttaatctcataacagaatattcactcaattcatcaaaaaaagatgtattgagtgtctactgtatacaagctacttttccaggtactagatacatagtagtgactagatgaaaattttaaaatctccttcctcatggaacttaggtctaggaaacaagataaataaataattgtaggttagagagtgttaagtgctaagaagaagaaaaaaggaagagggtatgtgaaacgtgggggctattaaaactttggatgggttgaccaagggagacttcactgtaaaggaaatttttgaaaaagatgtgaagtaaggaaatgagccattcagccaccaggagaagacagcagccaggacagcagtaagacagtgtgggtgggaatgtcgggtcacagagttatatagggaaagaagttggagagctgatagagagcaagattaggtaacaaatgtttgtttggattacttaattatctttctttattctgtagttttcctgagaattatgtttctgttctttctagctctgtacagaattacttgctcttcttataaatttaataagcagtttaaaaaatctgccattgttaaccatttttgagtgataacaagtatcaattaattaggtaaagacttatgcttgtgggaaaacacatgatcttatttttctacttgccatttaattccatgatttttttaaatgtaatatcattacttcttgggctgcagacctttattctgataaaagtgattacatttcagttgcgtggtactgctttatgtaatattctccctgtcattttctagtttttcttgcaaaatcctgaatttctgccattgaagcaccactttagattaacagctttcattggcatctcttaaaaaattgacccaattaaaaaaaaacacagacctaaactcaagaattattactttcctaggatttcttccagacttttattttctccggctctccattcaaagtaaattgtttgctttttgtaaaatggccaggaatctacatgaataaattaaacctaactgtgggatgtcagaggatatttaactcaaacggactcgaatgaagagttagagttagtatttatagtatgttagaagagacatttgaagttaaaagattttactggttagcttcccccactgaatagttgtgtagctcttcctgaacttcagtttccttgtctgtaaatgggaatcaaattgcctacttcagaggctcactaatagattgttttgagattacaattgaataatatatgtgaacactctcaagaaagcgacttagggcaattcattgtaagtattgttctgtattctattaggcctatgcttagcttttaaaattttattaaattttaatattcattgccttttttatgtctggataatttccgaagtttgattttttttggactggagatccctttagtagatcttttgtgaaacagcttccacaatgtaaataaacaagtcttggctgtcactccacagtgccatggggattttatctcagttgcagtgacctctggcatgtacctcaataagaatttatttgccctaacttggaagacagttgttagcaattggaaacaggcttggttggaggtttttagtttcattaatcctttattacagagcacccagaagcagcagtgcactactacctcaccaacattcttcagcctatctaggaaataaaaacttcatttagagaacctttagtcaaaagcctatgaagcactaatttaggggaaataattacaccagcatgttggctcagcagtgcgaggcaccatgaagctttgaggaggggctcccagaagtgcatattgctgctgggtatggagtatccaaggcacccgtaacaacttttatcttaagtttttaaaatttgaaagaatcagaatagagcagtggttcccagactttgttacacgttagtcacctggggcttttaaaaatcttatgcccaggtcatatctcacactaattataaattagaatgtttgggggttggagccaggcatcagtagtttttaaagatgctcaggtgataccaatgtgcagctaagttagggaaccacagtaatatgtggctctggcctttgttcttttactacctgttactgtttctcagcctttagcatcattagtgggagtctgataatcctatcacgaaagtatttgaaaatagtaggtgatgtcccataagcaggtttgtggtctacagtttttaaaaagtatatgctgttttacatagtcttatgttgctttgaactttgtttcactactgtcaccttctaggtatatttatgttacttttccccatttacatgaataactccttgtaacattatgcctttcttatttaagaccagaataaaatcatgtctacaggtattaactagttaggagttttgtttctttgtttcatttataatggctgttttcagataaagggctgacaacgaatttgtttttccaaatccatttttatttttctctagtctagtaatgaactaaatttatgaaattggtatgagtctgaataaatcaactgcttaactatatcacagccacattaatacttactgttaataatagatgatgtatatgtgagacaaaaactatacctgtgccattactaaccatgatatcatatatgaataagcattttcccaaatatcatggtttattaagtcagtctcaatgtagcctcataaaaaaactagaattttaagagtacaaaggggaacttctgtgtggcttggttcctaatgttgacaaaagctaaaggtttggctgtagatccttgaacatttgcctaagacttgacataaattcaggtggtcaccatattatcttaaaaacactagaaaattacccaaagaacacaaaaagaacaatttaaaaacaaattttattttgatttattagaaaatttatctttcatattccatgtgaaatgtgtgtgtgaaaaaatgcagaacgtgaattgatgctctgtgaattttttgtttgtcatttaaaattaaagaatatgaccctattgtctctggtgctatcagagtattataaattatggaaattactacagtgcaaatatttggcttaattcataacattcagtcatctaatttttgttttgagtcttttgcttttctcatttcacgtttttgttttgttttcatccatcattttgtcttatcatcttcaattctagagcaacctgacaacaataatgatgctactgaattgggcatccttgtcattcctgagattagtgtcacaaatgtggccggagagagaaccgggaatggggaaaaaggcagaacactaggagagattgatgctcagcatatacagggtgtgcaggaaacagccacagatcctagaactgagagcaaaggcttgccagagatcaggaggcaaaaatctgtaagaaaaatgatggaggatggaataaactcacctggcagagtgcagttttagcagagcactttataactgcactccaaggtatcttaaggcaaagggccactgatgcatgttaagcagcagttgcacagtcacaaaaattttgcatgtaatctaatccaaatgcatgaattatgcaccacatttctcaatgactcttaatgctctttggaatgattatacctttatcgtctttgagtaaatttttatgaaaactgaggcagaaaattccttctaaaataattttctgcttatgtttggagttctaaaattactttttcggctttgtctttttgccatctttgttatgaaggataatgtgtatagaattttatgtttgagcttgtgatatttagagtctagatttttttaatttgataaaataatctacaatatagagtacaaccttctaaaaaagtctttaaagtattctaataccaattttttaaaagttccttggtaagagctttgattttatactgctttgctactgaaggagagttcacccctagttttactgcgtgatatttctaattgtttcttatcttttgcatgaataggagaattctttctaaaaacttaatggggtatggtttatggcatgctttttgtttaatacactataaattactgtcatttaattacagtgaactatttttgacattttataataaatgttttgatttatcctttgattttctataatctgttgctttataaattatgctaaagcttaatttatgtgaagcataactgatttggtgttaatcatttaaaaagattgcttaaaatacttaatgttaattaatctttgtcatttctttgtttaggaaatacagaattaacaggtcaagaagaactgatggagatatctgaagttgacgagggattttattccagggctgcgtctagtaccagccagtcgggtttatcaaacagtagtcacaattgtagtaacaagccaagtataggaaagaaccacagacggtcaggaggaagcaaaactggaggaaaagaaaaagaaactacaggggaatcttgcaaagatcactttgctcgaaaacaaactcagagagcccaaagtgagaatcttgagcttctctctttgaagagacttactttaacaaccagccaatccctacctaagcctagtagccatggtttggctaagaccgcagcgactgtatttagtaaatcctttgaacaagtcagtggtgtcacagtcccacataacccgtcatctgctgttggttgtggggctgggacagatgccaataggttttccgcttgtagtctccaagaagaaaagcttatttacgtttcagaaagaactgaacttccaatgaagcatcaatcaggtcagcagagacctcctagtattagcattactctgtccacagattaattagtaacatatttttctcccataacctagtgaacctggaaatacaactttgcttctttatgaaagtaccctgggtctttcatccgtattcctgacaggagccctgatgtcttaaattctgaaggctcccctgactttatgaagggaagattgtctaggttgcagtaagttgaaatatggttttgttatttcttgattaagattttttccccttggtttgagtcttttttttccctcctcttatttgttattgttgccctaagattgtcagtgacaataaattttgacaggttgtctaatcaagttggttatgtctcatgtgaggttgtaaggtggtttttcttgttttggtttggtttggttttttaatagctcctattttggtggctgtgtgtttggccttcagagtcaaagggagtctgcatgtatgggaactgttttatagagaatggggcagaggcacaactccaggaattctctagctcctggtcaggaagccaatctgaaaacaggcatgtggaaacacaaaaatgatgtgtatgaaaagcacctgatgaaaatatttgtaagcagatcatctttatgattagaacaatttgctcaaagccctggaaaatgcctggtaacccagtgcctagaatattatatgattccaggggatggctagaggcatttctgttgttatctctgaaacatttttatatcaaaaatcagattgctggtaggtgtgttgttttgaagtgttttatctggatttagcatgtgaagatccctttcaattattaaggtataataggctgtaaagctgatttaccctactgctggactttggaaatcctagttagtttggactcctataattcagagcatacgtcattggaagacttcctggaaatcagtgtaaatcttgcaacatagctctcaagataccactgtataatatgtaattgtttgtctgcaaatgcatttttcatctataaaatgtcatgaaagaaaataaaggtagtgaaatatggacaaaggacatttatatattaactaaagttgtttatgtttgtgttcttaaatttaaaacacgaagaaaaagaaatgtctttcttgttagtgaacaggcctgttttaaatatcttagtatgatatcaaaagaataatcaatttagttacctcccaactaaaaagtaaaaatgaaaaagacgacatggcagaagttgaaacaaacttgtatgtatctgtatgtgacctctagatggaaataaaagtttgatgtttgctagccgtggtccttttggctatggttgcggttcccctgtaaagcaagtgtacttaagtcatcattcagagtgagagagagaaagcacggctgaggctgagtcagttgaccgttgaggaagacctaaggagctgtccagttcttggctctttttcactgtgactgcacagcggtttccttcttcatagtcccttgctgtagtcaccaagagagcatgctagtgttttcctcttgtacctgcttatgcagagctcagatatatgaaaaatttgtatgctttgaaggctgccaaagcatttatactctggacatagttttaactgcaactgctttggctaccagtttaaaccgagttcttcaaaaagcatgaactcgttttcattcattagccctgtttacaatgtggattttgacataaatgaatttgattttcttttagctccagtaacagaatggaataagatctattgccataaattgtagttaagaactgtaaggcaatcgggcagtgaaacttgatattgtattaacttaataggaaccctgtgtacaatttaaaatatttgtaaaatatcactgtgaatttacagatgtctttttgtcattctttaacaatgaatttcccctgtgcatagttattaatagtattggtattattaaaaactaatttggcattttaagattggcattttaagcaagttgaggtgcttaggaaacattgtagaataagtttggggaaatgttagctgacagagctgagagatcagattttcatgttctatcactgtaatggaacctcatttagacctctctagacctttgctagctgtgtggtctgaggaccagtaagtaggattggcattatctggtatcttgttaaaaatgcagaatttcatgccactctaggtctactaaatcagaatttgcattcttaacaaggttcccaagtgatttttatgagaagaaagtatcagagtgcaaacaaattactcgtctaatatgtagaattcccagtggtctcacagccctagatcaaatgtgtcagacactagatcattataatcttcattggttttgacagctaattaattagtttaataatattgacatatggcttcttaagtatttgaattctagattgctaatgatccttatttttgcagtaaaaaagtaacactttatatttttcttgttaactataaatggaatcagagctgtaaatgcctgaaattttaagtgtgaaaaggggtgccacccttttatatactgcacaacaaatttgcatttgtatattctttttaaaaaatctctgaagacttgctcagtgaaatggttctgattttttgcttcaaatgatttgcactaattgattttctggagagcggagttacgttaacaacaaaattcttttatagttcctttgatactatttcaaataaggattacacattgaaagtttttatagaaattatgaaaattggataatcttaactatggtaaccattactattatccatactactttctccccactgaactttcaaatttgaaaattggggtagcttttgtaggtcactttcttataaagatgctgatggtcacagatctcctaagtatccagaataatatttttatcatgagaaggattccacacaaaattggggtcttgcaccccatatttcagaggatctgaacagaaattgtggcttcattgcacattttaaatctctatagattcttgaaatcacccaacctctcacatttgaaaacccaacggcctggagtattctggtggcactggagccagcactagctttttggaatccaagtggggagagaaacaaaaatagacttttcaagggactgtcccagactacccagggcaaatgtcttcccttcccttcctgaagccacaggaaagcaccctggagtcctttgtataccactatggaaatttttaaggcaagctctcaagacttgaagagttggaattctcggcatttaaatgatgcctgaagtttgttttgaaaaagcaatatttcattgctcttttcaattgtgaagcaactgctcagcaaatattactcatttttttaaaaagttgaattaaagggaaatatatttttaaaaccaaaatagatcaaaatgatcccagttttaagggattttgcctattttggaagaataaaactaaaatgttaaaactgttgaattacagagaacagatgtactctgagacataattttaaacaaatatttaaaataaggcaggttaacatttgcgtttaggcacaataaatctgtattaaagggaagcacatcaaggaaatatatacatgttgaataatgtaactgaaaaatattttttaaaaaccacttaaaaagaaaaataatttgatgggtactttaggcattgtagatagaaattaatgtataatagtgtcctcccagtctttgtatgaaaaattaaaactctctagtcctttaatgagcatgaatttatacttctacatttgttgcttagtaaaattatactcagtactttgagttattcagatttatgtttaatattgttaaattcttcatcagagagcataaatatattgtcttctatactttgtaacttgtgcatatctaaagaaactaacaacgaacattttgggagatgtttttgtgtttttttatagtagagttttagagtacatttgtcttaataggaagtttttaccataaacccaagattttatttcacgtattgttgctttctcttatatggaacttattgtgtacctcttacctttatttctaatcatttagtgatactaatcttttcatagtaaatatatttgtttctaattgtattcctagagtttacattcctaaagaataaacgacgactttggctatttttgtgtgttccctaccttcttaaggctatggaaataaactggagtttagttttttgaatttttgtatatttgtgtaaatgttctccatatgtagtactttatacaacaagtgttgcctcttgttttattgaaataaaaactgaaaaaaatattttttccagatcagtttactcatttaaaaaattattataaaaatttgcagaagttttgatatgaaggaagagaataaaggaggaagacttaggtaagttgagccattgagagcttttgggggtaagtgataagacaatgacctcattcctggctttgtgctttacatgtcatagggctgaggagtatgacaggtccactcgtattcatccaaagatgaagatgagctctatgggccatgcaccagtggcggattatttgtcatatcagaagcacaggcaaatttaggtaacatcactttgtccttctaactttagaatctttattgccatgtgtggtgagtagtagtcccaactactcaggaggttcactcgagcccaggaatttgagaccagcctgggcaatataacgagatcttatctcttaaaaaaaaaaaaaaagcaaaagaagaagaaagagtctatatctcttgagtacagagattatatgcccctagtacctagataggactttgtgcgtggtaggtatctagacatttatgagacaataaatgagttaggttgatgttagctttggaaaagaatcaaggataagtcttcagtgttttctttaacagtacaattttagaattttgtttgttggctttaggaaatctcagtggcattacatgaattgcattatagcatgtacttagaaaaaagaacttatggctgggtgcggtggctcacacctgtaatcccagccttttgggaggccgaggtgggtggatcacctgaagtcaggagttcaagaccagcctgaccaacatggcgaaaccccatctctactaaaaatacaaaaattagccaggcatagtggcgggcacctgtagtcccagctactcaggaggctgaggcaggagaatcacttgaatctgggaggcggaggctgcagtgagccgagatcatgccactgtactccagcctgggcaacagagtgagactctatctcaaaaaaaaaaaaaaaaaaaaaaaaaacagaacctattaacctattagacacttgaaaaaattcctggcttgtagttgattatatgtttggttaattccatttcatctaaggaactaagtaatttaggaaatgtgttcttaactactcttagaagggtacttgtagagaaccagagtggtgattttgtaagcagtattttgtcctatacaatatgcactcttccagtaactccagtagtccacatagctgactcacctcctacaacccgactttgttaatatcaagataactgttttataattgtagagaaagattttttacaaccagttgtagttattattttctttgcattatgttattgtgatagtagtggtagctaatatgtgtaattaaaatgatcatcttatcctcaaaatcatcctataaagtgcatagaatccccattttacagaagaggaaactgaagctctcaatagggtagaggacttggctaaggtcacctagctgctgagtggcaaaactcagccttgaacacaggtcttaggactctcactttatatagcttggtaaaagaagatactaattaaatcctacctaatagagatgtatttaaaattcactcaccccatctgtcttacaggtaatagttttaaggtaagataaaatcaaagtgttctaaaagtaaatcataatacattttacagaattagagataattgtgttttagtggtcaaacaatgctcgttattctgttagtaaaagcatggtaaaatgcaaattaaaataagatttctctttttttttcctgtcagattgataaagatgaaaaagattggttctagtattgacattggtatggggaaatcattagtcactgagatgattagcaggactgtagattggtacaaatgaattggtgggcagttcaacaggatctatcagactttaaagtgtatctcataccctctgaaacagccatcctactcttctatatttattccattctctgtattctactgaaaatttagcacaaatatataaacataagcatgcaaggtattcattgcagtattgcttgtaatagcaaaaacaagccagcaaatctaaatgtctgttaatagaggaatagataaattatggtacgtacatatagtggaatataatgtagccattaaaaagaatgcagatctgtatgtgatgatttacattgattattcagtgtatgatcccacttgcattataaatgtgtgcagtagttaaatatgagtgtgtgtatatgtataatacacacttatgtttgctagtatgggggaggagagcattgtttctcaaagtgtggtctaaagacagcctgcattaggaaattttttttttaaatggggattcctgggcattgtgctaatttccctgaatcagaatcactgagtgaagcatggaaacctgtatttctaacgggttcctcagttgatggcttatacaaatgtaaaatatggtctagtagctgtcagcaatgaattggatatctggtagtggattgtagttagaaagggcaaacttcttgaagagatcttgtattttaaatgaggcctacctaaaataaagccagttgagtaacgttatcagcatagacctgttaatgaaggtgaattggcctgacatagaaaaatgattctaccatacagcactacacaccgactaaatgagcaagccttttaaaaaatccttgttgaactgcccaaatatcagatgacctgttaataaagcacaagtaaataataggacttactgtggtaagagaaagtgccaccttgatttggttgtgtgtcagaaccagaaagtaagattatttgtagggctttgggatctatgctcaaatggtttaaggtatgtctgtcaaggcagggaactgattgggattagcaaagttgatagttcagaattagtggacacagcaagcagggttcttgaagattcctgaaaagtcaactgttgtttgagaaacaagctgtttgcccaggtgagcagggcttcacctgtaggaattgtcttcaaccttaggaatttcctctacaaacaacaacaacaaaaaaatagggattgttcttgtttttatttgctttgttttgtttgtaatcttatctttcctgggcaaagatttcctggaataaacaactaagttatgttgacatacatgggctacagtcttatccaagctgtattgacactgatggattcagtttgtttttcttagctctctctattcaaagattataagtcaatattatgtatatagcaattgacaggtcataagtacggcatgctaactgatcgtaccactggagctccaacaattgatgtatctttggtgacttcttagtgttctgctgaagatcgcaaagatttctgtagcttcttgacctctataacacttggttcacacttgttaagtgttctaatataatccacatcacattgtgctgtgacttatctttctcatatttgtctccctcactagaccacagccctgtgggaatataatataactaatacataatggtgaataaagatttgttttactagatagaatataaatcgaatccaggaaatcagtggcagcataggagagactgtgttgcttctcttctattcaatagaagtctttgaaactccttttattctctaatattcttcatggagatgaaaatgaaggttgtaaagctttactctgattattttaagcatgcctgcataaaaatgttttgagaagtaaattatgcatcatgtttctctttagttagactatgaatggtgtgaagaattttctgggctaatgtttgacatttattattcactcctgtagatttgtggtgaatatgaatggtatctggactaatcagaaaacaacgtaggaaaggcctaacttcaacactgaattcttgctccttgtctcacttgcttccttttgtagaaactacaagtatatttaacttttgtatcctagatccactactgcctactgaaagcctatcatgcatttatctttaaacttttactctcttcatttagccaacatatttctacttctatgttgcctgctgtgctgtgtaattttctacaaacattttcacctccaaatcccttgaaatgaaaccctctggaagagcatcaccactttttcttcctctattctaattcccctctagtttcccctctagtttaagacttttgtttcaatatttattctttccttaagcctttaaattcatttatatccaccaagttgaatttgatgagacaggatatgtttgaaagaaggacaaaccaaacaagcaagcaaacccatgaatactcgtacaataggacataatatacatttcccagttccctgaaggggtaaaattgagactggttatacaagcagtattgcacagcatgctgatactagctagacatagcctacagtgtttcagcttcactcaaagatggttctggaggacagtgaggaaatgaactttttccagcgagaataaatatgagcagtatttctagtctgctttgcaccgaaagtgagccatcccaagatacagatctacaccatttatacctggccaggtggttggaaacacagacgtaataagattggaggatgagtgacaaaaattgggagctaaacatattggacttcttaaaataggctcagattgcaagaataattgtttcctacagacatattaaacaaaggccctgtggtgaaggaggtgctaaataatcagatggtcaagatgactttgaggatatcagtaaatctctttggtattccagcctttgttcaaacagtttatgggcaaagcggctatactggaaggatagggctacacaggaacttcaacaatacaggcctcctttcatcaaggctgtccttattactgccaggagccgaactggccagcagcagtgaccatcctaagatacaacatctgagggtgaccagatagttagtggcagattgattatatcaaatattttctttcatggagagacaactatttgtcctcatggaatagagccttactctggatctggctttaagtttgccttccctaagcaccatgcttgtgtgtgcaataataagcttcctgttcaccattatgattttccccaaaatattgcttctaagaaacttattttacaatgtaatcagtgaggtagaggtagaattacactttcagtcatgggaaactaggtaattaacatcaaaattcccattggcaactagataatccagcaaaactcttcaaaacatgaaaatctaggccaggcgcagtggcttatgcctataatcccagcactttgggaagccgaggtgggtggatcacctaaagtcagaagttcaagaccagcctggccaacatggtgaaagcccgtctctactaaaaatacaaaaaaaattagccaggtctggtagcacatgcctgtaatcccagctactcaggaggctgtggcaggagaatcgcttgaacctgagaagcggaggttgaggtgagccgagatagcaccactgcactccagcctgggcaacagaggaagactctgtctctaaataaataaacatgaaaatctagagaggcaagcattggcacaacttctttcctggaggtattggctgattctagaagcatttaaggggataagcagtgcttcttactgctccaggatattaggaggacaaaaactgaatgccagtgcctgccaagtcataaaagagggcttaggaaattcccatgctttgggctgggacccaaaaaagctccaccataggagtaagagtgaattgaaagtgcatcaactctcccccatacacagggaattcagcacggattcaaaccatcccaattcctgaaatcagattaaaaatgatcccctaagtgcttggtaataaacaaatcctctgtggaggtggaaaaaaacccccatcatcttaagcctcaagttctacaatttttcaaatacagtcttcacaagagaaaagaaaaataaccagacacttctatagcagagcaacactcattgagaacaacaagcagctttgggtaaaattgcttaaaacctctgtttgaagccattgaagaactttcagctaaacaggactctagaagacaaaacgccagagagaaggtgtgcagaaaagagttaacataagaggctgagatgctatccttagccctgattttaaagctgggctttggctagtgtctgggaacttggattaccggaatgttcccaccattccctaactgataagggggtttactctttgtaaactatataaacaacatggtttatgctgaattcccgctttgcttctaggagtctggaattatgatttgtgctgggcagagggtgcctctatcactaacttccaatacaaactttgggcagtaagactctaacgagcatccctggcagacaacatttcacacctgttgtcacaattcagtactgaagtaattaaccacagcctgtgtgattccacaggcaaaggattcttggaatcttgtgtcaggtttcctctggacttcaccccatgtccttttcccctttgctgatttgctttgtagtacttttctctaataaatcatagccatgagtatgactatatgctgagccttgtgagtgcttctgttgaatcactgaacctggggtgctggcgtggtcttggggactcccaatacaaaagtattttaaccagagaagtgagcagacattctgcagctacttcttccattatggaatttgccaaatctgggtaaaaggcccaagaagagagttactgttaagaatcagagaagcaaacaagttatggaaaccacacaggactggagaaacaaaaagaacagggcctttaaaccaatcgcacttgggagagcagagatcctagtaagacaggaagttcagagaagtgagcctggcactttccttgttttcctcttgagtatttgctgaattcttggattgctcagagaggggaaaaaaaaaaaaaagaaaaaaaagaggcggaaacttgctgaaagccagaaaaaagatttttagtttttatgcatcatggcactgagagataaaaatgttatttcacaacccttcaaaagggaaagccactagtacatatcccaggatctcatttaagaactctgtagagatacaaacaggagaatcaaagtaaattataccttataaaaattgtaacttagcttcaagtcaactgaatgattgattgaattaatgcagtctgcctgccaccactctatcttcccaccaggaatatatcatccagacactataaaatgtatcatatctaatagctaacattgtgtcaaaaatttcaaagaatattaaaaatctgaactatgagggaaaaggcaataaaaacatccacagatgacccagttattagtgttatcagagacagacttaaaaaatagctttgattaatgagtaaagatggagaatttcatgagaatcagaatctattttaaaaattcaaaattccagaattaatgcaaaacatacatatttatgcatattgaagaatggattaatcaaaagaaagagattgtcagactggatttttt

SEQ ID NO: 1590 - DNA, 3773 bp, Homo sapiens
ggacgggtccctggtcgtgcctgtcagagaggctggcggcagtggtggctctcccggctgggttgtcagtcagtgagaggagggggaagatggctcaccgggacccgttctgctaggaagaaggggagcaggtggtgctgctactcgggaggaagcagagcagcctccgtcgctgtcgctgagagcctcacgagtcgaggtcctgcaggtggagctccggcagccgccctggttgaaggtttagaacagatgtggaaaaatgtttacttcagagaaaggggttgtggaggaatggttgtcagagtttaagacattaccagaaacatctttaccaaattatgccacaaatttgaaagacaagagttctttagtttcatctctctataaagttatccaggagccacaaagtgagttgctagaacctgtctgtcaccagctctttgaattctatcgcagtggagaggagcagttgcttcaatttacgctgcaatttctcccagaactaatttggtgctaccttgcagtctcagccagcagaaatgtgcatagcagtggatgcattgaagctcttcttctaggggtttacaatttggaaatagttgacaaacagggacataccaaagtattgagttttacgattccatctttatccaaaccatctgtataccatgaaccttccagcattgggtccatggctctgactgagagtgcactatcccagcatggtttgtcaaaagtggtatacagtggacctcatcctcaaagggagatgctgacagcacagaatcggtttgaagtgttgacattccttttgttgtgttacaatgctgccttaacttacatgcccagtgtttctcttcagtcactgtgtcaaatttgttcaagaatctgtgtttgtggatatcctcgacaacatgtaagaaaatataaaggtataagtagcaggataccagtttcttcaggattcatggtgcaaatgttaacagggatttattttgccttttataatggagaatgggatctagctcaaaaagcactggatgatattatatacagagcccagctagaattatatccagagccattgctggttgctaatgcaataaaggcttcattgcctcatggtcccatgaaatctaataaggaaggtacaaggtgtattcaagttgaaatcacaccaacttcctctcgaatatcaagaaatgcagtaaccagcatgtcaataaggggtcataggtggaaaagacatggaaatacagaattaacaggtcaagaagaactgatggagatatctgaagttgacgagggattttattccagggctgcgtctagtaccagccagtcgggtttatcaaacagtagtcacaattgtagtaacaagccaagtataggaaagaaccacagacggtcaggaggaagcaaaactggaggaaaagaaaaagaaactacaggggaatcttgcaaagatcactttgctcgaaaacaaactcagagagcccaaagtgagaatcttgagcttctctctttgaagagacttactttaacaaccagccaatccctacctaagcctagtagccatggtttggctaagaccgcagcgactgtatttagtaaatcctttgaacaagtcagtggtgtcacagtcccacataacccgtcatctgctgttggttgtggggctgggacagatgccaataggttttccgcttgtagtctccaagaagaaaagcttatttacgtttcagaaagaactgaacttccaatgaagcatcaatcaggtcagcagagacctcctagtattagcattactctgtccacagattaattagtaacatatttttctcccataacctagtgaacctggaaatacaactttgcttctttatgaaagtaccctgggtctttcatccgtattcctgacaggagccctgatgtcttaaattctgaaggctcccctgactttatgaagggaagattgtctaggttgcagtaagttgaaatatggttttgttatttcttgattaagattttttccccttggtttgagtcttttttttccctcctcttatttgttattgttgccctaagattgtcagtgacaataaattttgacaggttgtctaatcaagttggttatgtctcatgtgaggttgtaaggtggtttttcttgttttggtttggtttggttttttaatagctcctattttggtggctgtgtgtttggccttcagagtcaaagggagtctgcatgtatgggaactgttttatagagaatggggcagaggcacaactccaggaattctctagctcctggtcaggaagccaatctgaaaacaggcatgtggaaacacaaaaatgatgtgtatgaaaagcacctgatgaaaatatttgtaagcagatcatctttatgattagaacaatttgctcaaagccctggaaaatgcctggtaacccagtgcctagaatattatatgattccaggggatggctagaggcatttctgttgttatctctgaaacatttttatatcaaaaatcagattgctggtaggtgtgttgttttgaagtgttttatctggatttagcatgtgaagatccctttcaattattaaggtataataggctgtaaagctgatttaccctactgctggactttggaaatcctagttagtttggactcctataattcagagcatacgtcattggaagacttcctggaaatcagtgtaaatcttgcaacatagctctcaagataccactgtataatatgtaattgtttgtctgcaaatgcatttttcatctataaaatgtcatgaaagaaaataaaggtagtgaaatatggacaaaggacatttatatattaactaaagttgtttatgtttgtgttcttaaatttaaaacacgaagaaaaagaaatgtctttcttgttagtgaacaggcctgttttaaatatcttagtatgatatcaaaagaataatcaatttagttacctcccaactaaaaagtaaaaatgaaaaagacgacatggcagaagttgaaacaaacttgtatgtatctgtatgtgacctctagatggaaataaaagtttgatgtttgctagccgtggtccttttggctatggttgcggttcccctgtaaagcaagtgtacttaagtcatcattcagagtgagagagagaaagcacggctgaggctgagtcagttgaccgttgaggaagacctaaggagctgtccagttcttggctctttttcactgtgactgcacagcggtttccttcttcatagtcccttgctgtagtcaccaagagagcatgctagtgttttcctcttgtacctgcttatgcagagctcagatatatgaaaaatttgtatgctttgaaggctgccaaagcatttatactctggacatagttttaactgcaactgctttggctaccagtttaaaccgagttcttcaaaaagcatgaactcgttttcattcattagccctgtttacaatgtggattttgacataaatgaatttgattttcttttagctccagtaacagaatggaataagatctattgccataaattgtagttaagaactgtaaggcaatcgggcagtgaaacttgatattgtattaacttaataggaaccctgtgtacaatttaaaatatttgtaaaatatcactgtgaatttacagatgtctttttgtcattctttaacaatgaatttcccctgtgcatagttattaatagtattggtattattaaaaactaatttggcatttt

SEQ ID NO: 1591 - protein, 519 aa, Homo sapiens
MFTSEKGVVEEWLSEFKTLPETSLPNYATNLKDKSSLVSSLYKVIQEPQSELLEPVCHQLFEFYRSGEEQLLQFTLQFLPELIWCYLAVSASRNVHSSGCIEALLLGVYNLEIVDKQGHTKVLSFTIPSLSKPSVYHEPSSIGSMALTESALSQHGLSKVVYSGPHPQREMLTAQNRFEVLTFLLLCYNAALTYMPSVSLQSLCQICSRICVCGYPRQHVRKYKGISSRIPVSSGFMVQMLTGIYFAFYNGEWDLAQKALDDIIYRAQLELYPEPLLVANAIKASLPHGPMKSNKEGTRCIQVEITPTSSRISRNAVTSMSIRGHRWKRHGNTELTGQEELMEISEVDEGFYSRAASSTSQSGLSNSSHNCSNKPSIGKNHRRSGGSKTGGKEKETTGESCKDHFARKQTQRAQSENLELLSLKRLTLTTSQSLPKPSSHGLAKTAATVFSKSFEQVSGVTVPHNPSSAVGCGAGTDANRFSACSLQEEKLIYVSTELPMKHQSGQQRPPSISITLSTD

SEQ ID NO: 1592 - DNA, 2683 bp, Homo sapiens
ggacgggtccctggtcgtgcctgtcagagaggctggcggcagtggtggctctcccggctgggttgtcagtcagtgagaggagggggaagatggctcaccgggacccgttctgctaggaagaaggggagcaggtggtgctgctactcgggaggaagcagagcagcctccgtcgctgtcgctgagagcctcacgagtcgaggtcctgcaggtggagctccggcagccgccctggttgaaggtttagaacagatgtggaaaaatgtttacttcagagaaaggggttgtggaggaatggttgtcagagtttaagacattaccagaaacatctttaccaaattatgccacaaatttgaaagacaagagttctttagtttcatctctctataaagttatccaggagccacaaagtgagttgctagaacctgtctgtcaccagctctttgaattctatcgcagtggagaggagcagttgcttcaatttacgctgcaatttctcccagaactaatttggtgctaccttgcagtctcagccagcagaaatgtgcatagcagtggatgcattgaagctcttcttctaggggtttacaatttggaaatagttgacaaacagggacataccaaagtattgagttttacgattccatctttatccaaaccatctgtataccatgaaccttccagcattgggtccatggctctgactgagagtgcactatcccagcatggtttgtcaaaagtggtatacagtggacctcatcctcaaagggagatgctgacagcacagaatcggtttgaagtgttgacattccttttgttgtgttacaatgctgccttaacttacatgcccagtgtttctcttcagtcactgtgtcaaatttgttcaagaatctgtgtttgtggatatcctcgacaacatgtaagaaaatataaaggtataagtagcaggataccagtttcttcaggattcatggtgcaaatgttaacagggatttattttgccttttataatggagaatgggatctagctcaaaaagcactggatgatattatatacagagcccagctagaattatatccagagccattgctggttgctaatgcaataaaggcttcattgcctcatggtcccatgaaatctaataaggaaggtacaaggtgtattcaagttgaaatcacaccaacttcctctcgaatatcaagaaatgcagtaaccagcatgtcaataaggggtcataggtggaaaagacatggaaatacagaattaacaggtcaagaagaactgatggagatatctgaagttgacgagggattttattccagggctgcgtctagtaccagccagtcgggtttatcaaacagtagtcacaattgtagtaacaagccaagtataggaaagaaccacagacggtcaggaggaagcaaaactggaggaaaagaaaaagaaactacaggggaatcttgcaaagatcactttgctcgaaaacaaactcagagagcccaaagtgagaatcttgagcttctctctttgaagagacttactttaacaaccagccaatccctacctaagcctagtagccatggtttggctaagaccgcagcgactgtatttagtaaatcctttgaacaagtcagtggtgtcacagtcccacataacccgtcatctgctgttggttgtggggctgggacagatgccaataggttttccgcttgtagtctccaagaagaaaagcttatttacgtttcagaaagaactgaacttccaatgaagcatcaatcaggtcagcagagacctcctagtattagcattactctgtccacagattaattagtaacatatttttctcccataacctagtgaacctggaaatacaactttgcttctttatgaaagtaccctgggtctttcatccgtattcctgacaggagccctgatgtcttaaattctgaaggctcccctgactttatgaagggaagattgtctaggttgcagtaagttgaaatatggttttgttatttcttgattaagattttttccccttggtttgagtcttttttttccctcctcttatttgttattgttgccctaagattgtcagtgacaataaattttgacaggttgtctaatcaagttggttatgtctcatgtgaggttgtaaggtggtttttcttgttttggtttggtttggttttttaatagctcctattttggtggctgtgtgtttggccttcagagtcaaagggagtctgcatgtatgggaactgttttatagagaatggggcagaggcacaactccaggaattctctagctcctggtcaggaagccaatctgaaaacaggcatgtggaaacacaaaaatgatgtgtatgaaaagcacctgatgaaaatatttgtaagcagatcatctttatgattagaacaatttgctcaaagccctggaaaatgcctggtaacccagtgcctagaatattatatgattccaggggatggctagaggcatttctgttgttatctctgaaacatttttatatcaaaaatcagattgctggatccctttcaattattaaggtataataggctgtaaagctgatttaccctactgctggactttggaaatcctagttagtttggactcctataattcagagcatacgtcattggaagacttcctggaaatcagtgtaa

SEQ ID NO: 1593 - protein, 519 aa, Homo sapiens; identical to SEQ ID NO: 1591

SEQ ID NO: 1594 - DNA, 27932 bp, Mus musculus
  misc_feature (1)...(27932): n = A, C, G or T/U
gcagggggaaagaagggggcatcctgacagggcacagtggcttgagttgctagccgtgggtttggaaaccaatgagttgtcatttgagtgacatcgaggcagagggacagatcctgagagtggacaacagaaacctaacaaagacagtggtcagagatgagagtgcctgtgggccatgctgggagcccaggcagggtgagaatgtgatgcacgtgtctgcttcccccaggcttcttcggcttcgtgatcctctcgctgctccttgtgcctatgttctacatccccacggcctcctttagtgggaaccctcgcggggtgctggaagacgcgctggatgccttctgccaagtgggccgacagcccctgattgccctggctctgctaggcaacatcagcagcattgccttcttcaacttttcgggcatcagcgtcaccaaggaactgagtgccaccacccgcatggtgctagacaccctgcgcaccatagtcatctgggcctttaccctcgcactgggctgggagatcttctatccattgcagatccttggtttcctcatcctccttatgggcaccgccctctacaatgggctgcaccgaccactgctagccttcctgtccagacgctggcgactccctacccaggagggagagcaagagagactgctaggtgacagtcggactcccatcaatgaagccagctgagcccgcagtgagatctctgctgccaccagatggctgaggccatgcagactggtgggctgtgggtgccctgtccccaaggcctcaccccacccatccctaatgacccctctgtgcggccgttgccagagaggatgggaggataccaggtcttgctttaatcctgaggcctgtaatattgggacccagcccccacaggcccagagatggcaaccactctcagcctccagttctgctgcactagaacaaaattacgagcttgaatggcaagaattcacaaccctggtatttctgttatacactaacttgtcatggtaaattatctagcctatgaaccatacactacaaagaagtcggtgaacaggttcaaatcagaactaagagactattctgcagagttggaagatactcctgaagcctgtctaaaaacctagtttctgacccagccgtggcttggggtgtgcaccaggtctgactgctctgcagcacaggtgtgcataatgtgtctttggtgccttgcagccccaacatcctatggcctctgattgtcactagcctgagaaaagagcagcacacctgtaccccttctccccatggcgggggggggggggggctctttggtatttttgtttttagcttgaggtttttgccattacctgtccctgactgtgctgaaactcatggtgtagaccaggctaacctccaactcacagagatttagcttctacttcctcagtgatggaattaaaggtgtgcatcaccacgcccaacacctccttgatgttttgacttccttgatgttcttcataccctaaggcccctctgcctggaaaaaacaaagggggattccaggcagcccaggaaatcgattctggagcttttttgtttttgtttgtttgttttgttttgttttgttttgtttttgtctgaagcaaaagtcttactgtgtggtaccaacattcaacttcctatgtggcccagagctggccttaaactcagccttcctgcccaagtactgagactataggaaggtaccaacccgacagcagagcttcttccattctcaaggagactgaagcctggagttgtaccttgtttggcaagaggggtctgtgcttactgccagcttgggccaaagacctgagaggcccctgatacaggcagctgcataacactgtattagagaaactcagagccagtgtggccccgctcccaggatccagacccatagcatccacaggatgacagacttagcagatgtcttcctcactcggtaatctgacatccccagcattaggttaaatgcttcaccctcactccctctcatgatgtctgcagaggcaagtgcagagggaaaaaccgccccacccagcaggtgtgacaaattccactactatgcagatctctgtgggcctttggggtggatttctagggctgggctaaagacctaacacactgttaccctgcagaggctgttaccctgaacagaagaaatgcagtcggaaggagccttggagctctggcagcccttaatcacagcattgcttatgagaatggctgagtggccactcactagtaaaacactaacagctttctttgtgaggggaaggggctcttgatgagctaagccctcagtttaatttgattgcaaaagattctaaagatatgtcaaggaaggaaggaactcttcaattccattagtcctgagtccccaagaccccagcttctctggactacaatctgtcacagggagaagtaaatgtgcctctttactcaaggtgacagagacagtgtggcagctggcttgtacaaaaataaaaactgaggccctacaatgttgttttggaatttatttttttaactaaataaaaaattggcaatattagacatttttttaaatgaaagaaaacaggcctaagagtatcaagtagaaaaaatgttgagtgtcaaaagcacaaaggtcatttactccatccagtgaagcccctatagcccaggagcatggagatgcagcgcaggtgaaagcatctgcctcgtgtagccacctgcggccacgctaactaggttcctgagtgggaggccagagctgtatggaaggaaactgtgagagaaataatggaggccaagacatgtttctgttcaaagcccccaagtttactaagagtctgcttataaagaggggaggcccgccaggctgtggtggcgcacgcctttaatcctagcactcgggaggcagaggcaggcggatttctgagttcaaggccagcctggtctacaaagtgagttccaggacagccagggctatacagagaaaccctgtattggggtgaaggggggaaaaaaatatacatttggttatatccacacaatggatacttttatttgtttcttggtgcctacagggaattggtatctagacctcctgtgggtgaagattcaagtcccttatataaagatggtggtgcacgcctgctgcaatgtcagcagttgggaagctgaagcaaggcgctcacctgactaacaggagaacgcactgactaggtggtgtttttaaagcagaatatttgcaaagaacccacatacacctttccatacacacaacctcatctcgacactactttaatgcataacacaatgtaaacnnnnnnnnnnnnnnnnnnnntcgccaatccattcttggtgcctgtagccagcctgtaggtgatctgctggatgctgtctctggaatatctcaagggcctctcagcaggtagcagtgtcttggagaagtgcagcagcaggtgacagaacaatagagtcatctaagtgggaaggctccaccccaggtggtctcattctcagaggcagcaaggtcaaagccagcctactcaaggctgggggaggctacagcctgaaccctcagtgggaggagcaaactagtcctgactttgtccactgaccttcacatgcatgcacccacgctcacacacatgcatatacagatgataatagtcattcaaaaagtcctgaaagagcttccccagggcacagcctattacaatgccagatgcactggttccttacccatccagttctgccacagatggagagaccagagctggtagacagaatctcgcctgccattggctgtccttcttgtggtaaagaggcatgtatcaccatgccccacctgccaacatcctctcaaaacccaagatcagcaggagactctgaaatcttagaagtccggttaccattcttgaacatttgtgtgtgtgtgtggggggggggggttctatgtaacagtcctggctgtcctgggacctaggactccatgtgtaaaccaggctagcctccaagtcacaaagatctttctgcctcaagagtactgggattaaaggtgtgccactgaaagacctctgtggggatacccccacccatgtcacaagataacgcgcacccaaaaaatcacaagagaccatcttgatgcaaacacacaaggtagtttaataacggagctccaggccgacacttatctcatgcaggagacaggtgtcaaccatgaggctcaaaagttaggggtttatataggaaaagagtgggggtaggggaagaattggcgtggcttcacacaattggacagtttaaacatcagcaaactgtagtaacagcagagcatctggttaacatttaacccatgtcagaagggcaggagatagggaggcgccgggccagttgggacattcttgtatgtcttccctatctttatggctagttggttcctgggatgactttacagcctttgttgtttgctctaggcccaaaaagccctcttaactagcaagcggcatgagtcatggaccttgaattttaattttctttcaccaccaccacccagcttgaacattgaacacttttttagacatggggaaactgagttctgaggcaatgccactatggctctcctgctcttaatcctggcattgttcatgggaatggcttagtggcagctcaatagtaaataaaacactaacatccttagtattcagggtttgggggcagtgacctatacaagatcataattcacttttgaaagctgtcttaattcaagagcaagcatgaacactgagctccgttctgtactgctgctatttatgatttatgtagtgccataactaggttctttgccataagataaaactgataacccataaatgaggacacacgctcttttgtagttttatgtgtcccttgctccccacaggtgcacccacctgctgggcttcggaaaggcttctcacgtctggggaggctcacactcagcctcgtgggcatcctgggtgttaagagttcatccatagcctcaggattaccaagatgttccaccacagctcctctgcctgagctccccacaaggagctgcagcaaaggctgcagtgtccccgccctccccctgtggttgtgttctctcggtactgccagtggaatcctctgtaatcactctaggatccaaagcaagcattcatatcagcctgatcacaacaagggagatttgtagccttcaaatttaaagtagtttcccttcagagatgatagaggaggcagcagtgggtgtcagggtagaaagggctgagggccatagtacagcttgctgccgtaggaggcagaaaggcattgtttttagaatgtatttgtcttcaacatattggtcccaaatgtacctccactttgggatcatttgagccacatgggcagaaaggggcagaatcatctttagtgaacctcatctccttttaaaatgtatgtggatgtatgcatctgcatgttcaagtacatgtgtataagcagatgtatgtacatgtttttgcatatgcatgtagaagctacaagacaactttaaggaaatactgtccccagcttataccagtagtactagagcagagtaaacaggatgtgtgggactgagttctgcacaaatgatgggcacggctggtggggaggtagaacgtgctatctgatgtctgcttttgggtgctgggcttcagggaagcactgagacacccatcaggggtgggaaaatgcagtttgagctgtaggaagccgaagctggggttcccgcacccctggacatctagttgctgcttgagagcttcacagaggagtcaggaagaaaggattgaggtccacaggcctgcgatgagaccgggacctttggggcccttgagcacagcaagcatggtgacggtaccataggttgtcttggggcgcagatggaccttaagggcagatttagcctgcagctctgtaagcaaaggccttctctatgctcctccacagcggtttccatagtagatacagtccttggttccaaactgtttattagttgttcatcatggaaaatagatgtgtatcaacttctcagggtggaccacggactaaaaaccttttgccggcagaaatgtccagggagagaagcttattggctaaacccttggggcctatagatacctcgttagcatggagaactctgttttgggctacatgatggccagatggggaaacatggcacgtattccaggccaggaagctggcaggaagctggaggcacctaccatctcaggtgtgtacccgagtttcaggggtctcagactcgctctcactttgtcttaccaagtttcctggcacagttcattatccccacggggatttattaatagaaaggaaagccatagcccaagatggcctttaagaaggaaatgcaacttctaagtcattaaactgtcccagtaatgaaaaagggtcactacctggactgtgcaagagcaaaactaccgtttatggcagtcaagaaagtctccaaagtcacagagccagcaaacaggaagctaggatccaagcttacagaaaagcttgtgtaaggcccacactcaagccatgcccctgagccaatgagagtccaagtggggactatgtgttctgatcatgaaagtggccctaaagttgactgaacccaagaggcctcgtgcttgctaggcaagccctctaacagtgatctatattgctgtctctctttttacttttgattttcatgcagggtctttcaaagttgcccagaccagccttgggcttgccctgtagcttaggcaatccttacattttaggtctgtttcctcagcctcccaagtaggtgagatgaccaccatgacaaccatgcccatcaggattgacatttctcatgccagatctctattgaattatgtagaaaatgtagaagaacagcaggaagaggaggaggaagaagaggaggaagaggaggaggggggagaattcaagctgagtgtggggggcctcaatcgcatagctccctgagtcagatgaacacttctcttctccctccctttctccccacttcccactgtattgctcaagccagactgtatctcttctgggtggttcccaactcccaggtcaccatgttagtaccaaatcagccaagcacatcctaagccagaatgatcttcctgtctgactctagagtagccagggcctcaaatgtgtgcacttgcgccatctcactnnnnnnnnnnnnnnnnnnnnnnnnnnnnnnnnnnnnnnnnnnnnnnnnnnnnnnnnnnnnnnnnnnnnnnnnnnnnnnnnnnnnnnnnnnnnnnnnnnnnnnnnnnnnnnnnnnnnnnnnnnnnnnnnnnnnnnnnnnnnnnnnnnnnnnnnnnnnnnnnnnnnnnnnnnnnnnnnnnnnnnnnnnnnnnnnnnnctaaatccctgaccctgaccctgattagagtctcttgtctgacatgctggcacaactaatttctcccctttctcctatgctgaacttccctgttggttctgagggtttcttttctttctttctttcttttcttttcttttttttttttttttgtttgtttgttttttgagacagggtttctctgtgtagccctggctgtcctggaactcactctctagaccaggctggcctcgaactcagaaatctgcctgcctttgcctcccgagtgctaagattaaaggcgtgcgccaccatgcccggctgctgagggtttctatgatctacatgttacaactcttgttccagtcaactcgtccatagctcagagacatctagtgttcaacgtgacttcttcagcccaatatgttttcattcgatgtatttttaaaaaattagtagtttaatatacggcatgtgggaccgtgttaccagacagacataagaactagaatggttgagtgagctcagatcccaggaatctgagagatctcaggctggtagaagtggagccatgcctacctgctctggaacacataaccatgatactccactgaagacctcaggcactgagtcacccagcacaacatctatagttcttctccatgctaatgagatatctagatagccctgagccttcagccaatgagcgccccttcctagatattccttcccacaagaggtatataatccctggttcaccccaaataaagtatatgcattcacatccatcattaaataaagcaataggagcaagcaaagattgtctcagaaagttgtttcattcagaaacgaggtgaagaaggcctttgactaaagagctgcgcctaagacccctgagcaaggtcttctcctctccagttcttccagcacgctctgccctcactcccagtcagaccaggtttcactcatcctgggctctgcctcgacctctccacctggcatgcccagatgttggaggggggtaaaatcttggacccccattcctgactcctggcagtacaccagtgacagccaggtacccaaagaagaaaccacaaatcacagcatctggcccagacttccactgtttccccttccggcctggtgaaggaagatacaagctgtggatcttcatttcggattttgccctgcgttcttccggtgccccacccccacttgcagtacaacagtccgattggttcaaaagccaaaatatgcaaaactacgtacgttaataagcactaccctcctcttatgccttaacccacacaccattacagttatataggtagtatcatcagtttcttatgaatcgtagagtctgtcctcaatctagctttctccttctagtttactaaagggctatctgtctagagcagacttcatacacggatattatctgactaattaacagttgctgaggatcctgatgtcttcatatatatatatatggacttctggatcatatagtaattctatgtttaaatttcatgtctgttggtaaaatactggagattgaacgagttggttgttggtcttttgtttatttgagacaaaaataaaataaaataaataagataaaatcttgctcatagctctgactagtctggaactcactatgtaggtctactggccctgtccttataacaaacctgcttttacttcccaagtgctgggattaaaggaatacacagatgaagtcagagcacctgtggcccaacctctgaacactgctgcacagaggacaccaaacttttggaggacatttcagattcgaaccatgacacatttccatagcagctgtgccattttacaccacccaccccaatgttccaccaggcttctatgaaaccactgattatataagtattttcctgattagagtacacgttcatgatagatcatttagaaaactcaaaaaagcaaaatgacgaaattctctttattctaattacggagccatgacctgaattcatattactcccgggagaaaaggaaaagccggtttttttctcaggcaattctgtcattgtgtttgatagcatggtccaataatagtgctggcgcctgccctgcctggaccttgtcctcagattcctccgtcctggctgtccccacgaccctatcttctgaaaaggtcatgcagttaaccaggcttctgaatcatatttgctggttgctttcaggagtgtcacgggtgctgtgtggagctgtcacattcttgggcatctgtttccgtatttttaaagccacctcaacgtttgatagaaaagcataaaacttttgaggaagtgagctctacaaacccaccacccacgtaagaactgagccgtcctgcccagagggcatctgaaaaagagatcaacaggaaaagggtggggaaatcctgccttccttcccgtcttcaagtacccattggcttcagacctttattctcattggtttatctggatgtcgctccacgctggctttccagaaccagccactgagagtcacaaagttgggatttaaaagatgcggtgggaggggcgggtgattttttgaactgctggcgaccgagttctggcggtcctgacgcgcaccttgggcttgctcgcgttcggtttcggcagcaggaccaagaaggcttagggaaggcggcgggacccggcccctcgaggccagccatgggcccgcgtcgcaaaccgcagaccccaaggaggagaccctccagcccggcgcctggaccctcgcgacagagctccagtgtaggtaagcgagcctgccctgcacctccgaggccggtgcggtcatcctgtggggccgggcctgtagagggacggttcctggtcacggcttgccgctaacctcgcgtaggggtaatggtttttttgtttatttgtttgtttgtttgcttgtttgttcctgaccggtttacagcagggagaaaaacgaaatgcagacaagacaaggagttggagcaaagacaaactcattctgacggacacggggtctttttttgcatttatttactttgcatgtattttgcatttattttgtgttcgtgctctggcgacggccagaagagagcgtcggaaccccggggccggagttacagttgtgagctgcccttttttttagagtgctaggaagagaactcggcccccctggaagagcagcctgggctattaacagctgaaccagctttctaactcctactctttattatttatttgcagcactagagatggaacccaggactccgtgtatgttaggcaagggttctactacagaactatatccccaaccctctccccgacccttttttttttaagacgggaactcggtatgtatcggtgtgtagccttggcttgctgacctgaaacgtgctatgtagactaggctagcctagagctcacagatctctgcctgtgttggggatggttgtatgcagtgtgtattcaggaactatttctgagatctggttacaatccagacactgcctcaatgtgatgtaaaaactgttttccatcacctctgattggttaatgagctgatcaaccaattggctgggcagaagaaagaagagtgggacttctgttcccaatcagagggtcctgaagagaccaggtgagaagaagagatggagagaccatgtgggtgaagaaggattactcatgaggtctggataagagagcagccatgaggacccacatggaccagagagagccagggcaagatcagatggcaaataatgggtcatatagcctggtaacagcagcctagccgggttagaatatctcagaaccgccgggcgcggtggcgcacgcctttaatcccagcactcgggaggcagaggcaggcggatttctgagttcgaggccagcctggtctacaaagtgagttccaggacagccagagctatacagagaaaccctgcctcaaaaaaaaaaaaaaagaatatctcagaacctacctagcttaatgccagcagcttgttaataaaaaggggggtaaggaaggacttagaattagatttacatgcctgcttctgcttctctggtgcttggattaaaggcatgcaccaccacattctatttctcattgaggtatggtgagcccctaagggaataatgtggtcatggttgtaccgctcgaccagagctgatgttcgatgtggacttccagtgtagaagcaaccttccattactcttatcttagggaaaagttttacatcagctgcgcccacttcttggctctcctactgcccttgtctgctgaccttgttcttccagccatttggtgctttttattcccccctccttcctctccattcagcctcaggccttgctaggtgccccctcctttcccaagtcaaccaacccttcttttatgtgggcccttagacatatctcccttttgtgctgtaagggactttgtgttgttcttgctacataacagctcacggccatctgtaactccatttccaggggatccttctggcctctgcaggtactgcacacacacagacatgcacataggcaaaacagatacacatacacatagaataaaataaaaccattttaggtgtgtgacagtgacatccatgtgtcccaggctaaccctgagctcaggacaccctgtctctgtattccaggtgttggaactgtaggtgagggcctgtgggcctgactggagagagctttagtgtgtaagtcctgcttgaaattctcgggctcccacctgctaacgttgacctttgagacccagcctcagggtgtttgaatgcagttctttccaggtcatctctgatcacttccgtttcataaacacctgtttgtgtatcatgagtcttggagttctcttcctcttctatttctcaaaatctttcttttctgggagagaataagttctctccatgtagcccagtggaggttcctacctctgcctctcagcgatggatcgcacacggcacggcattcagttctctcgctattcaaactccttgagtatagtttattttgattcttggttttggctccttttccttctggtgttagtcacattctttggtggtctctagttgtgttgccttcattttctgtgagtgtgtacctgttaacatcaccctctagcccccaaaagcccagatctcgaaaatggtggggtggggaggaggcagccatttgtagtttatcttttagttatggcccatcatagctagcttcagttgacagcctgatacaaacccaggaaggaggaacttcaactgagcaattacttctatcaaactggctggcctgtggccatgtctgttaagcatttttttttaattgcttatctttgtcagagggccaagtccactgtagcccaccacctcctatctggatttaaagataggggagcaggccgtaagcagcattcctccaaggattctgcctccagattcctgccttgagctcctgccctggcttctgctgatggacggtgagtgacatataagccaaatcaacccttccctctccaggtaggtcttggaggtggtgtttatcacagcaacaacaaccaaagtcgagcagggtcctccctctccgtcttcagtgtctccagtgtctccagtctctacacactgctctgcctctctgtcttcagtgtctccagtctctacacactgctctgcctctctgtcttcagtgtctccagtctcctacacactgctctgcctctctgtcttcagtgtctccagtctctacacactgctctgcctctctgtcttcagtgtctccagtctctacacactgctctgcctctctgtcttcagtgtctccagtctcctacacactgctctgtgtctttgctttatcatcctgacctcaccggtggttaagtctccacctcctgcctggcacaggccgcccctgcactggtcccgtctcccttcttccattttccttgcagtgttcctcactgcttgggatcgaattggctgggctttaaataacctagctaaagctacgtgttcctgttttgcaggactaaggattgaacgcagggccttgtgtgtacaaggcaagtgttcctccggccagttccttgtgtgtgcttctgttttgttttagacataatcattttaatcagtcaattacttatatttattgacagttatactacttacttatttcattttcagtatcactactgtatttaatgtcttgtttatctcaataactaacacttgagttgaatttaactcagctatctttgtgtttttaagatttatttttataagctgggcagtggtggcacatgcctttaatccaagcacttgggagacagaggcaggtggattttgaggccagcctggtctacagagtgagttccaagacagccagggctatacagagaaaccttgtctcgaaaaaccaaaaaacaaaacaaaatcaaaacgatttatttagagggcctggaaattggcttaatagttaggagcactgactgctcttccagaggtctagggtttgattcctagcaccacatagtggctaacaaccatcaacacagtgccagagtagctaactgcccttctaacttctgcaggtaccaggcatacacatgggacacagacatacatgcaggcaaaacacctactatacacaaatatttttttaaattatttatatgtgtgagtgttttacctgcatatatgtgtgactgtatctatatatgtgtgtgtatatacatatatatatgtgagcgtatgaatgtgtatgtgtacagaagtcagacacaggtgtcaggatgttggattctctggaattggagttagatggttgtaagccaccatatggatgttgggcaccaaacctaggtcctctataagaacaacaaatactcttagccaatgaaccatctctccagcccaatttttatgtctaattatatgtatgtgcacattaatacaggttcccaagggggccgatcaccagatcctggccctaaagttacaggcaagtggttataggcagtgtgagccaactgccacaggtgctaggaaccaaacttagatcttctgtaagaatggtacatgctctgacaactgagccatcttcagaccttaactcatttggcattcttgttttctgctagatctatttcaggttattcatttgcttctggtgaatttggggtgtgtcaggttttgagaagaaaatttttatatttttcattttttttaagattttttattatgtaaatacactctgactgtcttcagacattccagaagaggacgtcagatctcattacgaatggttgtgagccaccatgtggttgctgggatttgaactcgggacctttggaagagcagtcagttttcttacctgctgaaccatctcaccagcccccatatttttcattttaagtagtctaatatcagttaagtttcttcttcaacattttagagagttagaagtgtgttttctgtctgtgttgtgggggattgaacccatggcttcgtgcatgttagcaagcacatcacggcagagccacagctccagagcaaaatggtttggtttggtttttaattttgtatttttgttttctaatgagaatttgaatttttaccaaaccttgtggcttcaccatccacattccagacagtagcactgagttacaccctttccaaggtcccaacttggtctctaatgaatgctagccaactgtttccacttcccaaggctccagggtaatcaagacaagggatttgtactagatactcctaattccttccagctaatgagaagaaagacaaggacctaaaaactgaaattgctaactttccagtctggtgggaaggacatgagatccatgaatcctgtgggccctgacaggttgggtctgtagggatggaactgcagtctgggaaaggctttgtggaaggtaatgtacaaaccccaaagctcagagcaaattcatttcccaggcatttcttaagcccctgtcagcttgctctgaggatgtagttccatgctgaagtctgttgccttcgtgggaaggtttgtgtctgctgtgctgccacatacttccactgcctctgccttcatgacctacctcttctgctcaggctctcagacactgcgcagaagacagaaattcatgtggcttaaggaaatcaagaccctgcagaagagcacagacctcttgttcaggaagaagcctttcagcatggttgtaagttctagaggcctttactcagtcctgggccaccttttctataattctcccaaatgtgcaggatgcttgtgcatctcactgatgtggctggaggttgtctccaaccctctgagtcactgcacaccctcagtttttatgatactgatttcttctccttacccctgactataatagaacctctcacccggtttacctccctaccctgaggttgccttgtttcctcaccacccgtaagccatgccagttcctaagctcctgggagtccgtgcctactgagccaggccctgaggtcaagggccaagacataatggtagacatggatgcattagatacttgagaaagtccctcgtccacttttcagtcactgttctgtggctctctgctcatccccgtcccactcctccacaggttagagaaatatgtgagaagttcagccgtggtgtggatttttggtggcaagcccaggccttgttggcccttcaggaggtaagaaggggcagagatgagtgaaggcagaaaggaagtacaccccagagctccacaggagcttatggcctaccacaggctgtgtctggcctcctgaaaagaacagccaatgtgtaacacgtgagggtgtggaagcgggtctgatgggtggctcctggatccaccttgttctttgcttcagtcctttgagtctgtctgtcccctcagccacgtcagtgttctcttctgcccaggcagcagaagctttcctcatccacctctttgaggacgcctacctcctctccttacatgctggtcgggtcacgcttttccccaaagacattcagttgaccaggagaatccgaggcttcgagggcggactcccctaagctgccagtggaatgtgtaagtcctccctgatcctcagagtgctgcttgtggctgggaaaagactgctctgaaggaggagtggcagccatgcccatccttagtccctcgccctctcacctgtgctccctaaggaaggcctgagccctgtccctttgtgcagtattaagataagagtggagcttcacgcttgtaagccaacactcgggaagcccaagaccaatgtgagcatctcacgcgtgcggatgggtgcctgccagcactatagactgagatctttttaaaaacaagtgaacggatgagttgtgctccgtatttctgatggtacttcttaccattttacaaagcctagacccccctgccccacccctccatcgccactttagtaagggtcttattatgtaattctggctgtcttggaactgtatagagcaaggtggcctcagactcacaaaaatctcctccctctgcctcccgagtgctgggattaaagttgtgtgccactatgcccagctttgggtcctcgaattttaagaagaagggggtgtttgtttgtttgtttgtttgtttttaaatgccttgttagtaaataatgattcctaaatttcacagacattacctggaagcttttggagttgcagcttgacagtggtgtcggaggagctggctgggttttgctgtttttaaatactggctacacggtgcccttaaaactgtctctgaaggagaagactgtggccttcccccgacacagaggtctgcccactcgctcccatggactcgagtgtttgcagaccaaaggtcaatttggtttgtgaattgctcagccctatggctgaaggtttcagacacccgatacctgccatggtatggttatttcactcttactgctctgtttgcatcttttactattagtttttgtacttttatttaaaatataaggaagaaaaacctgaataaagcgcttgaatctgttgtatgtgagccgtggcagtcccgccatataaatgcctgccttccagagtgacctcatcctgtcatccatgtttgtctgtcagtcagcaaacatgcagctcttctttaaaacctaagtagaattacatacaaaatcttttcttctcttcaagactggggctcgaattcaaagatttgtacatgccaagcatggactataatgctgaactacatccacagcctgaagtagatgtctttctggttcctaccagtgaattcctatcaaaaacgtccagagtctcttatctttagctctaaatcatataaaatgtctcatatcagtctggaattttaaaatgtgttttcagaatttttacagattaattttagcttatttggggagaaataataaaaaataaataaaaataaaaataattccttaatgaaagaattgaagtaaagttactgtaatagatgttcatgcttttttagtaaatattaagctcatcattttataccctttgaagcagttataacggaaacaagagaagtgagatgtgcagatttcccactgatgaaaggaacacacagaaaacctgccctctgtactctcgataagagcaatgtaagaggtttgcagtaacgggacacgccacctcctggcttgaggtgctgtggtgagaccgcagtgagcacaaactcctgatgaagacatggctgctgactgaaccgctccataaacttaccctttacaaacacttaccgacggatcagatacatgcagagggtcaaatacagctcgtctgtggtgatcttagaattcttttcaagtgccaagcaggaccagtgttctcaggactgcagtgtttatatgagaataagtgttttacgtcctggtaactaatagcatgtaatgtgtaatgttatggtttaccagcatatggttttaacagcatacgtgaggttccttacttagtcagacaatctctggtgtttccaggatccactgtctcccagtatgggatacatcgatctttccagtatgggacacaacctgatgccatcatatccggcttattctgtggatcctggggatgagacaggtccttgtgagcactttaacaacagagccagccctcagcccagtgctgttgagcttgtgtgtggtctgagatatccctcactgcacatgtatagagagcgttgcagatacctgggcttggatggcacaactggagggctttgtgggctgtagtctggccttccttcccagttgataaccatgctgcagtcattagctgcttctgtccctcgtcttccctactgtgacacttgttatctcctgaagcgagagtccaaataagcaccccttcccttaagctgcttctgctgagcatatggtcacagagttaagttagctaatataaaccctaattctcattcattagcttgtttgagatgaggtcctgctatgtaaccagtttgttcttgaacttgtttctgcctctgcctcccaggtgcccgaattgggtgcggcacccacggcctggtttctgcctttctctgctagaaatctcatcctttcctaaccttcccattaagtttatttctgttttcacatttttaatatccaaggcctttttcttattttttgactttctttttttaatacataaaatgccagtcacacttaactcagtaaaacaaaccactatcgctgctaaaatcaaagaggtattgatggagaagacaaagagatcagggagcctctgctgccacaaacccaccctcatggtggctctgtaggaatgaatcacggtccccaccgtcataacactgacctggctgtctcctcacactgagcagagggccatgcctgtcagctgctgcccctcaaaagcactgccgaagtaggaaagagagagatcttccctgctcctcttactctccaggtccttcccagaacctaagcagaagcagccacacgggagtctgagaatgcccctggccaagcttctagcctcctttgttagaagagtgggtagggaccaagccaaaagaatcaagtagctcttgtcgtatgagtgcaatggcactttacgtctgtgattttctgtttttgtttttctatgtagtaactttgctccaagttactccctcgacaccctttaggtgttgtagtctctttaaagatctcctttcgcagctaacttcatttgcttgaggatggagacaaaagctaattaagaggtatgagcatgtggctgggacttgtcgagtttgagctttcctagagaaggctcagataaacattttagaggccctcatgtcccttcaggataaagacatgcccagagggggcctaaggcctaggtgggtttaagaactgatgcccatatgcaaaacctctgcacaaacctccaacatgcccatgcctggctttggcctccttgcatccagaggcccctctaataactgtaagggggcattgaggaaaggcagctgtgtagtgagtggtaagaggaacttgtaagggtttgattgtttgctagtgaccctgcagccagtcctgcccagctcccagggcttcggttgcagaaggatttgatgacatcagtgtggggctggcgaaggctgttgtggttgtgtagaatgtgctggttcggctttgcctcagacgtcttcggagcggctggaatcagtgtctgcttgtccctctgcttttaactttggaaagtgtagctgccttgccctccgtggttctcctcatctctgtgagtttgggatgattttcttaagtctggacagaatcttggtttggcagttttctttcttgacgtgagaaggctatctccatggttttctgggttctgttttcccccctgttgagctatccccgcaacccttcctcttagaagcaaatactatatccttgatttatcttttcttcaaagatgtttccttgtttctggtgttctgcaatgccattatgatgtgtctaaatgcagatttctttttcttagtttgcttgacatacattgggcttcttgaatatgaatatgaatatatcttttcatcagttctcacccattatttcttcaacactgcctctccccagtctctcttctcccaccccagttccagtcacctgttcttcaggctcttccctgtgtcctctatcactgctttcagatgacttctgccccacctcctaatgcattgaagttggtttttttttttttcttttcagctcttcctaatttacttttaaacctttcgattttcttttcttttttttctttcttcctttattttattttttcatgtttattctgttttgagataaggtctcattatatggtctggaaaacagagggatattcctgtcactgcccactatgctgagattaaacatgtgtatcttctggcctttgtccattttcttagtttagttgttgtgaggtataatggcacctattcctggttgtcaacttgactatatctggaatgaactacaatccagaattggagggcacacccatgatccagatcttgaggctggaagatacaagtttctgatctggatctttgctacatccactccagtagtgacacatgcgacgggccccaaaaacctggacgctgtcctgaggtgaaaagttcacggaaacttagtctcctggaaatttggcattcccatagctagaatgccccagatttgtccctgtgatattgtggagggtcttgcatgctttcttacagtatcttactggataagagaaatctcagggcacgctactcccatatgcaggaatttaccattatctaggaagaagaaaggttgaggtctaaggaggaaccagagtagatacgtagagctatagatagggctggtgaggggctggtgagatggctcagtgggtaaaagcacccgactgctcttccaaaggtctggagttcaaatcccagcaaccacaaggtgactcacaaccatccataatgagatctgactccctcttctagagtgtctgaagacagctacagtgtatttacatataataaataagtcttagataggactggtgaggtggctcagcaggtaagagcaccaactgctcttctgaaggtcctgagttcaaatcccagcaaccacatggtggctcacgaccacctgtaatgagatttgacatcctctctggtgcgtctgaagatagctacagtatacttgtgtataataataaataaatctttgagccagagccagagaggttgaccagagcagcgggcagaggtcctaaattcaattcccaacaaccacatgaaggctcacaaccatctgcacagctacagtgtactcatatacattaaatacataattaaagttttttttttaaagaactatagatagctgagttacacccatacacaggaatttacaatggcctagcaactctatgtccatctgtccgagaccctgattcccacagattgatgggggccaactaggcccagtaaatggcggatcttgatatgacgatcttgaagcatagtggctatggaaagcttaggcccagacaaggtagaacacgcctttaatcccaggagactgaggcaaggagatttctgagttcaaggtcagcctgggacaaaacaagacccagttccaagcatggaggtacacacctttaatctggaccacacctccttctggagacccatataaggacattggcagaagaaagattcactcttctctcctgcttgcatttatttgccagcacatctgttgagacctacttctccaaaagaccagaagaaacaactagcctgtgggactgagcaactaccagattcttggacttcccattcacagctgcccattgttgggttagttagactgtaggtcatcacaacaaattcccttaatatatatatagacactccataagttctgcgactctagagaaccacaagacataaggtttgttctgtttcatttttcatttcttagttctgtaattactatttggttcttcttgcttgttactatactgttttgttcttcagacagtgtctcacatagcctgctgtggggccaaatgtaccttaaacttactctcctgcctctgtttcccaatgctgagtgctcaatgtcaggcctgacaccgtgatggctgattgtcttctcatcttaatgttactttttaaagtttcttatccagttgtggtctgccctaccaagcatagccgtagccattttgttccatgcctgccagtcactgatacagaaaataactcgactcagagcaaggtcgtgctgaccacatcccctgatctgttctgtgtgaggtttgctattccacagagctttacataggacccatcaagttaaaggtcaacacgaactgttacgtctaaaatggcttgagtcagagccaccactgggcagtacttcctgcacctgtgtatgagctcatattcagttgtggtttttttcttttataagctggccctggatacatgttgagagctgtggctcagcccctgaattccaagctacagccctgattgatcagtcttagggtgtatgttcagtaaaccatccttgactgactgagattggtgtttgcttaatttgtgggttgactcttgaaccccaacaattccccgcagaaagctccaaatctggtcccatttactgctttaataacataagcgtagttgtttccaggctgtgtccggtgattcgaatgtcttgagtccctatgcatttgtttctatacatggtttcagttagttctcacggcttctcgtgtcttcagtgcctgtcacagctatatggggagaaaatgtgaggtctcagatgccatcttctagagagcatccttcctctctcaccagctaccttgaggcaccgaacatccagaacctcaaaggttttgcacgcctttgaaaaagtgtcacaagtcgcaatttcacagccctgcagcaccagtataacagagtcagtgactgtcattcacttcactctacaggagcagccagctttttccaggtcgcctcctatgctttagtctccacctctgtgtgtgtgtctgtatgtgtgtgtgtctgtatgtgtgtgtgtctgtatgtatgtgtgtgtgtgtgtgtgcgcgcgtgcgcgcgcgcgcaaaagtcagagaagaatgtcaggtgtctcctttgtcattccccaccttatttccttgagacagagcttctactgaacctggaagctgcctgaccctcagccaggctatagtcagcaaatgcagcaatcctcctgtctctagcctcctccaccccagcacttgggttacaaatgcataaggccatacttagctttttacttatgtgttagggatctgaactcgggtcctcatgtctgcatggcaggaactttaacagctgagccctctctccaacccctcattgattttttttttaattgaagtatttgcatgcctttgaaaaagtgtcacaagtcacaatttcacagccctgcagcaccagtataacagtgcgcaggtcgagaatcagacatttccagctcccgagacacctgccctgggccccactcaaatagatgtctgctttgccaaggatagtaatccgatttatagattggcatgagctgttgttagaagtggtcaaggctatgttctcctgggtatcctgctctacgtttgtgagatctgtatttttttcattcaactgtgctaattcccatggctgtgtgatcacagcctacatgagtcctgcttccttggtctcaaacaatctcaattgaaagaaaaatttgggagaaacggcatctgtgctgaacatacacaggttttagtcttgtgacttattctcccaaacaacaacaatggtttacattgtgttatgcattaaagtagtgtcgagatgaggttgtgtgtatggaaaggtgtatgtgggttctttgcaaatattctgctttaaaaacaccacctagtcagtgcgttctcctgttagtcaggtgagcgccttgcttcagcttcccaactgctgacattgcagcaggcgtgcaccaccatctttatataagggacttgaatcttcacccacaggaggtctagataccaattccctgtaggcaccaagaaacaaataaaagtatccattgtgtggatataaccaaatgtatattttttcattatattggacactgggatagattcatacttaaagctattataaatataggactttatcctgctttaaaatgtacgagatgtaagtgtttttcaaatattgtaaagaaaccaatttcaattaaaaaataaagtctgaatttctacataattctatggatgtatatttcatgcatgtttcagagaaaagccacggctaaaattggaccttcagcccttctggcaatgggcaaagagcttcattgtcggaggtggtgttcttctatcagtcaggggcagagcagaaggcaggcctttgttcatcctagcttgatgcctggcttggtggccaaagctgttttatgacaagggctcataaaaatcaaatcaaatccaggcagcacagcatgggaagagggagacagaaacctgcacactgccatgtcacccatagacctgccctccagtccatggaacaggccagccattgatacccgtttgccaccacaccactcagcatgtatggaggatgttacctaggggcctgccagcggagtggccagcttacagcgggagcggccataatatgagtatgtggtaggtggtcatacaggggagaaagagaagaggagtggcttgagcagcgtgaagagagatggaactggggactgagggtggagaggaggggcctactgtaagtggccagccctgccacctggggccatggtgaggacccagtccattccatctttgctgtggactgggggtgataaaggatatgaaaatatcaagggatgttgaggactttagacagggtttgagaaacttgagtggtgaattcaggaccattgactggagggaggctgagattccaacctgaaggatgatctcacagaggaagagatcagaaattaggtctaatttctctgacaagtgtgctacgggtgcaaaggaggatcccagttggtgacccagaactctgagggcaaatccctcctttctgttacagaggtggagaagggacaggtcatcactggcagtgtgagctggaacctgaagcaaggcctgttggagatcttagaagatgagactctatagccttggctggacaggaaatttagaagagcagagttattactttagccagacagattgcatcaacatatgaaataagagtagatttagggagagacagagagtagtaggtcagaagccaggccctggcgcagtaagtatgggccagcctggaccccctaaggtagcacagtctacgtgtgttgggtagagaagtgggtgtcatggtcagtccaggtaaagacagagacgttgtatctaggtatccaggggagtagagaagaatgcaaccttgaagtctaggactgagaaatgcgaggttcctaaagggatagtggaaagaagagtgtaagggttagccacaacaggatggagaggaaccactagagaattaagaaggtggagatcttgaaccaggcaataggtcttgttgggttttgttcagtggctgctcttccaaaggacccagttcaagccccagcacctacatcacagccatctgtatctccatttccagggatccagtgccctcttctggcctctgcaggcaccaggcattcaggaggttcacagatcttataagggtccatgatttgccaaagaatgataccctggactcacatagtatgtaaacacaaagagtgttttattctgcagaagtccagcctgctggggcctccaattaccaagatagagagacaaccaagtgagcttgcaggccagatttaaagcacattaggggattctggggtaggtgacctttatcttgttccatctctaaggatattccattaccagggtgtgggggctggaaactgctgctgacccattgtccttgcctcagggcaggggcaggaccccttctgaggcctggatttaccagtcctggcaatttgaggcctgttgtagagccagcctagccttctcaatagattatattcaggcaaaacacccatattcctaaatataacataaaataaaataaacaccatagattttatgagaaaaatacattgacaaaacatgtcaaagtctaattcccatgtcatgtgccatcttaaaagtgaggggtaattatttggagagatttgggaactagtagtgtatgtataagagctctataaacctagaagagacgtaaggaaataagagaagatagacttcagttttcaaagacaatggcaatcagtggaggctcagtcatgtccagttttctactgctcaaatatatttcagcatatattctgctctatatgctatgagcgaaaagaaatctggagattttatctgagtctgggtgagatgcaggagactttctggtggtgaaggttctgggtagttgttagcctgtaggtttctcttttttctccaatatttccatgtatgtgtacatatgcatgttttcatgtatatgggcacacatgtatatggacatgtgggtgcaactttaatttttttctaaacctttttttaattgtatttattatttaatgtgagtgctctgctgcacatatgtccacctgcctgaagggggcagcagaatccccctatagatgattgtgagccaccatgtggttgctgggaattgaactcatgacctctggaagagcagccagtgctcttaaccgatgagccatctaaccagcccccaaaaccttctttgaacgatggtttttcaaatgctctaacttcctttctagcccaccacccatcagaggtagtggaaaagaacggttattagggtacaggggaagtagacctgtttagaaatggttcttgtgaagcaaatcccatctgtgttgtcaggaattcagtggttcagttcacaagtcggcagtggcagctcgatccactcaaaaacacttcgcagatacagcagcagtcagttcagtagcgtctggacagcggtggcaggacctatcaggaacagcgaggcctcagctgaatcggcaggagtcagcaggagggactcagactcgatgggatgctagaagttctctgccctgcctctttcaatgaagcaaagatcagcaaaggcacaagaccaataagcatggtacagctagcaagcccctcttaaaatccatcgagtcctatttatactccctccaaacatcatcatgtgtcctccctggtcttgcttcatcaagtgtcttccctgagcgtgtgagtctgactcatctgacatcactcac

SEQ ID NO: 1595 - DNA, 968 bp, Mus musculus
gtgattttttgaactgctggcgaccgagttctggcggtcctgacgcgcaccttgggcttgctcgcgttcggtttcggcagcaggaccaagaaggcttagggaaggcggcgggacccggcccctcgaggccagccatgggcccgcgtcgcaaaccgcagaccccaaggaggagaccctccagcccggcgcctggaccctcgcgacagagctccagtgtaggtgttggaactgtaggtgagggcctgtgggcctgactggagagagctttagtgtagggccaagtccactgtagcccaccacctcctatctggatttaaagataggggagcaggccgtaagcagcattcctccaaggattctgcctccagattcctgccttgagctcctgccctggcttctgctgatggacggctctcagacactgcgcagaagacagaaattcatgtggcttaaggaaatcaagaccctgcagaagagcacagacctcttgttcaggaagaagcctttcagcatggttgttagagaaatatgtgagaagttcagccgtggtgtggatttttggtggcaagcccaggccttgttggcccttcaggaggcagcagaagctttcctcatccacctctttgaggacgcctacctcctctccttacatgctggtcgggtcacgcttttccccaaagacattcagttgaccaggagaatccgaggcttcgagggcggactcccctaagctgccagtggaatgtacattacctggaagcttttggagttgcagcttgacagtggtgtcggaggagctggctgggttttgctgtttttaaatactggctacacggtgcccttaaaactgtctctgaaggagaagactgtggccttcccccgacacagaggtctgcccactcgctcccatggactcgagtgtttgcagaccaaaggtcaatttggtttgtgaattgctcagccctatg

SEQ ID NO: 1596 - protein, 39 aa, Mus musculus
MGPRRKPQTPRRRPSSPAPGPSRQSSSVGVGTVGEGLWA

SEQ ID NO: 1597 - DNA, 1344 bp, Mus musculus
gtgattttttgaactgctggcgaccgagttctggcggtcctgacgcgcaccttgggcttgctcgcgttcggtttcggcagcaggaccaagaaggcttagggaaggcggcgggacccggcccctcgaggccagccatgggcccgcgtcgcaaaccgcagaccccaaggaggagaccctccagcccggcgcctggaccctcgcgacagagctccagtgtaggctctcagacactgcgcagaagacagaaattcatgtggcttaaggaaatcaagaccctgcagaagagcacagacctcttgttcaggaagaagcctttcagcatggttgttagagaaatatgtgagaagttcagccgtggtgtggatttttggtggcaagcccaggccttgttggcccttcaggaggcagcagaagctttcctcatccacctctttgaggacgcctacctcctctccttacatgctggtcgggtcacgcttttccccaaagacattcagttgaccaggagaatccgaggcttcgagggcggactcccctaagctgccagtggaatgtacattacctggaagcttttggagttgcagcttgacagtggtgtcggaggagctggctgggttttgctgtttttaaatactggctacacggtgcccttaaaactgtctctgaaggagaagactgtggccttcccccgacacagaggtctgcccactcgctcccatggactcgagtgtttgcagaccaaaggtcaatttggtttgtgaattgctcagccctatggctgaaggtttcagacacccgatacctgccatggtatggttatttcactcttactgctctgtttgcatcttttactattagtttttgtacttttatttaaaatataaggaagaaaaacctgaataaagcgcttgaatctgttgtatgtgagccgtggcagtcccgccatataaatgcctgccttccagagtgacctcatcctgtcatccatgtttgtctgtcagtcagcaaacatgcagctcttctttaaaacctaagtagaattacatacaaaatcttttcttctcttcaagactggggctcgaattcaaagatttgtacatgccaagcatggactataatgctgaactacatccacagcctgaagtagatgtctttctggttcctaccagtgaattcctatcaaaaacgtccagagtctcttatctttagctctaaatcatataaaatgtctcatatcagtctggaattttaaaatgtgttttcagaatttttacagattaattttagcttatttggggagaaataataaaaaataaataaaaataaaaataattccttaatgaa

SEQ ID NO: 1598 - protein, 134 aa, Mus musculus
MGPRRKPQTPRRRPSSPAPGPSRQSSSVGSQTLRRRQKFMWLKEIKTLQKSTDLLFRKKPFSMVVREICEKFSRGVDFWWQAQALLALQEAAEAFLIHLFEDAYLLSLHAGRVTLFPKDIQLTRRIRGFEGGLP

SEQ ID NO: 1599 - DNA, 868 bp, Mus musculus
gtgattttttgaactgctggcgaccgagttctggcggtcctgacgcgcaccttgggcttgctcgcgttcggtttcggcagcaggaccaagaaggcttagggaaggcggcgggacccggcccctcgaggccagccatgggcccgcgtcgcaaaccgcagaccccaaggaggagaccctccagcccggcgcctggaccctcgcgacagagctccagtgtagagggccaagtccactgtagcccaccacctcctatctggatttaaagataggggagcaggccgtaagcagcattcctccaaggattctgcctccagattcctgccttgagctcctgccctggcttctgctgatggacggctctcagacactgcgcagaagacagaaattcatgtggcttaaggaaatcaagaccctgcagaagagcacagacctcttgttcaggaagaagcctttcagcatggttgttagagaaatatgtgagaagttcagccgtggtgtggatttttggtggcaagcccaggccttgttggcccttcaggaggcagcagaagctttcctcatccacctctttgaggacgcctacctcctctccttacatgctggtcgggtcacgcttttccccaaagacattcagttgaccaggagaatccgaggcttcgagggcggactcccctaagctgccagtggaatgtacattacctggaagcttttggagttgcagcttgacagtggtgtcggaggagctggctgggttttgctgtttttaaatactggctacacggtgcccttaaaactgtctctgaaggagaagactgtggccttcccccgacacagaggtctgcccactcgctcccatggactcgagtgt

SEQ ID NO: 1600 - protein, 42 aa, Mus musculus
MGPRRKPQTPRRRPSSPAPGPSRQSSSVEGQVHCSPPPPIWI

SEQ ID NO: 1601 - DNA, 475 bp, Mus musculus
gtgattttttgaactgctggcgaccgagttctggcggtcctgacgcgcaccttgggcttgctcgcgttcggtttcggcagcaggaccaagaaggcttagggaaggcggcgggacccggcccctcgaggccagccatgggcccgcgtcgcaaaccgcagaccccaaggaggagaccctccagcccggcgcctggaccctcgcgacagagctccagtgtaggctctcagacactgcgcagaagacagaaattcatgtggcttaaggaaatcaagaccctgcagaagagcacagacctcttgttcaggaagaagcctttcagcatggttgttagagaaatatgtgagaagttcagccgtggtgtggatttttggtggcaagcccaggccttgttggcccttcaggagacattacctggaagcttttggagttgcagcttgacagtggtgtcggaggagctggctgggttttgctgttt

SEQ ID NO: 1602 - protein, 114 aa, Mus musculus
  VARIANT (1)...(114): Xaa = Any Amino Acid
MGPRRKPQTPRRRPSSPAPGPSRQSSSVGSQTLRRRQKFMWLKEIKTLQKSTDLLFRKKPFSMVVREICEKFSRGVDFWWQAQALLALQETLPGSFWSCSLTVVSEELAGFCCX
